United States Patent Application Publication US 2024/0252682 A1 - sequence listing, part 4

SEQ ID NO: 2431 - protein, 2096 aa, synthetic construct
MPAAKRVKLDGGDKKYSIGLDIGTNSVGWAVITDEYKVPSKKFKVLGNTDRHSIKKNLIGALLFDSGETAEATRLKRTARRRYTRRKNRICYLQEIFSNEMAKVDDSFFHRLEESFLVEEDKKHERHPIFGNIVDEVAYHEKYPTIYHLRKKLVDSTDKADLRLIYLALAHMIKFRGHFLIEGDLNPDNSDVDKLFIQLVQTYNQLFEENPINASGVDAKAILSARLSKSRRLENLIAQLPGEKKNGLFGNLIALSLGLTPNFKSNFDLAEDAKLQLSKDTYDDDLDNLLAQIGDQYADLFLAAKNLSDAILLSDILRVNTEITKAPLSASMIKRYDEHHQDLTLLKALVRQQLPEKYKEIFFDQSKNGYAGYIDGGASQEEFYKFIKPILEKMDGTEELLVKLNREDLLRKQRTFDNGSIPHQIHLGELHAILRRQEDFYPFLKDNREKIEKILTFRIPYYVGPLARGNSRFAWMTRKSEETITPWNFEEVVDKGASAQSFIERMTNFDKNLPNEKVLPKHSLLYEYFTVYNELTKVKYVTEGMRKPAFLSGEQKKAIVDLLFKTNRKVTVKQLKEDYFKKIECFDSVEISGVEDRFNASLGTYHDLLKIIKDKDFLDNEENEDILEDIVLTLTLFEDREMIEERLKTYAHLFDDKVMKQLKRRRYTGWGRLSRKLINGIRDKQSGKTILDFLKSDGFANRNFMQLIHDDSLTFKEDIQKAQVSGQGDSLHEHIANLAGSPAIKKGILQTVKVVDELVKVMGRHKPENIVIEMARENQTTQKGQKNSRERMKRIEEGIKELGSQILKEHPVENTQLQNEKLYLYYLQNGRDMYVDQELDINRLSDYDVDHIVPQSFLKDDSIDNKVLTRSDKARGKSDNVPSEEVVKKMKNYWRQLLNAKLITQRKFDNLTKAERGGLSELDKAGFIKRQLVETRQITKHVAQILDSRMNTKYDENDKLIREVKVITLKSKLVSDFRKDFQFYKVREINNYHHAHDAYLNAVVGTALIKKYPKLESEFVYGDYKVYDVRKMIAKSEQEIGKATAKYFFYSNIMNFFKTEITLANGEIRKRPLIETNGETGEIVWDKGRDFATVRKVLSMPQVNIVKKTEVQTGGFSKESILPKRNSDKLIARKKDWDPKKYGGFDSPTVAYSVLVVAKVEKGKSKKLKSVKELLGITIMERSSFEKNPIDFLEAKGYKEVKKDLIIKLPKYSLFELENGRKRMLASAGELQKGNELALPSKYVNFLYLASHYEKLKGSPEDNEQKQLFVEQHKHYLDEIIEQISEFSKRVILADANLDKVLSAYNKHRDKPIREQAENIIHLFTLTNLGAPAAFKYFDTTIDRKRYTSTKEVLDATLIHQSITGLYETRIDLSQLGGDGGEAAAKPAPGGSGGTLNIEDEYRLHETSKGPDVPLGSTWLSDFPQAWAETGGMGLAFRQAPLIISLKATSTPVSIKQYPMSQEARLGIKPHIQRLLDQGILVPCQSPWNTPLLPVKKPGTNDYRPVQDLREVNKRVEDIHPTVPNPYNLLSGLPPSHQWYTVLDLKDAFFCLRLHPTSQSLFAFEWKDPEMGISGQLTWTRLPQGFKNSPTLFNEALHRDLADFRIQHPDLILLQYVDDLLLAATSELDCQQGTRALLQTLGDLGYRASAKKAQICQKQVKYLGYLLKEGQRWLTEARKETVMGQPTPKTPRQLREFLGKAGLCRLFIPGFAEMAAPLYPLTKPGTLFKWGPDQQKAYQEIKQALLTAPALGLPDLTKPFELFVDEKQGYAKGVLTQKLGPWRRPVAYLSKKLDPVAAGWPPCLRMVAAIAVLTKDVGKLTMGQPLVILAPHAVEALVKQPPDRWLSNARMTHYQALLLDTDRVQFGPIVALNPATLLPLPEEGLQHDCLDILAEAHGTRPDLTDQPLPDADHTWYTDGSSFLQEGQRRAGAAVTTETEVIWAKALPAGTSAQRAELIALTQALKMAAGKKLNVYTDSRYAFATAHIHGEIYRRRGWLTSEGKEIKNKDEILALLKALFLPKRLSIIHCPGHQKGNHAEARGNRMADQAAREVATRETPETSTLLAGKRTADGSEFEKRTADGSEFESPKKKAKVE

SEQ ID NO: 2432 - protein, 2094 aa, synthetic construct
MPAAKRVKLDGGDKKYSIGLDIGTNSVGWAVITDEYKVPSKKFKVLGNTDRHSIKKNLIGALLFDSGETAEATRLKRTARRRYTRRKNRICYLQEIFSNEMAKVDDSFFHRLEESFLVEEDKKHERHPIFGNIVDEVAYHEKYPTIYHLRKKLVDSTDKADLRLIYLALAHMIKFRGHFLIEGDLNPDNSDVDKLFIQLVQTYNQLFEENPINASGVDAKAILSARLSKSRRLENLIAQLPGEKKNGLFGNLIALSLGLTPNFKSNFDLAEDAKLQLSKDTYDDDLDNLLAQIGDQYADLFLAAKNLSDAILLSDILRVNTEITKAPLSASMIKRYDEHHQDLTLLKALVRQQLPEKYKEIFFDQSKNGYAGYIDGGASQEEFYKFIKPILEKMDGTEELLVKLNREDLLRKQRTFDNGSIPHQIHLGELHAILRRQEDFYPFLKDNREKIEKILTFRIPYYVGPLARGNSRFAWMTRKSEETITPWNFEEVVDKGASAQSFIERMTNFDKNLPNEKVLPKHSLLYEYFTVYNELTKVKYVTEGMRKPAFLSGEQKKAIVDLLFKTNRKVTVKQLKEDYFKKIECFDSVEISGVEDRFNASLGTYHDLLKIIKDKDFLDNEENEDILEDIVLTLTLFEDREMIEERLKTYAHLFDDKVMKQLKRRRYTGWGRLSRKLINGIRDKQSGKTILDFLKSDGFANRNFMQLIHDDSLTFKEDIQKAQVSGQGDSLHEHIANLAGSPAIKKGILQTVKVVDELVKVMGRHKPENIVIEMARENQTTQKGQKNSRERMKRIEEGIKELGSQILKEHPVENTQLQNEKLYLYYLQNGRDMYVDQELDINRLSDYDVDHIVPQSFLKDDSIDNKVLTRSDKARGKSDNVPSEEVVKKMKNYWRQLLNAKLITQRKFDNLTKAERGGLSELDKAGFIKRQLVETRQITKHVAQILDSRMNTKYDENDKLIREVKVITLKSKLVSDFRKDFQFYKVREINNYHHAHDAYLNAVVGTALIKKYPKLESEFVYGDYKVYDVRKMIAKSEQEIGKATAKYFFYSNIMNFFKTEITLANGEIRKRPLIETNGETGEIVWDKGRDFATVRKVLSMPQVNIVKKTEVQTGGFSKESILPKRNSDKLIARKKDWDPKKYGGFDSPTVAYSVLVVAKVEKGKSKKLKSVKELLGITIMERSSFEKNPIDFLEAKGYKEVKKDLIIKLPKYSLFELENGRKRMLASAGELQKGNELALPSKYVNFLYLASHYEKLKGSPEDNEQKQLFVEQHKHYLDEIIEQISEFSKRVILADANLDKVLSAYNKHRDKPIREQAENIIHLFTLTNLGAPAAFKYFDTTIDRKRYTSTKEVLDATLIHQSITGLYETRIDLSQLGGDGGPAPGGSGGGGGTLNIEDEYRLHETSKGPDVPLGSTWLSDFPQAWAETGGMGLAFRQAPLIISLKATSTPVSIKQYPMSQEARLGIKPHIQRLLDQGILVPCQSPWNTPLLPVKKPGTNDYRPVQDLREVNKRVEDIHPTVPNPYNLLSGLPPSHQWYTVLDLKDAFFCLRLHPTSQSLFAFEWKDPEMGISGQLTWTRLPQGFKNSPTLFNEALHRDLADFRIQHPDLILLQYVDDLLLAATSELDCQQGTRALLQTLGDLGYRASAKKAQICQKQVKYLGYLLKEGQRWLTEARKETVMGQPTPKTPRQLREFLGKAGLCRLFIPGFAEMAAPLYPLTKPGTLFKWGPDQQKAYQEIKQALLTAPALGLPDLTKPFELFVDEKQGYAKGVLTQKLGPWRRPVAYLSKKLDPVAAGWPPCLRMVAAIAVLTKDVGKLTMGQPLVILAPHAVEALVKQPPDRWLSNARMTHYQALLLDTDRVQFGPIVALNPATLLPLPEEGLQHDCLDILAEAHGTRPDLTDQPLPDADHTWYTDGSSFLQEGQRRAGAAVTTETEVIWAKALPAGTSAQRAELIALTQALKMAAGKKLNVYTDSRYAFATAHIHGEIYRRRGWLTSEGKEIKNKDEILALLKALFLPKRLSIIHCPGHQKGNHAEARGNRMADQAAREVATRETPETSTLLAGKRTADGSEFEKRTADGSEFESPKKKAKVE

SEQ ID NO: 2433 - protein, 2100 aa, synthetic construct
MPAAKRVKLDGGDKKYSIGLDIGTNSVGWAVITDEYKVPSKKFKVLGNTDRHSIKKNLIGALLFDSGETAEATRLKRTARRRYTRRKNRICYLQEIFSNEMAKVDDSFFHRLEESFLVEEDKKHERHPIFGNIVDEVAYHEKYPTIYHLRKKLVDSTDKADLRLIYLALAHMIKFRGHFLIEGDLNPDNSDVDKLFIQLVQTYNQLFEENPINASGVDAKAILSARLSKSRRLENLIAQLPGEKKNGLFGNLIALSLGLTPNFKSNFDLAEDAKLQLSKDTYDDDLDNLLAQIGDQYADLFLAAKNLSDAILLSDILRVNTEITKAPLSASMIKRYDEHHQDLTLLKALVRQQLPEKYKEIFFDQSKNGYAGYIDGGASQEEFYKFIKPILEKMDGTEELLVKLNREDLLRKQRTFDNGSIPHQIHLGELHAILRRQEDFYPFLKDNREKIEKILTFRIPYYVGPLARGNSRFAWMTRKSEETITPWNFEEVVDKGASAQSFIERMTNFDKNLPNEKVLPKHSLLYEYFTVYNELTKVKYVTEGMRKPAFLSGEQKKAIVDLLFKTNRKVTVKQLKEDYFKKIECFDSVEISGVEDRFNASLGTYHDLLKIIKDKDFLDNEENEDILEDIVLTLTLFEDREMIEERLKTYAHLFDDKVMKQLKRRRYTGWGRLSRKLINGIRDKQSGKTILDFLKSDGFANRNFMQLIHDDSLTFKEDIQKAQVSGQGDSLHEHIANLAGSPAIKKGILQTVKVVDELVKVMGRHKPENIVIEMARENQTTQKGQKNSRERMKRIEEGIKELGSQILKEHPVENTQLQNEKLYLYYLQNGRDMYVDQELDINRLSDYDVDHIVPQSFLKDDSIDNKVLTRSDKARGKSDNVPSEEVVKKMKNYWRQLLNAKLITQRKFDNLTKAERGGLSELDKAGFIKRQLVETRQITKHVAQILDSRMNTKYDENDKLIREVKVITLKSKLVSDFRKDFQFYKVREINNYHHAHDAYLNAVVGTALIKKYPKLESEFVYGDYKVYDVRKMIAKSEQEIGKATAKYFFYSNIMNFFKTEITLANGEIRKRPLIETNGETGEIVWDKGRDFATVRKVLSMPQVNIVKKTEVQTGGFSKESILPKRNSDKLIARKKDWDPKKYGGFDSPTVAYSVLVVAKVEKGKSKKLKSVKELLGITIMERSSFEKNPIDFLEAKGYKEVKKDLIIKLPKYSLFELENGRKRMLASAGELQKGNELALPSKYVNFLYLASHYEKLKGSPEDNEQKQLFVEQHKHYLDEIIEQISEFSKRVILADANLDKVLSAYNKHRDKPIREQAENIIHLFTLTNLGAPAAFKYFDTTIDRKRYTSTKEVLDATLIHQSITGLYETRIDLSQLGGDGGEAAAKGGGGSEAAAKGGTLNIEDEYRLHETSKGPDVPLGSTWLSDFPQAWAETGGMGLAFRQAPLIISLKATSTPVSIKQYPMSQEARLGIKPHIQRLLDQGILVPCQSPWNTPLLPVKKPGTNDYRPVQDLREVNKRVEDIHPTVPNPYNLLSGLPPSHQWYTVLDLKDAFFCLRLHPTSQSLFAFEWKDPEMGISGQLTWTRLPQGFKNSPTLFNEALHRDLADFRIQHPDLILLQYVDDLLLAATSELDCQQGTRALLQTLGDLGYRASAKKAQICQKQVKYLGYLLKEGQRWLTEARKETVMGQPTPKTPRQLREFLGKAGLCRLFIPGFAEMAAPLYPLTKPGTLFKWGPDQQKAYQEIKQALLTAPALGLPDLTKPFELFVDEKQGYAKGVLTQKLGPWRRPVAYLSKKLDPVAAGWPPCLRMVAAIAVLTKDVGKLTMGQPLVILAPHAVEALVKQPPDRWLSNARMTHYQALLLDTDRVQFGPIVALNPATLLPLPEEGLQHDCLDILAEAHGTRPDLTDQPLPDADHTWYTDGSSFLQEGQRRAGAAVTTETEVIWAKALPAGTSAQRAELIALTQALKMAAGKKLNVYTDSRYAFATAHIHGEIYRRRGWLTSEGKEIKNKDEILALLKALFLPKRLSIIHCPGHQKGNHAEARGNRMADQAAREVATRETPETSTLLAGKRTADGSEFEKRTADGSEFESPKKKAKVE

SEQ ID NO: 2434 - protein, 2096 aa, synthetic construct
MPAAKRVKLDGGDKKYSIGLDIGTNSVGWAVITDEYKVPSKKFKVLGNTDRHSIKKNLIGALLFDSGETAEATRLKRTARRRYTRRKNRICYLQEIFSNEMAKVDDSFFHRLEESFLVEEDKKHERHPIFGNIVDEVAYHEKYPTIYHLRKKLVDSTDKADLRLIYLALAHMIKFRGHFLIEGDLNPDNSDVDKLFIQLVQTYNQLFEENPINASGVDAKAILSARLSKSRRLENLIAQLPGEKKNGLFGNLIALSLGLTPNFKSNFDLAEDAKLQLSKDTYDDDLDNLLAQIGDQYADLFLAAKNLSDAILLSDILRVNTEITKAPLSASMIKRYDEHHQDLTLLKALVRQQLPEKYKEIFFDQSKNGYAGYIDGGASQEEFYKFIKPILEKMDGTEELLVKLNREDLLRKQRTFDNGSIPHQIHLGELHAILRRQEDFYPFLKDNREKIEKILTFRIPYYVGPLARGNSRFAWMTRKSEETITPWNFEEVVDKGASAQSFIERMTNFDKNLPNEKVLPKHSLLYEYFTVYNELTKVKYVTEGMRKPAFLSGEQKKAIVDLLFKTNRKVTVKQLKEDYFKKIECFDSVEISGVEDRFNASLGTYHDLLKIIKDKDFLDNEENEDILEDIVLTLTLFEDREMIEERLKTYAHLFDDKVMKQLKRRRYTGWGRLSRKLINGIRDKQSGKTILDFLKSDGFANRNFMQLIHDDSLTFKEDIQKAQVSGQGDSLHEHIANLAGSPAIKKGILQTVKVVDELVKVMGRHKPENIVIEMARENQTTQKGQKNSRERMKRIEEGIKELGSQILKEHPVENTQLQNEKLYLYYLQNGRDMYVDQELDINRLSDYDVDHIVPQSFLKDDSIDNKVLTRSDKARGKSDNVPSEEVVKKMKNYWRQLLNAKLITQRKFDNLTKAERGGLSELDKAGFIKRQLVETRQITKHVAQILDSRMNTKYDENDKLIREVKVITLKSKLVSDFRKDFQFYKVREINNYHHAHDAYLNAVVGTALIKKYPKLESEFVYGDYKVYDVRKMIAKSEQEIGKATAKYFFYSNIMNFFKTEITLANGEIRKRPLIETNGETGEIVWDKGRDFATVRKVLSMPQVNIVKKTEVQTGGFSKESILPKRNSDKLIARKKDWDPKKYGGFDSPTVAYSVLVVAKVEKGKSKKLKSVKELLGITIMERSSFEKNPIDFLEAKGYKEVKKDLIIKLPKYSLFELENGRKRMLASAGELQKGNELALPSKYVNFLYLASHYEKLKGSPEDNEQKQLFVEQHKHYLDEIIEQISEFSKRVILADANLDKVLSAYNKHRDKPIREQAENIIHLFTLTNLGAPAAFKYFDTTIDRKRYTSTKEVLDATLIHQSITGLYETRIDLSQLGGDGGGGGGSSEAAAKGGTLNIEDEYRLHETSKGPDVPLGSTWLSDFPQAWAETGGMGLAFRQAPLIISLKATSTPVSIKQYPMSQEARLGIKPHIQRLLDQGILVPCQSPWNTPLLPVKKPGTNDYRPVQDLREVNKRVEDIHPTVPNPYNLLSGLPPSHQWYTVLDLKDAFFCLRLHPTSQSLFAFEWKDPEMGISGQLTWTRLPQGFKNSPTLFNEALHRDLADFRIQHPDLILLQYVDDLLLAATSELDCQQGTRALLQTLGDLGYRASAKKAQICQKQVKYLGYLLKEGQRWLTEARKETVMGQPTPKTPRQLREFLGKAGLCRLFIPGFAEMAAPLYPLTKPGTLFKWGPDQQKAYQEIKQALLTAPALGLPDLTKPFELFVDEKQGYAKGVLTQKLGPWRRPVAYLSKKLDPVAAGWPPCLRMVAAIAVLTKDVGKLTMGQPLVILAPHAVEALVKQPPDRWLSNARMTHYQALLLDTDRVQFGPIVALNPATLLPLPEEGLQHDCLDILAEAHGTRPDLTDQPLPDADHTWYTDGSSFLQEGQRRAGAAVTTETEVIWAKALPAGTSAQRAELIALTQALKMAAGKKLNVYTDSRYAFATAHIHGEIYRRRGWLTSEGKEIKNKDEILALLKALFLPKRLSIIHCPGHQKGNHAEARGNRMADQAAREVATRETPETSTLLAGKRTADGSEFEKRTADGSEFESPKKKAKVE

SEQ ID NO: 2435 - protein, 2093 aa, synthetic construct
MPAAKRVKLDGGDKKYSIGLDIGTNSVGWAVITDEYKVPSKKFKVLGNTDRHSIKKNLIGALLFDSGETAEATRLKRTARRRYTRRKNRICYLQEIFSNEMAKVDDSFFHRLEESFLVEEDKKHERHPIFGNIVDEVAYHEKYPTIYHLRKKLVDSTDKADLRLIYLALAHMIKFRGHFLIEGDLNPDNSDVDKLFIQLVQTYNQLFEENPINASGVDAKAILSARLSKSRRLENLIAQLPGEKKNGLFGNLIALSLGLTPNFKSNFDLAEDAKLQLSKDTYDDDLDNLLAQIGDQYADLFLAAKNLSDAILLSDILRVNTEITKAPLSASMIKRYDEHHQDLTLLKALVRQQLPEKYKEIFFDQSKNGYAGYIDGGASQEEFYKFIKPILEKMDGTEELLVKLNREDLLRKQRTFDNGSIPHQIHLGELHAILRRQEDFYPFLKDNREKIEKILTFRIPYYVGPLARGNSRFAWMTRKSEETITPWNFEEVVDKGASAQSFIERMTNFDKNLPNEKVLPKHSLLYEYFTVYNELTKVKYVTEGMRKPAFLSGEQKKAIVDLLFKTNRKVTVKQLKEDYFKKIECFDSVEISGVEDRFNASLGTYHDLLKIIKDKDFLDNEENEDILEDIVLTLTLFEDREMIEERLKTYAHLFDDKVMKQLKRRRYTGWGRLSRKLINGIRDKQSGKTILDFLKSDGFANRNFMQLIHDDSLTFKEDIQKAQVSGQGDSLHEHIANLAGSPAIKKGILQTVKVVDELVKVMGRHKPENIVIEMARENQTTQKGQKNSRERMKRIEEGIKELGSQILKEHPVENTQLQNEKLYLYYLQNGRDMYVDQELDINRLSDYDVDHIVPQSFLKDDSIDNKVLTRSDKARGKSDNVPSEEVVKKMKNYWRQLLNAKLITQRKFDNLTKAERGGLSELDKAGFIKRQLVETRQITKHVAQILDSRMNTKYDENDKLIREVKVITLKSKLVSDFRKDFQFYKVREINNYHHAHDAYLNAVVGTALIKKYPKLESEFVYGDYKVYDVRKMIAKSEQEIGKATAKYFFYSNIMNFFKTEITLANGEIRKRPLIETNGETGEIVWDKGRDFATVRKVLSMPQVNIVKKTEVQTGGFSKESILPKRNSDKLIARKKDWDPKKYGGFDSPTVAYSVLVVAKVEKGKSKKLKSVKELLGITIMERSSFEKNPIDFLEAKGYKEVKKDLIIKLPKYSLFELENGRKRMLASAGELQKGNELALPSKYVNFLYLASHYEKLKGSPEDNEQKQLFVEQHKHYLDEIIEQISEFSKRVILADANLDKVLSAYNKHRDKPIREQAENIIHLFTLTNLGAPAAFKYFDTTIDRKRYTSTKEVLDATLIHQSITGLYETRIDLSQLGGDGGEAAAKGGSGGTLNIEDEYRLHETSKGPDVPLGSTWLSDFPQAWAETGGMGLAFRQAPLIISLKATSTPVSIKQYPMSQEARLGIKPHIQRLLDQGILVPCQSPWNTPLLPVKKPGTNDYRPVQDLREVNKRVEDIHPTVPNPYNLLSGLPPSHQWYTVLDLKDAFFCLRLHPTSQSLFAFEWKDPEMGISGQLTWTRLPQGFKNSPTLFNEALHRDLADFRIQHPDLILLQYVDDLLLAATSELDCQQGTRALLQTLGDLGYRASAKKAQICQKQVKYLGYLLKEGQRWLTEARKETVMGQPTPKTPRQLREFLGKAGLCRLFIPGFAEMAAPLYPLTKPGTLFKWGPDQQKAYQEIKQALLTAPALGLPDLTKPFELFVDEKQGYAKGVLTQKLGPWRRPVAYLSKKLDPVAAGWPPCLRMVAAIAVLTKDVGKLTMGQPLVILAPHAVEALVKQPPDRWLSNARMTHYQALLLDTDRVQFGPIVALNPATLLPLPEEGLQHDCLDILAEAHGTRPDLTDQPLPDADHTWYTDGSSFLQEGQRRAGAAVTTETEVIWAKALPAGTSAQRAELIALTQALKMAAGKKLNVYTDSRYAFATAHIHGEIYRRRGWLTSEGKEIKNKDEILALLKALFLPKRLSIIHCPGHQKGNHAEARGNRMADQAAREVATRETPETSTLLAGKRTADGSEFEKRTADGSEFESPKKKAKVE

SEQ ID NO: 2436 - protein, 2091 aa, synthetic construct
MPAAKRVKLDGGDKKYSIGLDIGTNSVGWAVITDEYKVPSKKFKVLGNTDRHSIKKNLIGALLFDSGETAEATRLKRTARRRYTRRKNRICYLQEIFSNEMAKVDDSFFHRLEESFLVEEDKKHERHPIFGNIVDEVAYHEKYPTIYHLRKKLVDSTDKADLRLIYLALAHMIKFRGHFLIEGDLNPDNSDVDKLFIQLVQTYNQLFEENPINASGVDAKAILSARLSKSRRLENLIAQLPGEKKNGLFGNLIALSLGLTPNFKSNFDLAEDAKLQLSKDTYDDDLDNLLAQIGDQYADLFLAAKNLSDAILLSDILRVNTEITKAPLSASMIKRYDEHHQDLTLLKALVRQQLPEKYKEIFFDQSKNGYAGYIDGGASQEEFYKFIKPILEKMDGTEELLVKLNREDLLRKQRTFDNGSIPHQIHLGELHAILRRQEDFYPFLKDNREKIEKILTFRIPYYVGPLARGNSRFAWMTRKSEETITPWNFEEVVDKGASAQSFIERMTNFDKNLPNEKVLPKHSLLYEYFTVYNELTKVKYVTEGMRKPAFLSGEQKKAIVDLLFKTNRKVTVKQLKEDYFKKIECFDSVEISGVEDRFNASLGTYHDLLKIIKDKDFLDNEENEDILEDIVLTLTLFEDREMIEERLKTYAHLFDDKVMKQLKRRRYTGWGRLSRKLINGIRDKQSGKTILDFLKSDGFANRNFMQLIHDDSLTFKEDIQKAQVSGQGDSLHEHIANLAGSPAIKKGILQTVKVVDELVKVMGRHKPENIVIEMARENQTTQKGQKNSRERMKRIEEGIKELGSQILKEHPVENTQLQNEKLYLYYLQNGRDMYVDQELDINRLSDYDVDHIVPQSFLKDDSIDNKVLTRSDKARGKSDNVPSEEVVKKMKNYWRQLLNAKLITQRKFDNLTKAERGGLSELDKAGFIKRQLVETRQITKHVAQILDSRMNTKYDENDKLIREVKVITLKSKLVSDFRKDFQFYKVREINNYHHAHDAYLNAVVGTALIKKYPKLESEFVYGDYKVYDVRKMIAKSEQEIGKATAKYFFYSNIMNFFKTEITLANGEIRKRPLIETNGETGEIVWDKGRDFATVRKVLSMPQVNIVKKTEVQTGGFSKESILPKRNSDKLIARKKDWDPKKYGGFDSPTVAYSVLVVAKVEKGKSKKLKSVKELLGITIMERSSFEKNPIDFLEAKGYKEVKKDLIIKLPKYSLFELENGRKRMLASAGELQKGNELALPSKYVNFLYLASHYEKLKGSPEDNEQKQLFVEQHKHYLDEIIEQISEFSKRVILADANLDKVLSAYNKHRDKPIREQAENIIHLFTLTNLGAPAAFKYFDTTIDRKRYTSTKEVLDATLIHQSITGLYETRIDLSQLGGDGGGGGGGSGGTLNIEDEYRLHETSKGPDVPLGSTWLSDFPQAWAETGGMGLAFRQAPLIISLKATSTPVSIKQYPMSQEARLGIKPHIQRLLDQGILVPCQSPWNTPLLPVKKPGTNDYRPVQDLREVNKRVEDIHPTVPNPYNLLSGLPPSHQWYTVLDLKDAFFCLRLHPTSQSLFAFEWKDPEMGISGQLTWTRLPQGFKNSPTLFNEALHRDLADFRIQHPDLILLQYVDDLLLAATSELDCQQGTRALLQTLGDLGYRASAKKAQICQKQVKYLGYLLKEGQRWLTEARKETVMGQPTPKTPRQLREFLGKAGLCRLFIPGFAEMAAPLYPLTKPGTLFKWGPDQQKAYQEIKQALLTAPALGLPDLTKPFELFVDEKQGYAKGVLTQKLGPWRRPVAYLSKKLDPVAAGWPPCLRMVAAIAVLTKDVGKLTMGQPLVILAPHAVEALVKQPPDRWLSNARMTHYQALLLDTDRVQFGPIVALNPATLLPLPEEGLQHDCLDILAEAHGTRPDLTDQPLPDADHTWYTDGSSFLQEGQRRAGAAVTTETEVIWAKALPAGTSAQRAELIALTQALKMAAGKKLNVYTDSRYAFATAHIHGEIYRRRGWLTSEGKEIKNKDEILALLKALFLPKRLSIIHCPGHQKGNHAEARGNRMADQAAREVATRETPETSTLLAGKRTADGSEFEKRTADGSEFESPKKKAKVE

SEQ ID NO: 2437 - protein, 2096 aa, synthetic construct
MPAAKRVKLDGGDKKYSIGLDIGTNSVGWAVITDEYKVPSKKFKVLGNTDRHSIKKNLIGALLFDSGETAEATRLKRTARRRYTRRKNRICYLQEIFSNEMAKVDDSFFHRLEESFLVEEDKKHERHPIFGNIVDEVAYHEKYPTIYHLRKKLVDSTDKADLRLIYLALAHMIKFRGHFLIEGDLNPDNSDVDKLFIQLVQTYNQLFEENPINASGVDAKAILSARLSKSRRLENLIAQLPGEKKNGLFGNLIALSLGLTPNFKSNFDLAEDAKLQLSKDTYDDDLDNLLAQIGDQYADLFLAAKNLSDAILLSDILRVNTEITKAPLSASMIKRYDEHHQDLTLLKALVRQQLPEKYKEIFFDQSKNGYAGYIDGGASQEEFYKFIKPILEKMDGTEELLVKLNREDLLRKQRTFDNGSIPHQIHLGELHAILRRQEDFYPFLKDNREKIEKILTFRIPYYVGPLARGNSRFAWMTRKSEETITPWNFEEVVDKGASAQSFIERMTNFDKNLPNEKVLPKHSLLYEYFTVYNELTKVKYVTEGMRKPAFLSGEQKKAIVDLLFKTNRKVTVKQLKEDYFKKIECFDSVEISGVEDRFNASLGTYHDLLKIIKDKDFLDNEENEDILEDIVLTLTLFEDREMIEERLKTYAHLFDDKVMKQLKRRRYTGWGRLSRKLINGIRDKQSGKTILDFLKSDGFANRNFMQLIHDDSLTFKEDIQKAQVSGQGDSLHEHIANLAGSPAIKKGILQTVKVVDELVKVMGRHKPENIVIEMARENQTTQKGQKNSRERMKRIEEGIKELGSQILKEHPVENTQLQNEKLYLYYLQNGRDMYVDQELDINRLSDYDVDHIVPQSFLKDDSIDNKVLTRSDKARGKSDNVPSEEVVKKMKNYWRQLLNAKLITQRKFDNLTKAERGGLSELDKAGFIKRQLVETRQITKHVAQILDSRMNTKYDENDKLIREVKVITLKSKLVSDFRKDFQFYKVREINNYHHAHDAYLNAVVGTALIKKYPKLESEFVYGDYKVYDVRKMIAKSEQEIGKATAKYFFYSNIMNFFKTEITLANGEIRKRPLIETNGETGEIVWDKGRDFATVRKVLSMPQVNIVKKTEVQTGGFSKESILPKRNSDKLIARKKDWDPKKYGGFDSPTVAYSVLVVAKVEKGKSKKLKSVKELLGITIMERSSFEKNPIDFLEAKGYKEVKKDLIIKLPKYSLFELENGRKRMLASAGELQKGNELALPSKYVNFLYLASHYEKLKGSPEDNEQKQLFVEQHKHYLDEIIEQISEFSKRVILADANLDKVLSAYNKHRDKPIREQAENIIHLFTLTNLGAPAAFKYFDTTIDRKRYTSTKEVLDATLIHQSITGLYETRIDLSQLGGDGGGSSGGSEAAAKGGTLNIEDEYRLHETSKGPDVPLGSTWLSDFPQAWAETGGMGLAFRQAPLIISLKATSTPVSIKQYPMSQEARLGIKPHIQRLLDQGILVPCQSPWNTPLLPVKKPGTNDYRPVQDLREVNKRVEDIHPTVPNPYNLLSGLPPSHQWYTVLDLKDAFFCLRLHPTSQSLFAFEWKDPEMGISGQLTWTRLPQGFKNSPTLFNEALHRDLADFRIQHPDLILLQYVDDLLLAATSELDCQQGTRALLQTLGDLGYRASAKKAQICQKQVKYLGYLLKEGQRWLTEARKETVMGQPTPKTPRQLREFLGKAGLCRLFIPGFAEMAAPLYPLTKPGTLFKWGPDQQKAYQEIKQALLTAPALGLPDLTKPFELFVDEKQGYAKGVLTQKLGPWRRPVAYLSKKLDPVAAGWPPCLRMVAAIAVLTKDVGKLTMGQPLVILAPHAVEALVKQPPDRWLSNARMTHYQALLLDTDRVQFGPIVALNPATLLPLPEEGLQHDCLDILAEAHGTRPDLTDQPLPDADHTWYTDGSSFLQEGQRRAGAAVTTETEVIWAKALPAGTSAQRAELIALTQALKMAAGKKLNVYTDSRYAFATAHIHGEIYRRRGWLTSEGKEIKNKDEILALLKALFLPKRLSIIHCPGHQKGNHAEARGNRMADQAAREVATRETPETSTLLAGKRTADGSEFEKRTADGSEFESPKKKAKVE

SEQ ID NO: 2438 - protein, 2094 aa, synthetic construct
MPAAKRVKLDGGDKKYSIGLDIGTNSVGWAVITDEYKVPSKKFKVLGNTDRHSIKKNLIGALLFDSGETAEATRLKRTARRRYTRRKNRICYLQEIFSNEMAKVDDSFFHRLEESFLVEEDKKHERHPIFGNIVDEVAYHEKYPTIYHLRKKLVDSTDKADLRLIYLALAHMIKFRGHFLIEGDLNPDNSDVDKLFIQLVQTYNQLFEENPINASGVDAKAILSARLSKSRRLENLIAQLPGEKKNGLFGNLIALSLGLTPNFKSNFDLAEDAKLQLSKDTYDDDLDNLLAQIGDQYADLFLAAKNLSDAILLSDILRVNTEITKAPLSASMIKRYDEHHQDLTLLKALVRQQLPEKYKEIFFDQSKNGYAGYIDGGASQEEFYKFIKPILEKMDGTEELLVKLNREDLLRKQRTFDNGSIPHQIHLGELHAILRRQEDFYPFLKDNREKIEKILTFRIPYYVGPLARGNSRFAWMTRKSEETITPWNFEEVVDKGASAQSFIERMTNFDKNLPNEKVLPKHSLLYEYFTVYNELTKVKYVTEGMRKPAFLSGEQKKAIVDLLFKTNRKVTVKQLKEDYFKKIECFDSVEISGVEDRFNASLGTYHDLLKIIKDKDFLDNEENEDILEDIVLTLTLFEDREMIEERLKTYAHLFDDKVMKQLKRRRYTGWGRLSRKLINGIRDKQSGKTILDFLKSDGFANRNFMQLIHDDSLTFKEDIQKAQVSGQGDSLHEHIANLAGSPAIKKGILQTVKVVDELVKVMGRHKPENIVIEMARENQTTQKGQKNSRERMKRIEEGIKELGSQILKEHPVENTQLQNEKLYLYYLQNGRDMYVDQELDINRLSDYDVDHIVPQSFLKDDSIDNKVLTRSDKARGKSDNVPSEEVVKKMKNYWRQLLNAKLITQRKFDNLTKAERGGLSELDKAGFIKRQLVETRQITKHVAQILDSRMNTKYDENDKLIREVKVITLKSKLVSDFRKDFQFYKVREINNYHHAHDAYLNAVVGTALIKKYPKLESEFVYGDYKVYDVRKMIAKSEQEIGKATAKYFFYSNIMNFFKTEITLANGEIRKRPLIETNGETGEIVWDKGRDFATVRKVLSMPQVNIVKKTEVQTGGFSKESILPKRNSDKLIARKKDWDPKKYGGFDSPTVAYSVLVVAKVEKGKSKKLKSVKELLGITIMERSSFEKNPIDFLEAKGYKEVKKDLIIKLPKYSLFELENGRKRMLASAGELQKGNELALPSKYVNFLYLASHYEKLKGSPEDNEQKQLFVEQHKHYLDEIIEQISEFSKRVILADANLDKVLSAYNKHRDKPIREQAENIIHLFTLTNLGAPAAFKYFDTTIDRKRYTSTKEVLDATLIHQSITGLYETRIDLSQLGGDGGGSSGGGGGSGGTLNIEDEYRLHETSKGPDVPLGSTWLSDFPQAWAETGGMGLAFRQAPLIISLKATSTPVSIKQYPMSQEARLGIKPHIQRLLDQGILVPCQSPWNTPLLPVKKPGTNDYRPVQDLREVNKRVEDIHPTVPNPYNLLSGLPPSHQWYTVLDLKDAFFCLRLHPTSQSLFAFEWKDPEMGISGQLTWTRLPQGFKNSPTLFNEALHRDLADFRIQHPDLILLQYVDDLLLAATSELDCQQGTRALLQTLGDLGYRASAKKAQICQKQVKYLGYLLKEGQRWLTEARKETVMGQPTPKTPRQLREFLGKAGLCRLFIPGFAEMAAPLYPLTKPGTLFKWGPDQQKAYQEIKQALLTAPALGLPDLTKPFELFVDEKQGYAKGVLTQKLGPWRRPVAYLSKKLDPVAAGWPPCLRMVAAIAVLTKDVGKLTMGQPLVILAPHAVEALVKQPPDRWLSNARMTHYQALLLDTDRVQFGPIVALNPATLLPLPEEGLQHDCLDILAEAHGTRPDLTDQPLPDADHTWYTDGSSFLQEGQRRAGAAVTTETEVIWAKALPAGTSAQRAELIALTQALKMAAGKKLNVYTDSRYAFATAHIHGEIYRRRGWLTSEGKEIKNKDEILALLKALFLPKRLSIIHCPGHQKGNHAEARGNRMADQAAREVATRETPETSTLLAGKRTADGSEFEKRTADGSEFESPKKKAKVE

SEQ ID NO: 2439 - protein, 2091 aa, synthetic construct
MPAAKRVKLDGGDKKYSIGLDIGTNSVGWAVITDEYKVPSKKFKVLGNTDRHSIKKNLIGALLFDSGETAEATRLKRTARRRYTRRKNRICYLQEIFSNEMAKVDDSFFHRLEESFLVEEDKKHERHPIFGNIVDEVAYHEKYPTIYHLRKKLVDSTDKADLRLIYLALAHMIKFRGHFLIEGDLNPDNSDVDKLFIQLVQTYNQLFEENPINASGVDAKAILSARLSKSRRLENLIAQLPGEKKNGLFGNLIALSLGLTPNFKSNFDLAEDAKLQLSKDTYDDDLDNLLAQIGDQYADLFLAAKNLSDAILLSDILRVNTEITKAPLSASMIKRYDEHHQDLTLLKALVRQQLPEKYKEIFFDQSKNGYAGYIDGGASQEEFYKFIKPILEKMDGTEELLVKLNREDLLRKQRTFDNGSIPHQIHLGELHAILRRQEDFYPFLKDNREKIEKILTFRIPYYVGPLARGNSRFAWMTRKSEETITPWNFEEVVDKGASAQSFIERMTNFDKNLPNEKVLPKHSLLYEYFTVYNELTKVKYVTEGMRKPAFLSGEQKKAIVDLLFKTNRKVTVKQLKEDYFKKIECFDSVEISGVEDRFNASLGTYHDLLKIIKDKDFLDNEENEDILEDIVLTLTLFEDREMIEERLKTYAHLFDDKVMKQLKRRRYTGWGRLSRKLINGIRDKQSGKTILDFLKSDGFANRNFMQLIHDDSLTFKEDIQKAQVSGQGDSLHEHIANLAGSPAIKKGILQTVKVVDELVKVMGRHKPENIVIEMARENQTTQKGQKNSRERMKRIEEGIKELGSQILKEHPVENTQLQNEKLYLYYLQNGRDMYVDQELDINRLSDYDVDHIVPQSFLKDDSIDNKVLTRSDKARGKSDNVPSEEVVKKMKNYWRQLLNAKLITQRKFDNLTKAERGGLSELDKAGFIKRQLVETRQITKHVAQILDSRMNTKYDENDKLIREVKVITLKSKLVSDFRKDFQFYKVREINNYHHAHDAYLNAVVGTALIKKYPKLESEFVYGDYKVYDVRKMIAKSEQEIGKATAKYFFYSNIMNFFKTEITLANGEIRKRPLIETNGETGEIVWDKGRDFATVRKVLSMPQVNIVKKTEVQTGGFSKESILPKRNSDKLIARKKDWDPKKYGGFDSPTVAYSVLVVAKVEKGKSKKLKSVKELLGITIMERSSFEKNPIDFLEAKGYKEVKKDLIIKLPKYSLFELENGRKRMLASAGELQKGNELALPSKYVNFLYLASHYEKLKGSPEDNEQKQLFVEQHKHYLDEIIEQISEFSKRVILADANLDKVLSAYNKHRDKPIREQAENIIHLFTLTNLGAPAAFKYFDTTIDRKRYTSTKEVLDATLIHQSITGLYETRIDLSQLGGDGGGGSGSSGGTLNIEDEYRLHETSKGPDVPLGSTWLSDFPQAWAETGGMGLAFRQAPLIISLKATSTPVSIKQYPMSQEARLGIKPHIQRLLDQGILVPCQSPWNTPLLPVKKPGTNDYRPVQDLREVNKRVEDIHPTVPNPYNLLSGLPPSHQWYTVLDLKDAFFCLRLHPTSQSLFAFEWKDPEMGISGQLTWTRLPQGFKNSPTLFNEALHRDLADFRIQHPDLILLQYVDDLLLAATSELDCQQGTRALLQTLGDLGYRASAKKAQICQKQVKYLGYLLKEGQRWLTEARKETVMGQPTPKTPRQLREFLGKAGLCRLFIPGFAEMAAPLYPLTKPGTLFKWGPDQQKAYQEIKQALLTAPALGLPDLTKPFELFVDEKQGYAKGVLTQKLGPWRRPVAYLSKKLDPVAAGWPPCLRMVAAIAVLTKDVGKLTMGQPLVILAPHAVEALVKQPPDRWLSNARMTHYQALLLDTDRVQFGPIVALNPATLLPLPEEGLQHDCLDILAEAHGTRPDLTDQPLPDADHTWYTDGSSFLQEGQRRAGAAVTTETEVIWAKALPAGTSAQRAELIALTQALKMAAGKKLNVYTDSRYAFATAHIHGEIYRRRGWLTSEGKEIKNKDEILALLKALFLPKRLSIIHCPGHQKGNHAEARGNRMADQAAREVATRETPETSTLLAGKRTADGSEFEKRTADGSEFESPKKKAKVE

SEQ ID NO: 2440 - protein, 2096 aa, synthetic construct
MPAAKRVKLDGGDKKYSIGLDIGTNSVGWAVITDEYKVPSKKFKVLGNTDRHSIKKNLIGALLFDSGETAEATRLKRTARRRYTRRKNRICYLQEIFSNEMAKVDDSFFHRLEESFLVEEDKKHERHPIFGNIVDEVAYHEKYPTIYHLRKKLVDSTDKADLRLIYLALAHMIKFRGHFLIEGDLNPDNSDVDKLFIQLVQTYNQLFEENPINASGVDAKAILSARLSKSRRLENLIAQLPGEKKNGLFGNLIALSLGLTPNFKSNFDLAEDAKLQLSKDTYDDDLDNLLAQIGDQYADLFLAAKNLSDAILLSDILRVNTEITKAPLSASMIKRYDEHHQDLTLLKALVRQQLPEKYKEIFFDQSKNGYAGYIDGGASQEEFYKFIKPILEKMDGTEELLVKLNREDLLRKQRTFDNGSIPHQIHLGELHAILRRQEDFYPFLKDNREKIEKILTFRIPYYVGPLARGNSRFAWMTRKSEETITPWNFEEVVDKGASAQSFIERMTNFDKNLPNEKVLPKHSLLYEYFTVYNELTKVKYVTEGMRKPAFLSGEQKKAIVDLLFKTNRKVTVKQLKEDYFKKIECFDSVEISGVEDRFNASLGTYHDLLKIIKDKDFLDNEENEDILEDIVLTLTLFEDREMIEERLKTYAHLFDDKVMKQLKRRRYTGWGRLSRKLINGIRDKQSGKTILDFLKSDGFANRNFMQLIHDDSLTFKEDIQKAQVSGQGDSLHEHIANLAGSPAIKKGILQTVKVVDELVKVMGRHKPENIVIEMARENQTTQKGQKNSRERMKRIEEGIKELGSQILKEHPVENTQLQNEKLYLYYLQNGRDMYVDQELDINRLSDYDVDHIVPQSFLKDDSIDNKVLTRSDKARGKSDNVPSEEVVKKMKNYWRQLLNAKLITQRKFDNLTKAERGGLSELDKAGFIKRQLVETRQITKHVAQILDSRMNTKYDENDKLIREVKVITLKSKLVSDFRKDFQFYKVREINNYHHAHDAYLNAVVGTALIKKYPKLESEFVYGDYKVYDVRKMIAKSEQEIGKATAKYFFYSNIMNFFKTEITLANGEIRKRPLIETNGETGEIVWDKGRDFATVRKVLSMPQVNIVKKTEVQTGGFSKESILPKRNSDKLIARKKDWDPKKYGGFDSPTVAYSVLVVAKVEKGKSKKLKSVKELLGITIMERSSFEKNPIDFLEAKGYKEVKKDLIIKLPKYSLFELENGRKRMLASAGELQKGNELALPSKYVNFLYLASHYEKLKGSPEDNEQKQLFVEQHKHYLDEIIEQISEFSKRVILADANLDKVLSAYNKHRDKPIREQAENIIHLFTLTNLGAPAAFKYFDTTIDRKRYTSTKEVLDATLIHQSITGLYETRIDLSQLGGDGGPAPGGGEAAAKGGTLNIEDEYRLHETSKGPDVPLGSTWLSDFPQAWAETGGMGLAVRQAPLIIPLKATSTPVSIKQYPMSQEARLGIKPHIQRLLDQGILVPCQSPWNTPLLPVKKPGTNDYRPVQDLREVNKRVEDIHPTVPNPYNLLSGLPPSHQWYTVLDLKDAFFCLRLHPTSQSLFAFEWRDPEMGISGQLTWTRLPQGFKNSPTLFNEALHRDLADFRIQHPDLILLQYVDDLLLAATSELDCQQGTRALLQTLGDLGYRASAKKAQICQKQVKYLGYLLKEGQRWLTEARKETVMGQPTPKTPRQLREFLGTAGFCRLWIPGFAEMAAPLYPLTKPGTLFEWGPDQQKAYQEIKQALLTAPALGLPDLTKPFELFVDEKQGYAKGVLTQKLGPWRRPVAYLSKKLDPVAAGWPPCLRMVAAIAVLTKDAGKLTMGQPLVILAPHAVEALVKQPPDRWLSNARMTHYQALLLDTDRVQFGPIVALNPATLLPLPEEGLQHDCLDILAEAHGTRPDLTDQPLPDADHTWYTDGSSFLQEGQRKAGAAVTTETEVVWAKALPAGTSAQRAELIALTQALKMAEGKKLNVYTDSRYAFATAHIHGEIYRRRGWLTSEGKEIKNKDEILALLKALFLPKRLSIIHCPGHQKGNRAEARGNRMADQAAREVATRETPETSTLLAGKRTADGSEFEKRTADGSEFESPKKKAKVE

SEQ ID NO: 2441 - protein, 2110 aa, synthetic construct
MPAAKRVKLDGGDKKYSIGLDIGTNSVGWAVITDEYKVPSKKFKVLGNTDRHSIKKNLIGALLFDSGETAEATRLKRTARRRYTRRKNRICYLQEIFSNEMAKVDDSFFHRLEESFLVEEDKKHERHPIFGNIVDEVAYHEKYPTIYHLRKKLVDSTDKADLRLIYLALAHMIKFRGHFLIEGDLNPDNSDVDKLFIQLVQTYNQLFEENPINASGVDAKAILSARLSKSRRLENLIAQLPGEKKNGLFGNLIALSLGLTPNFKSNFDLAEDAKLQLSKDTYDDDLDNLLAQIGDQYADLFLAAKNLSDAILLSDILRVNTEITKAPLSASMIKRYDEHHQDLTLLKALVRQQLPEKYKEIFFDQSKNGYAGYIDGGASQEEFYKFIKPILEKMDGTEELLVKLNREDLLRKQRTFDNGSIPHQIHLGELHAILRRQEDFYPFLKDNREKIEKILTFRIPYYVGPLARGNSRFAWMTRKSEETITPWNFEEVVDKGASAQSFIERMTNFDKNLPNEKVLPKHSLLYEYFTVYNELTKVKYVTEGMRKPAFLSGEQKKAIVDLLFKTNRKVTVKQLKEDYFKKIECFDSVEISGVEDRFNASLGTYHDLLKIIKDKDFLDNEENEDILEDIVLTLTLFEDREMIEERLKTYAHLFDDKVMKQLKRRRYTGWGRLSRKLINGIRDKQSGKTILDFLKSDGFANRNFMQLIHDDSLTFKEDIQKAQVSGQGDSLHEHIANLAGSPAIKKGILQTVKVVDELVKVMGRHKPENIVIEMARENQTTQKGQKNSRERMKRIEEGIKELGSQILKEHPVENTQLQNEKLYLYYLQNGRDMYVDQELDINRLSDYDVDHIVPQSFLKDDSIDNKVLTRSDKARGKSDNVPSEEVVKKMKNYWRQLLNAKLITQRKFDNLTKAERGGLSELDKAGFIKRQLVETRQITKHVAQILDSRMNTKYDENDKLIREVKVITLKSKLVSDFRKDFQFYKVREINNYHHAHDAYLNAVVGTALIKKYPKLESEFVYGDYKVYDVRKMIAKSEQEIGKATAKYFFYSNIMNFFKTEITLANGEIRKRPLIETNGETGEIVWDKGRDFATVRKVLSMPQVNIVKKTEVQTGGFSKESILPKRNSDKLIARKKDWDPKKYGGFDSPTVAYSVLVVAKVEKGKSKKLKSVKELLGITIMERSSFEKNPIDFLEAKGYKEVKKDLIIKLPKYSLFELENGRKRMLASAGELQKGNELALPSKYVNFLYLASHYEKLKGSPEDNEQKQLFVEQHKHYLDEIIEQISEFSKRVILADANLDKVLSAYNKHRDKPIREQAENIIHLFTLTNLGAPAAFKYFDTTIDRKRYTSTKEVLDATLIHQSITGLYETRIDLSQLGGDGGGGGGSGGGGSGGGGSGGGGSGGGGSGGTLNIEDEYRLHETSKGPDVPLGSTWLSDFPQAWAETGGMGLAVRQAPLIIPLKATSTPVSIKQYPMSQEARLGIKPHIQRLLDQGILVPCQSPWNTPLLPVKKPGTNDYRPVQDLREVNKRVEDIHPTVPNPYNLLSGLPPSHQWYTVLDLKDAFFCLRLHPTSQSLFAFEWRDPEMGISGQLTWTRLPQGFKNSPTLFNEALHRDLADFRIQHPDLILLQYVDDLLLAATSELDCQQGTRALLQTLGDLGYRASAKKAQICQKQVKYLGYLLKEGQRWLTEARKETVMGQPTPKTPRQLREFLGTAGFCRLWIPGFAEMAAPLYPLTKPGTLFEWGPDQQKAYQEIKQALLTAPALGLPDLTKPFELFVDEKQGYAKGVLTQKLGPWRRPVAYLSKKLDPVAAGWPPCLRMVAAIAVLTKDAGKLTMGQPLVILAPHAVEALVKQPPDRWLSNARMTHYQALLLDTDRVQFGPIVALNPATLLPLPEEGLQHDCLDILAEAHGTRPDLTDQPLPDADHTWYTDGSSFLQEGQRKAGAAVTTETEVVWAKALPAGTSAQRAELIALTQALKMAEGKKLNVYTDSRYAFATAHIHGEIYRRRGWLTSEGKEIKNKDEILALLKALFLPKRLSIIHCPGHQKGNRAEARGNRMADQAAREVATRETPETSTLLAGKRTADGSEFEKRTADGSEFESPKKKAKVE

SEQ ID NO: 2442 - protein, 2088 aa, synthetic construct
MPAAKRVKLDGGDKKYSIGLDIGTNSVGWAVITDEYKVPSKKFKVLGNTDRHSIKKNLIGALLFDSGETAEATRLKRTARRRYTRRKNRICYLQEIFSNEMAKVDDSFFHRLEESFLVEEDKKHERHPIFGNIVDEVAYHEKYPTIYHLRKKLVDSTDKADLRLIYLALAHMIKFRGHFLIEGDLNPDNSDVDKLFIQLVQTYNQLFEENPINASGVDAKAILSARLSKSRRLENLIAQLPGEKKNGLFGNLIALSLGLTPNFKSNFDLAEDAKLQLSKDTYDDDLDNLLAQIGDQYADLFLAAKNLSDAILLSDILRVNTEITKAPLSASMIKRYDEHHQDLTLLKALVRQQLPEKYKEIFFDQSKNGYAGYIDGGASQEEFYKFIKPILEKMDGTEELLVKLNREDLLRKQRTFDNGSIPHQIHLGELHAILRRQEDFYPFLKDNREKIEKILTFRIPYYVGPLARGNSRFAWMTRKSEETITPWNFEEVVDKGASAQSFIERMTNFDKNLPNEKVLPKHSLLYEYFTVYNELTKVKYVTEGMRKPAFLSGEQKKAIVDLLFKTNRKVTVKQLKEDYFKKIECFDSVEISGVEDRFNASLGTYHDLLKIIKDKDFLDNEENEDILEDIVLTLTLFEDREMIEERLKTYAHLFDDKVMKQLKRRRYTGWGRLSRKLINGIRDKQSGKTILDFLKSDGFANRNFMQLIHDDSLTFKEDIQKAQVSGQGDSLHEHIANLAGSPAIKKGILQTVKVVDELVKVMGRHKPENIVIEMARENQTTQKGQKNSRERMKRIEEGIKELGSQILKEHPVENTQLQNEKLYLYYLQNGRDMYVDQELDINRLSDYDVDHIVPQSFLKDDSIDNKVLTRSDKARGKSDNVPSEEVVKKMKNYWRQLLNAKLITQRKFDNLTKAERGGLSELDKAGFIKRQLVETRQITKHVAQILDSRMNTKYDENDKLIREVKVITLKSKLVSDFRKDFQFYKVREINNYHHAHDAYLNAVVGTALIKKYPKLESEFVYGDYKVYDVRKMIAKSEQEIGKATAKYFFYSNIMNFFKTEITLANGEIRKRPLIETNGETGEIVWDKGRDFATVRKVLSMPQVNIVKKTEVQTGGFSKESILPKRNSDKLIARKKDWDPKKYGGFDSPTVAYSVLVVAKVEKGKSKKLKSVKELLGITIMERSSFEKNPIDFLEAKGYKEVKKDLIIKLPKYSLFELENGRKRMLASAGELQKGNELALPSKYVNFLYLASHYEKLKGSPEDNEQKQLFVEQHKHYLDEIIEQISEFSKRVILADANLDKVLSAYNKHRDKPIREQAENIIHLFTLTNLGAPAAFKYFDTTIDRKRYTSTKEVLDATLIHQSITGLYETRIDLSQLGGDGGPAPGGTLNIEDEYRLHETSKGPDVPLGSTWLSDFPQAWAETGGMGLAVRQAPLIIPLKATSTPVSIKQYPMSQEARLGIKPHIQRLLDQGILVPCQSPWNTPLLPVKKPGTNDYRPVQDLREVNKRVEDIHPTVPNPYNLLSGLPPSHQWYTVLDLKDAFFCLRLHPTSQSLFAFEWRDPEMGISGQLTWTRLPQGFKNSPTLFNEALHRDLADFRIQHPDLILLQYVDDLLLAATSELDCQQGTRALLQTLGDLGYRASAKKAQICQKQVKYLGYLLKEGQRWLTEARKETVMGQPTPKTPRQLREFLGTAGFCRLWIPGFAEMAAPLYPLTKPGTLFEWGPDQQKAYQEIKQALLTAPALGLPDLTKPFELFVDEKQGYAKGVLTQKLGPWRRPVAYLSKKLDPVAAGWPPCLRMVAAIAVLTKDAGKLTMGQPLVILAPHAVEALVKQPPDRWLSNARMTHYQALLLDTDRVQFGPIVALNPATLLPLPEEGLQHDCLDILAEAHGTRPDLTDQPLPDADHTWYTDGSSFLQEGQRKAGAAVTTETEVVWAKALPAGTSAQRAELIALTQALKMAEGKKLNVYTDSRYAFATAHIHGEIYRRRGWLTSEGKEIKNKDEILALLKALFLPKRLSIIHCPGHQKGNRAEARGNRMADQAAREVATRETPETSTLLAGKRTADGSEFEKRTADGSEFESPKKKAKVE

SEQ ID NO: 2443 - protein, 2100 aa, synthetic construct
MPAAKRVKLDGGDKKYSIGLDIGTNSVGWAVITDEYKVPSKKFKVLGNTDRHSIKKNLIGALLFDSGETAEATRLKRTARRRYTRRKNRICYLQEIFSNEMAKVDDSFFHRLEESFLVEEDKKHERHPIFGNIVDEVAYHEKYPTIYHLRKKLVDSTDKADLRLIYLALAHMIKFRGHFLIEGDLNPDNSDVDKLFIQLVQTYNQLFEENPINASGVDAKAILSARLSKSRRLENLIAQLPGEKKNGLFGNLIALSLGLTPNFKSNFDLAEDAKLQLSKDTYDDDLDNLLAQIGDQYADLFLAAKNLSDAILLSDILRVNTEITKAPLSASMIKRYDEHHQDLTLLKALVRQQLPEKYKEIFFDQSKNGYAGYIDGGASQEEFYKFIKPILEKMDGTEELLVKLNREDLLRKQRTFDNGSIPHQIHLGELHAILRRQEDFYPFLKDNREKIEKILTFRIPYYVGPLARGNSRFAWMTRKSEETITPWNFEEVVDKGASAQSFIERMTNFDKNLPNEKVLPKHSLLYEYFTVYNELTKVKYVTEGMRKPAFLSGEQKKAIVDLLFKTNRKVTVKQLKEDYFKKIECFDSVEISGVEDRFNASLGTYHDLLKIIKDKDFLDNEENEDILEDIVLTLTLFEDREMIEERLKTYAHLFDDKVMKQLKRRRYTGWGRLSRKLINGIRDKQSGKTILDFLKSDGFANRNFMQLIHDDSLTFKEDIQKAQVSGQGDSLHEHIANLAGSPAIKKGILQTVKVVDELVKVMGRHKPENIVIEMARENQTTQKGQKNSRERMKRIEEGIKELGSQILKEHPVENTQLQNEKLYLYYLQNGRDMYVDQELDINRLSDYDVDHIVPQSFLKDDSIDNKVLTRSDKARGKSDNVPSEEVVKKMKNYWRQLLNAKLITQRKFDNLTKAERGGLSELDKAGFIKRQLVETRQITKHVAQILDSRMNTKYDENDKLIREVKVITLKSKLVSDFRKDFQFYKVREINNYHHAHDAYLNAVVGTALIKKYPKLESEFVYGDYKVYDVRKMIAKSEQEIGKATAKYFFYSNIMNFFKTEITLANGEIRKRPLIETNGETGEIVWDKGRDFATVRKVLSMPQVNIVKKTEVQTGGFSKESILPKRNSDKLIARKKDWDPKKYGGFDSPTVAYSVLVVAKVEKGKSKKLKSVKELLGITIMERSSFEKNPIDFLEAKGYKEVKKDLIIKLPKYSLFELENGRKRMLASAGELQKGNELALPSKYVNFLYLASHYEKLKGSPEDNEQKQLFVEQHKHYLDEIIEQISEFSKRVILADANLDKVLSAYNKHRDKPIREQAENIIHLFTLTNLGAPAAFKYFDTTIDRKRYTSTKEVLDATLIHQSITGLYETRIDLSQLGGDGGGSSGSSGSSGSSGSSGGTLNIEDEYRLHETSKGPDVPLGSTWLSDFPQAWAETGGMGLAVRQAPLIIPLKATSTPVSIKQYPMSQEARLGIKPHIQRLLDQGILVPCQSPWNTPLLPVKKPGTNDYRPVQDLREVNKRVEDIHPTVPNPYNLLSGLPPSHQWYTVLDLKDAFFCLRLHPTSQSLFAFEWRDPEMGISGQLTWTRLPQGFKNSPTLFNEALHRDLADFRIQHPDLILLQYVDDLLLAATSELDCQQGTRALLQTLGDLGYRASAKKAQICQKQVKYLGYLLKEGQRWLTEARKETVMGQPTPKTPRQLREFLGTAGFCRLWIPGFAEMAAPLYPLTKPGTLFEWGPDQQKAYQEIKQALLTAPALGLPDLTKPFELFVDEKQGYAKGVLTQKLGPWRRPVAYLSKKLDPVAAGWPPCLRMVAAIAVLTKDAGKLTMGQPLVILAPHAVEALVKQPPDRWLSNARMTHYQALLLDTDRVQFGPIVALNPATLLPLPEEGLQHDCLDILAEAHGTRPDLTDQPLPDADHTWYTDGSSFLQEGQRKAGAAVTTETEVVWAKALPAGTSAQRAELIALTQALKMAEGKKLNVYTDSRYAFATAHIHGEIYRRRGWLTSEGKEIKNKDEILALLKALFLPKRLSIIHCPGHQKGNRAEARGNRMADQAAREVATRETPETSTLLAGKRTADGSEFEKRTADGSEFESPKKKAKVE

SEQ ID NO: 2444 - protein, 2096 aa, synthetic construct
MPAAKRVKLDGGDKKYSIGLDIGTNSVGWAVITDEYKVPSKKFKVLGNTDRHSIKKNLIGALLFDSGETAEATRLKRTARRRYTRRKNRICYLQEIFSNEMAKVDDSFFHRLEESFLVEEDKKHERHPIFGNIVDEVAYHEKYPTIYHLRKKLVDSTDKADLRLIYLALAHMIKFRGHFLIEGDLNPDNSDVDKLFIQLVQTYNQLFEENPINASGVDAKAILSARLSKSRRLENLIAQLPGEKKNGLFGNLIALSLGLTPNFKSNFDLAEDAKLQLSKDTYDDDLDNLLAQIGDQYADLFLAAKNLSDAILLSDILRVNTEITKAPLSASMIKRYDEHHQDLTLLKALVRQQLPEKYKEIFFDQSKNGYAGYIDGGASQEEFYKFIKPILEKMDGTEELLVKLNREDLLRKQRTFDNGSIPHQIHLGELHAILRRQEDFYPFLKDNREKIEKILTFRIPYYVGPLARGNSRFAWMTRKSEETITPWNFEEVVDKGASAQSFIERMTNFDKNLPNEKVLPKHSLLYEYFTVYNELTKVKYVTEGMRKPAFLSGEQKKAIVDLLFKTNRKVTVKQLKEDYFKKIECFDSVEISGVEDRFNASLGTYHDLLKIIKDKDFLDNEENEDILEDIVLTLTLFEDREMIEERLKTYAHLFDDKVMKQLKRRRYTGWGRLSRKLINGIRDKQSGKTILDFLKSDGFANRNFMQLIHDDSLTFKEDIQKAQVSGQGDSLHEHIANLAGSPAIKKGILQTVKVVDELVKVMGRHKPENIVIEMARENQTTQKGQKNSRERMKRIEEGIKELGSQILKEHPVENTQLQNEKLYLYYLQNGRDMYVDQELDINRLSDYDVDHIVPQSFLKDDSIDNKVLTRSDKARGKSDNVPSEEVVKKMKNYWRQLLNAKLITQRKFDNLTKAERGGLSELDKAGFIKRQLVETRQITKHVAQILDSRMNTKYDENDKLIREVKVITLKSKLVSDFRKDFQFYKVREINNYHHAHDAYLNAVVGTALIKKYPKLESEFVYGDYKVYDVRKMIAKSEQEIGKATAKYFFYSNIMNFFKTEITLANGEIRKRPLIETNGETGEIVWDKGRDFATVRKVLSMPQVNIVKKTEVQTGGFSKESILPKRNSDKLIARKKDWDPKKYGGFDSPTVAYSVLVVAKVEKGKSKKLKSVKELLGITIMERSSFEKNPIDFLEAKGYKEVKKDLIIKLPKYSLFELENGRKRMLASAGELQKGNELALPSKYVNFLYLASHYEKLKGSPEDNEQKQLFVEQHKHYLDEIIEQISEFSKRVILADANLDKVLSAYNKHRDKPIREQAENIIHLFTLTNLGAPAAFKYFDTTIDRKRYTSTKEVLDATLIHQSITGLYETRIDLSQLGGDGGEAAAKGSSGGSGGTLNIEDEYRLHETSKGPDVPLGSTWLSDFPQAWAETGGMGLAVRQAPLIIPLKATSTPVSIKQYPMSQEARLGIKPHIQRLLDQGILVPCQSPWNTPLLPVKKPGTNDYRPVQDLREVNKRVEDIHPTVPNPYNLLSGLPPSHQWYTVLDLKDAFFCLRLHPTSQSLFAFEWRDPEMGISGQLTWTRLPQGFKNSPTLFNEALHRDLADFRIQHPDLILLQYVDDLLLAATSELDCQQGTRALLQTLGDLGYRASAKKAQICQKQVKYLGYLLKEGQRWLTEARKETVMGQPTPKTPRQLREFLGTAGFCRLWIPGFAEMAAPLYPLTKPGTLFEWGPDQQKAYQEIKQALLTAPALGLPDLTKPFELFVDEKQGYAKGVLTQKLGPWRRPVAYLSKKLDPVAAGWPPCLRMVAAIAVLTKDAGKLTMGQPLVILAPHAVEALVKQPPDRWLSNARMTHYQALLLDTDRVQFGPIVALNPATLLPLPEEGLQHDCLDILAEAHGTRPDLTDQPLPDADHTWYTDGSSFLQEGQRKAGAAVTTETEVVWAKALPAGTSAQRAELIALTQALKMAEGKKLNVYTDSRYAFATAHIHGEIYRRRGWLTSEGKEIKNKDEILALLKALFLPKRLSIIHCPGHQKGNRAEARGNRMADQAAREVATRETPETSTLLAGKRTADGSEFEKRTADGSEFESPKKKAKVE

SEQ ID NO: 2445 - protein, 2091 aa, synthetic construct
MPAAKRVKLDGGDKKYSIGLDIGTNSVGWAVITDEYKVPSKKFKVLGNTDRHSIKKNLIGALLFDSGETAEATRLKRTARRRYTRRKNRICYLQEIFSNEMAKVDDSFFHRLEESFLVEEDKKHERHPIFGNIVDEVAYHEKYPTIYHLRKKLVDSTDKADLRLIYLALAHMIKFRGHFLIEGDLNPDNSDVDKLFIQLVQTYNQLFEENPINASGVDAKAILSARLSKSRRLENLIAQLPGEKKNGLFGNLIALSLGLTPNFKSNFDLAEDAKLQLSKDTYDDDLDNLLAQIGDQYADLFLAAKNLSDAILLSDILRVNTEITKAPLSASMIKRYDEHHQDLTLLKALVRQQLPEKYKEIFFDQSKNGYAGYIDGGASQEEFYKFIKPILEKMDGTEELLVKLNREDLLRKQRTFDNGSIPHQIHLGELHAILRRQEDFYPFLKDNREKIEKILTFRIPYYVGPLARGNSRFAWMTRKSEETITPWNFEEVVDKGASAQSFIERMTNFDKNLPNEKVLPKHSLLYEYFTVYNELTKVKYVTEGMRKPAFLSGEQKKAIVDLLFKTNRKVTVKQLKEDYFKKIECFDSVEISGVEDRFNASLGTYHDLLKIIKDKDFLDNEENEDILEDIVLTLTLFEDREMIEERLKTYAHLFDDKVMKQLKRRRYTGWGRLSRKLINGIRDKQSGKTILDFLKSDGFANRNFMQLIHDDSLTFKEDIQKAQVSGQGDSLHEHIANLAGSPAIKKGILQTVKVVDELVKVMGRHKPENIVIEMARENQTTQKGQKNSRERMKRIEEGIKELGSQILKEHPVENTQLQNEKLYLYYLQNGRDMYVDQELDINRLSDYDVDHIVPQSFLKDDSIDNKVLTRSDKARGKSDNVPSEEVVKKMKNYWRQLLNAKLITQRKFDNLTKAERGGLSELDKAGFIKRQLVETRQITKHVAQILDSRMNTKYDENDKLIREVKVITLKSKLVSDFRKDFQFYKVREINNYHHAHDAYLNAVVGTALIKKYPKLESEFVYGDYKVYDVRKMIAKSEQEIGKATAKYFFYSNIMNFFKTEITLANGEIRKRPLIETNGETGEIVWDKGRDFATVRKVLSMPQVNIVKKTEVQTGGFSKESILPKRNSDKLIARKKDWDPKKYGGFDSPTVAYSVLVVAKVEKGKSKKLKSVKELLGITIMERSSFEKNPIDFLEAKGYKEVKKDLIIKLPKYSLFELENGRKRMLASAGELQKGNELALPSKYVNFLYLASHYEKLKGSPEDNEQKQLFVEQHKHYLDEIIEQISEFSKRVILADANLDKVLSAYNKHRDKPIREQAENIIHLFTLTNLGAPAAFKYFDTTIDRKRYTSTKEVLDATLIHQSITGLYETRIDLSQLGGDGGGGGPAPGGTLNIEDEYRLHETSKGPDVPLGSTWLSDFPQAWAETGGMGLAVRQAPLIIPLKATSTPVSIKQYPMSQEARLGIKPHIQRLLDQGILVPCQSPWNTPLLPVKKPGTNDYRPVQDLREVNKRVEDIHPTVPNPYNLLSGLPPSHQWYTVLDLKDAFFCLRLHPTSQSLFAFEWRDPEMGISGQLTWTRLPQGFKNSPTLFNEALHRDLADFRIQHPDLILLQYVDDLLLAATSELDCQQGTRALLQTLGDLGYRASAKKAQICQKQVKYLGYLLKEGQRWLTEARKETVMGQPTPKTPRQLREFLGTAGFCRLWIPGFAEMAAPLYPLTKPGTLFEWGPDQQKAYQEIKQALLTAPALGLPDLTKPFELFVDEKQGYAKGVLTQKLGPWRRPVAYLSKKLDPVAAGWPPCLRMVAAIAVLTKDAGKLTMGQPLVILAPHAVEALVKQPPDRWLSNARMTHYQALLLDTDRVQFGPIVALNPATLLPLPEEGLQHDCLDILAEAHGTRPDLTDQPLPDADHTWYTDGSSFLQEGQRKAGAAVTTETEVVWAKALPAGTSAQRAELIALTQALKMAEGKKLNVYTDSRYAFATAHIHGEIYRRRGWLTSEGKEIKNKDEILALLKALFLPKRLSIIHCPGHQKGNRAEARGNRMADQAAREVATRETPETSTLLAGKRTADGSEFEKRTADGSEFESPKKKAKVE

SEQ ID NO: 2446 - protein, 2105 aa, synthetic construct
MPAAKRVKLDGGDKKYSIGLDIGTNSVGWAVITDEYKVPSKKFKVLGNTDRHSIKKNLIGALLFDSGETAEATRLKRTARRRYTRRKNRICYLQEIFSNEMAKVDDSFFHRLEESFLVEEDKKHERHPIFGNIVDEVAYHEKYPTIYHLRKKLVDSTDKADLRLIYLALAHMIKFRGHFLIEGDLNPDNSDVDKLFIQLVQTYNQLFEENPINASGVDAKAILSARLSKSRRLENLIAQLPGEKKNGLFGNLIALSLGLTPNFKSNFDLAEDAKLQLSKDTYDDDLDNLLAQIGDQYADLFLAAKNLSDAILLSDILRVNTEITKAPLSASMIKRYDEHHQDLTLLKALVRQQLPEKYKEIFFDQSKNGYAGYIDGGASQEEFYKFIKPILEKMDGTEELLVKLNREDLLRKQRTFDNGSIPHQIHLGELHAILRRQEDFYPFLKDNREKIEKILTFRIPYYVGPLARGNSRFAWMTRKSEETITPWNFEEVVDKGASAQSFIERMTNFDKNLPNEKVLPKHSLLYEYFTVYNELTKVKYVTEGMRKPAFLSGEQKKAIVDLLFKTNRKVTVKQLKEDYFKKIECFDSVEISGVEDRFNASLGTYHDLLKIIKDKDFLDNEENEDILEDIVLTLTLFEDREMIEERLKTYAHLFDDKVMKQLKRRRYTGWGRLSRKLINGIRDKQSGKTILDFLKSDGFANRNFMQLIHDDSLTFKEDIQKAQVSGQGDSLHEHIANLAGSPAIKKGILQTVKVVDELVKVMGRHKPENIVIEMARENQTTQKGQKNSRERMKRIEEGIKELGSQILKEHPVENTQLQNEKLYLYYLQNGRDMYVDQELDINRLSDYDVDHIVPQSFLKDDSIDNKVLTRSDKARGKSDNVPSEEVVKKMKNYWRQLLNAKLITQRKFDNLTKAERGGLSELDKAGFIKRQLVETRQITKHVAQILDSRMNTKYDENDKLIREVKVITLKSKLVSDFRKDFQFYKVREINNYHHAHDAYLNAVVGTALIKKYPKLESEFVYGDYKVYDVRKMIAKSEQEIGKATAKYFFYSNIMNFFKTEITLANGEIRKRPLIETNGETGEIVWDKGRDFATVRKVLSMPQVNIVKKTEVQTGGFSKESILPKRNSDKLIARKKDWDPKKYGGFDSPTVAYSVLVVAKVEKGKSKKLKSVKELLGITIMERSSFEKNPIDFLEAKGYKEVKKDLIIKLPKYSLFELENGRKRMLASAGELQKGNELALPSKYVNFLYLASHYEKLKGSPEDNEQKQLFVEQHKHYLDEIIEQISEFSKRVILADANLDKVLSAYNKHRDKPIREQAENIIHLFTLTNLGAPAAFKYFDTTIDRKRYTSTKEVLDATLIHQSITGLYETRIDLSQLGGDGGEAAAKEAAAKEAAAKEAAAKGGTLNIEDEYRLHETSKGPDVPLGSTWLSDFPQAWAETGGMGLAVRQAPLIIPLKATSTPVSIKQYPMSQEARLGIKPHIQRLLDQGILVPCQSPWNTPLLPVKKPGTNDYRPVQDLREVNKRVEDIHPTVPNPYNLLSGLPPSHQWYTVLDLKDAFFCLRLHPTSQSLFAFEWRDPEMGISGQLTWTRLPQGFKNSPTLFNEALHRDLADFRIQHPDLILLQYVDDLLLAATSELDCQQGTRALLQTLGDLGYRASAKKAQICQKQVKYLGYLLKEGQRWLTEARKETVMGQPTPKTPRQLREFLGTAGFCRLWIPGFAEMAAPLYPLTKPGTLFEWGPDQQKAYQEIKQALLTAPALGLPDLTKPFELFVDEKQGYAKGVLTQKLGPWRRPVAYLSKKLDPVAAGWPPCLRMVAAIAVLTKDAGKLTMGQPLVILAPHAVEALVKQPPDRWLSNARMTHYQALLLDTDRVQFGPIVALNPATLLPLPEEGLQHDCLDILAEAHGTRPDLTDQPLPDADHTWYTDGSSFLQEGQRKAGAAVTTETEVVWAKALPAGTSAQRAELIALTQALKMAEGKKLNVYTDSRYAFATAHIHGEIYRRRGWLTSEGKEIKNKDEILALLKALFLPKRLSIIHCPGHQKGNRAEARGNRMADQAAREVATRETPETSTLLAGKRTADGSEFEKRTADGSEFESPKKKAKVE

SEQ ID NO: 2447 - protein, 2096 aa, synthetic construct
MPAAKRVKLDGGDKKYSIGLDIGTNSVGWAVITDEYKVPSKKFKVLGNTDRHSIKKNLIGALLFDSGETAEATRLKRTARRRYTRRKNRICYLQEIFSNEMAKVDDSFFHRLEESFLVEEDKKHERHPIFGNIVDEVAYHEKYPTIYHLRKKLVDSTDKADLRLIYLALAHMIKFRGHFLIEGDLNPDNSDVDKLFIQLVQTYNQLFEENPINASGVDAKAILSARLSKSRRLENLIAQLPGEKKNGLFGNLIALSLGLTPNFKSNFDLAEDAKLQLSKDTYDDDLDNLLAQIGDQYADLFLAAKNLSDAILLSDILRVNTEITKAPLSASMIKRYDEHHQDLTLLKALVRQQLPEKYKEIFFDQSKNGYAGYIDGGASQEEFYKFIKPILEKMDGTEELLVKLNREDLLRKQRTFDNGSIPHQIHLGELHAILRRQEDFYPFLKDNREKIEKILTFRIPYYVGPLARGNSRFAWMTRKSEETITPWNFEEVVDKGASAQSFIERMTNFDKNLPNEKVLPKHSLLYEYFTVYNELTKVKYVTEGMRKPAFLSGEQKKAIVDLLFKTNRKVTVKQLKEDYFKKIECFDSVEISGVEDRFNASLGTYHDLLKIIKDKDFLDNEENEDILEDIVLTLTLFEDREMIEERLKTYAHLFDDKVMKQLKRRRYTGWGRLSRKLINGIRDKQSGKTILDFLKSDGFANRNFMQLIHDDSLTFKEDIQKAQVSGQGDSLHEHIANLAGSPAIKKGILQTVKVVDELVKVMGRHKPENIVIEMARENQTTQKGQKNSRERMKRIEEGIKELGSQILKEHPVENTQLQNEKLYLYYLQNGRDMYVDQELDINRLSDYDVDHIVPQSFLKDDSIDNKVLTRSDKARGKSDNVPSEEVVKKMKNYWRQLLNAKLITQRKFDNLTKAERGGLSELDKAGFIKRQLVETRQITKHVAQILDSRMNTKYDENDKLIREVKVITLKSKLVSDFRKDFQFYKVREINNYHHAHDAYLNAVVGTALIKKYPKLESEFVYGDYKVYDVRKMIAKSEQEIGKATAKYFFYSNIMNFFKTEITLANGEIRKRPLIETNGETGEIVWDKGRDFATVRKVLSMPQVNIVKKTEVQTGGFSKESILPKRNSDKLIARKKDWDPKKYGGFDSPTVAYSVLVVAKVEKGKSKKLKSVKELLGITIMERSSFEKNPIDFLEAKGYKEVKKDLIIKLPKYSLFELENGRKRMLASAGELQKGNELALPSKYVNFLYLASHYEKLKGSPEDNEQKQLFVEQHKHYLDEIIEQISEFSKRVILADANLDKVLSAYNKHRDKPIREQAENIIHLFTLTNLGAPAAFKYFDTTIDRKRYTSTKEVLDATLIHQSITGLYETRIDLSQLGGDGGGGSPAPEAAAKGGTLNIEDEYRLHETSKGPDVPLGSTWLSDFPQAWAETGGMGLAVRQAPLIIPLKATSTPVSIKQYPMSQEARLGIKPHIQRLLDQGILVPCQSPWNTPLLPVKKPGTNDYRPVQDLREVNKRVEDIHPTVPNPYNLLSGLPPSHQWYTVLDLKDAFFCLRLHPTSQSLFAFEWRDPEMGISGQLTWTRLPQGFKNSPTLFNEALHRDLADFRIQHPDLILLQYVDDLLLAATSELDCQQGTRALLQTLGDLGYRASAKKAQICQKQVKYLGYLLKEGQRWLTEARKETVMGQPTPKTPRQLREFLGTAGFCRLWIPGFAEMAAPLYPLTKPGTLFEWGPDQQKAYQEIKQALLTAPALGLPDLTKPFELFVDEKQGYAKGVLTQKLGPWRRPVAYLSKKLDPVAAGWPPCLRMVAAIAVLTKDAGKLTMGQPLVILAPHAVEALVKQPPDRWLSNARMTHYQALLLDTDRVQFGPIVALNPATLLPLPEEGLQHDCLDILAEAHGTRPDLTDQPLPDADHTWYTDGSSFLQEGQRKAGAAVTTETEVVWAKALPAGTSAQRAELIALTQALKMAEGKKLNVYTDSRYAFATAHIHGEIYRRRGWLTSEGKEIKNKDEILALLKALFLPKRLSIIHCPGHQKGNRAEARGNRMADQAAREVATRETPETSTLLAGKRTADGSEFEKRTADGSEFESPKKKAKVE

SEQ ID NO: 2448 - protein, 2090 aa, synthetic construct
MPAAKRVKLDGGDKKYSIGLDIGTNSVGWAVITDEYKVPSKKFKVLGNTDRHSIKKNLIGALLFDSGETAEATRLKRTARRRYTRRKNRICYLQEIFSNEMAKVDDSFFHRLEESFLVEEDKKHERHPIFGNIVDEVAYHEKYPTIYHLRKKLVDSTDKADLRLIYLALAHMIKFRGHFLIEGDLNPDNSDVDKLFIQLVQTYNQLFEENPINASGVDAKAILSARLSKSRRLENLIAQLPGEKKNGLFGNLIALSLGLTPNFKSNFDLAEDAKLQLSKDTYDDDLDNLLAQIGDQYADLFLAAKNLSDAILLSDILRVNTEITKAPLSASMIKRYDEHHQDLTLLKALVRQQLPEKYKEIFFDQSKNGYAGYIDGGASQEEFYKFIKPILEKMDGTEELLVKLNREDLLRKQRTFDNGSIPHQIHLGELHAILRRQEDFYPFLKDNREKIEKILTFRIPYYVGPLARGNSRFAWMTRKSEETITPWNFEEVVDKGASAQSFIERMTNFDKNLPNEKVLPKHSLLYEYFTVYNELTKVKYVTEGMRKPAFLSGEQKKAIVDLLFKTNRKVTVKQLKEDYFKKIECFDSVEISGVEDRFNASLGTYHDLLKIIKDKDFLDNEENEDILEDIVLTLTLFEDREMIEERLKTYAHLFDDKVMKQLKRRRYTGWGRLSRKLINGIRDKQSGKTILDFLKSDGFANRNFMQLIHDDSLTFKEDIQKAQVSGQGDSLHEHIANLAGSPAIKKGILQTVKVVDELVKVMGRHKPENIVIEMARENQTTQKGQKNSRERMKRIEEGIKELGSQILKEHPVENTQLQNEKLYLYYLQNGRDMYVDQELDINRLSDYDVDHIVPQSFLKDDSIDNKVLTRSDKARGKSDNVPSEEVVKKMKNYWRQLLNAKLITQRKFDNLTKAERGGLSELDKAGFIKRQLVETRQITKHVAQILDSRMNTKYDENDKLIREVKVITLKSKLVSDFRKDFQFYKVREINNYHHAHDAYLNAVVGTALIKKYPKLESEFVYGDYKVYDVRKMIAKSEQEIGKATAKYFFYSNIMNFFKTEITLANGEIRKRPLIETNGETGEIVWDKGRDFATVRKVLSMPQVNIVKKTEVQTGGFSKESILPKRNSDKLIARKKDWDPKKYGGFDSPTVAYSVLVVAKVEKGKSKKLKSVKELLGITIMERSSFEKNPIDFLEAKGYKEVKKDLIIKLPKYSLFELENGRKRMLASAGELQKGNELALPSKYVNFLYLASHYEKLKGSPEDNEQKQLFVEQHKHYLDEIIEQISEFSKRVILADANLDKVLSAYNKHRDKPIREQAENIIHLFTLTNLGAPAAFKYFDTTIDRKRYTSTKEVLDATLIHQSITGLYETRIDLSQLGGDGGPAPAPGGTLNIEDEYRLHETSKGPDVPLGSTWLSDFPQAWAETGGMGLAVRQAPLIIPLKATSTPVSIKQYPMSQEARLGIKPHIQRLLDQGILVPCQSPWNTPLLPVKKPGTNDYRPVQDLREVNKRVEDIHPTVPNPYNLLSGLPPSHQWYTVLDLKDAFFCLRLHPTSQSLFAFEWRDPEMGISGQLTWTRLPQGFKNSPTLFNEALHRDLADFRIQHPDLILLQYVDDLLLAATSELDCQQGTRALLQTLGDLGYRASAKKAQICQKQVKYLGYLLKEGQRWLTEARKETVMGQPTPKTPRQLREFLGTAGFCRLWIPGFAEMAAPLYPLTKPGTLFEWGPDQQKAYQEIKQALLTAPALGLPDLTKPFELFVDEKQGYAKGVLTQKLGPWRRPVAYLSKKLDPVAAGWPPCLRMVAAIAVLTKDAGKLTMGQPLVILAPHAVEALVKQPPDRWLSNARMTHYQALLLDTDRVQFGPIVALNPATLLPLPEEGLQHDCLDILAEAHGTRPDLTDQPLPDADHTWYTDGSSFLQEGQRKAGAAVTTETEVVWAKALPAGTSAQRAELIALTQALKMAEGKKLNVYTDSRYAFATAHIHGEIYRRRGWLTSEGKEIKNKDEILALLKALFLPKRLSIIHCPGHQKGNRAEARGNRMADQAAREVATRETPETSTLLAGKRTADGSEFEKRTADGSEFESPKKKAKVE

SEQ ID NO: 2449 - protein, 2098 aa, synthetic construct
MPAAKRVKLDGGDKKYSIGLDIGTNSVGWAVITDEYKVPSKKFKVLGNTDRHSIKKNLIGALLFDSGETAEATRLKRTARRRYTRRKNRICYLQEIFSNEMAKVDDSFFHRLEESFLVEEDKKHERHPIFGNIVDEVAYHEKYPTIYHLRKKLVDSTDKADLRLIYLALAHMIKFRGHFLIEGDLNPDNSDVDKLFIQLVQTYNQLFEENPINASGVDAKAILSARLSKSRRLENLIAQLPGEKKNGLFGNLIALSLGLTPNFKSNFDLAEDAKLQLSKDTYDDDLDNLLAQIGDQYADLFLAAKNLSDAILLSDILRVNTEITKAPLSASMIKRYDEHHQDLTLLKALVRQQLPEKYKEIFFDQSKNGYAGYIDGGASQEEFYKFIKPILEKMDGTEELLVKLNREDLLRKQRTFDNGSIPHQIHLGELHAILRRQEDFYPFLKDNREKIEKILTFRIPYYVGPLARGNSRFAWMTRKSEETITPWNFEEVVDKGASAQSFIERMTNFDKNLPNEKVLPKHSLLYEYFTVYNELTKVKYVTEGMRKPAFLSGEQKKAIVDLLFKTNRKVTVKQLKEDYFKKIECFDSVEISGVEDRFNASLGTYHDLLKIIKDKDFLDNEENEDILEDIVLTLTLFEDREMIEERLKTYAHLFDDKVMKQLKRRRYTGWGRLSRKLINGIRDKQSGKTILDFLKSDGFANRNFMQLIHDDSLTFKEDIQKAQVSGQGDSLHEHIANLAGSPAIKKGILQTVKVVDELVKVMGRHKPENIVIEMARENQTTQKGQKNSRERMKRIEEGIKELGSQILKEHPVENTQLQNEKLYLYYLQNGRDMYVDQELDINRLSDYDVDHIVPQSFLKDDSIDNKVLTRSDKARGKSDNVPSEEVVKKMKNYWRQLLNAKLITQRKFDNLTKAERGGLSELDKAGFIKRQLVETRQITKHVAQILDSRMNTKYDENDKLIREVKVITLKSKLVSDFRKDFQFYKVREINNYHHAHDAYLNAVVGTALIKKYPKLESEFVYGDYKVYDVRKMIAKSEQEIGKATAKYFFYSNIMNFFKTEITLANGEIRKRPLIETNGETGEIVWDKGRDFATVRKVLSMPQVNIVKKTEVQTGGFSKESILPKRNSDKLIARKKDWDPKKYGGFDSPTVAYSVLVVAKVEKGKSKKLKSVKELLGITIMERSSFEKNPIDFLEAKGYKEVKKDLIIKLPKYSLFELENGRKRMLASAGELQKGNELALPSKYVNFLYLASHYEKLKGSPEDNEQKQLFVEQHKHYLDEIIEQISEFSKRVILADANLDKVLSAYNKHRDKPIREQAENIIHLFTLTNLGAPAAFKYFDTTIDRKRYTSTKEVLDATLIHQSITGLYETRIDLSQLGGDGGPAPAPAPAPAPAPGGTLNIEDEYRLHETSKGPDVPLGSTWLSDFPQAWAETGGMGLAVRQAPLIIPLKATSTPVSIKQYPMSQEARLGIKPHIQRLLDQGILVPCQSPWNTPLLPVKKPGTNDYRPVQDLREVNKRVEDIHPTVPNPYNLLSGLPPSHQWYTVLDLKDAFFCLRLHPTSQSLFAFEWRDPEMGISGQLTWTRLPQGFKNSPTLFNEALHRDLADFRIQHPDLILLQYVDDLLLAATSELDCQQGTRALLQTLGDLGYRASAKKAQICQKQVKYLGYLLKEGQRWLTEARKETVMGQPTPKTPRQLREFLGTAGFCRLWIPGFAEMAAPLYPLTKPGTLFEWGPDQQKAYQEIKQALLTAPALGLPDLTKPFELFVDEKQGYAKGVLTQKLGPWRRPVAYLSKKLDPVAAGWPPCLRMVAAIAVLTKDAGKLTMGQPLVILAPHAVEALVKQPPDRWLSNARMTHYQALLLDTDRVQFGPIVALNPATLLPLPEEGLQHDCLDILAEAHGTRPDLTDQPLPDADHTWYTDGSSFLQEGQRKAGAAVTTETEVVWAKALPAGTSAQRAELIALTQALKMAEGKKLNVYTDSRYAFATAHIHGEIYRRRGWLTSEGKEIKNKDEILALLKALFLPKRLSIIHCPGHQKGNRAEARGNRMADQAAREVATRETPETSTLLAGKRTADGSEFEKRTADGSEFESPKKKAKVE

SEQ ID NO: 2450 - protein, 2092 aa, synthetic construct
MPAAKRVKLDGGDKKYSIGLDIGTNSVGWAVITDEYKVPSKKFKVLGNTDRHSIKKNLIGALLFDSGETAEATRLKRTARRRYTRRKNRICYLQEIFSNEMAKVDDSFFHRLEESFLVEEDKKHERHPIFGNIVDEVAYHEKYPTIYHLRKKLVDSTDKADLRLIYLALAHMIKFRGHFLIEGDLNPDNSDVDKLFIQLVQTYNQLFEENPINASGVDAKAILSARLSKSRRLENLIAQLPGEKKNGLFGNLIALSLGLTPNFKSNFDLAEDAKLQLSKDTYDDDLDNLLAQIGDQYADLFLAAKNLSDAILLSDILRVNTEITKAPLSASMIKRYDEHHQDLTLLKALVRQQLPEKYKEIFFDQSKNGYAGYIDGGASQEEFYKFIKPILEKMDGTEELLVKLNREDLLRKQRTFDNGSIPHQIHLGELHAILRRQEDFYPFLKDNREKIEKILTFRIPYYVGPLARGNSRFAWMTRKSEETITPWNFEEVVDKGASAQSFIERMTNFDKNLPNEKVLPKHSLLYEYFTVYNELTKVKYVTEGMRKPAFLSGEQKKAIVDLLFKTNRKVTVKQLKEDYFKKIECFDSVEISGVEDRFNASLGTYHDLLKIIKDKDFLDNEENEDILEDIVLTLTLFEDREMIEERLKTYAHLFDDKVMKQLKRRRYTGWGRLSRKLINGIRDKQSGKTILDFLKSDGFANRNFMQLIHDDSLTFKEDIQKAQVSGQGDSLHEHIANLAGSPAIKKGILQTVKVVDELVKVMGRHKPENIVIEMARENQTTQKGQKNSRERMKRIEEGIKELGSQILKEHPVENTQLQNEKLYLYYLQNGRDMYVDQELDINRLSDYDVDHIVPQSFLKDDSIDNKVLTRSDKARGKSDNVPSEEVVKKMKNYWRQLLNAKLITQRKFDNLTKAERGGLSELDKAGFIKRQLVETRQITKHVAQILDSRMNTKYDENDKLIREVKVITLKSKLVSDFRKDFQFYKVREINNYHHAHDAYLNAVVGTALIKKYPKLESEFVYGDYKVYDVRKMIAKSEQEIGKATAKYFFYSNIMNFFKTEITLANGEIRKRPLIETNGETGEIVWDKGRDFATVRKVLSMPQVNIVKKTEVQTGGFSKESILPKRNSDKLIARKKDWDPKKYGGFDSPTVAYSVLVVAKVEKGKSKKLKSVKELLGITIMERSSFEKNPIDFLEAKGYKEVKKDLIIKLPKYSLFELENGRKRMLASAGELQKGNELALPSKYVNFLYLASHYEKLKGSPEDNEQKQLFVEQHKHYLDEIIEQISEFSKRVILADANLDKVLSAYNKHRDKPIREQAENIIHLFTLTNLGAPAAFKYFDTTIDRKRYTSTKEVLDATLIHQSITGLYETRIDLSQLGGDGGGGGGGGGGGTLNIEDEYRLHETSKGPDVPLGSTWLSDFPQAWAETGGMGLAVRQAPLIIPLKATSTPVSIKQYPMSQEARLGIKPHIQRLLDQGILVPCQSPWNTPLLPVKKPGTNDYRPVQDLREVNKRVEDIHPTVPNPYNLLSGLPPSHQWYTVLDLKDAFFCLRLHPTSQSLFAFEWRDPEMGISGQLTWTRLPQGFKNSPTLFNEALHRDLADFRIQHPDLILLQYVDDLLLAATSELDCQQGTRALLQTLGDLGYRASAKKAQICQKQVKYLGYLLKEGQRWLTEARKETVMGQPTPKTPRQLREFLGTAGFCRLWIPGFAEMAAPLYPLTKPGTLFEWGPDQQKAYQEIKQALLTAPALGLPDLTKPFELFVDEKQGYAKGVLTQKLGPWRRPVAYLSKKLDPVAAGWPPCLRMVAAIAVLTKDAGKLTMGQPLVILAPHAVEALVKQPPDRWLSNARMTHYQALLLDTDRVQFGPIVALNPATLLPLPEEGLQHDCLDILAEAHGTRPDLTDQPLPDADHTWYTDGSSFLQEGQRKAGAAVTTETEVVWAKALPAGTSAQRAELIALTQALKMAEGKKLNVYTDSRYAFATAHIHGEIYRRRGWLTSEGKEIKNKDEILALLKALFLPKRLSIIHCPGHQKGNRAEARGNRMADQAAREVATRETPETSTLLAGKRTADGSEFEKRTADGSEFESPKKKAKVE

SEQ ID NO: 2451 - protein, 2093 aa, synthetic construct
MPAAKRVKLDGGDKKYSIGLDIGTNSVGWAVITDEYKVPSKKFKVLGNTDRHSIKKNLIGALLFDSGETAEATRLKRTARRRYTRRKNRICYLQEIFSNEMAKVDDSFFHRLEESFLVEEDKKHERHPIFGNIVDEVAYHEKYPTIYHLRKKLVDSTDKADLRLIYLALAHMIKFRGHFLIEGDLNPDNSDVDKLFIQLVQTYNQLFEENPINASGVDAKAILSARLSKSRRLENLIAQLPGEKKNGLFGNLIALSLGLTPNFKSNFDLAEDAKLQLSKDTYDDDLDNLLAQIGDQYADLFLAAKNLSDAILLSDILRVNTEITKAPLSASMIKRYDEHHQDLTLLKALVRQQLPEKYKEIFFDQSKNGYAGYIDGGASQEEFYKFIKPILEKMDGTEELLVKLNREDLLRKQRTFDNGSIPHQIHLGELHAILRRQEDFYPFLKDNREKIEKILTFRIPYYVGPLARGNSRFAWMTRKSEETITPWNFEEVVDKGASAQSFIERMTNFDKNLPNEKVLPKHSLLYEYFTVYNELTKVKYVTEGMRKPAFLSGEQKKAIVDLLFKTNRKVTVKQLKEDYFKKIECFDSVEISGVEDRFNASLGTYHDLLKIIKDKDFLDNEENEDILEDIVLTLTLFEDREMIEERLKTYAHLFDDKVMKQLKRRRYTGWGRLSRKLINGIRDKQSGKTILDFLKSDGFANRNFMQLIHDDSLTFKEDIQKAQVSGQGDSLHEHIANLAGSPAIKKGILQTVKVVDELVKVMGRHKPENIVIEMARENQTTQKGQKNSRERMKRIEEGIKELGSQILKEHPVENTQLQNEKLYLYYLQNGRDMYVDQELDINRLSDYDVDHIVPQSFLKDDSIDNKVLTRSDKARGKSDNVPSEEVVKKMKNYWRQLLNAKLITQRKFDNLTKAERGGLSELDKAGFIKRQLVETRQITKHVAQILDSRMNTKYDENDKLIREVKVITLKSKLVSDFRKDFQFYKVREINNYHHAHDAYLNAVVGTALIKKYPKLESEFVYGDYKVYDVRKMIAKSEQEIGKATAKYFFYSNIMNFFKTEITLANGEIRKRPLIETNGETGEIVWDKGRDFATVRKVLSMPQVNIVKKTEVQTGGFSKESILPKRNSDKLIARKKDWDPKKYGGFDSPTVAYSVLVVAKVEKGKSKKLKSVKELLGITIMERSSFEKNPIDFLEAKGYKEVKKDLIIKLPKYSLFELENGRKRMLASAGELQKGNELALPSKYVNFLYLASHYEKLKGSPEDNEQKQLFVEQHKHYLDEIIEQISEFSKRVILADANLDKVLSAYNKHRDKPIREQAENIIHLFTLTNLGAPAAFKYFDTTIDRKRYTSTKEVLDATLIHQSITGLYETRIDLSQLGGDGGEAAAKGSSGGTLNIEDEYRLHETSKGPDVPLGSTWLSDFPQAWAETGGMGLAVRQAPLIIPLKATSTPVSIKQYPMSQEARLGIKPHIQRLLDQGILVPCQSPWNTPLLPVKKPGTNDYRPVQDLREVNKRVEDIHPTVPNPYNLLSGLPPSHQWYTVLDLKDAFFCLRLHPTSQSLFAFEWRDPEMGISGQLTWTRLPQGFKNSPTLFNEALHRDLADFRIQHPDLILLQYVDDLLLAATSELDCQQGTRALLQTLGDLGYRASAKKAQICQKQVKYLGYLLKEGQRWLTEARKETVMGQPTPKTPRQLREFLGTAGFCRLWIPGFAEMAAPLYPLTKPGTLFEWGPDQQKAYQEIKQALLTAPALGLPDLTKPFELFVDEKQGYAKGVLTQKLGPWRRPVAYLSKKLDPVAAGWPPCLRMVAAIAVLTKDAGKLTMGQPLVILAPHAVEALVKQPPDRWLSNARMTHYQALLLDTDRVQFGPIVALNPATLLPLPEEGLQHDCLDILAEAHGTRPDLTDQPLPDADHTWYTDGSSFLQEGQRKAGAAVTTETEVVWAKALPAGTSAQRAELIALTQALKMAEGKKLNVYTDSRYAFATAHIHGEIYRRRGWLTSEGKEIKNKDEILALLKALFLPKRLSIIHCPGHQKGNRAEARGNRMADQAAREVATRETPETSTLLAGKRTADGSEFEKRTADGSEFESPKKKAKVE

SEQ ID NO: 2452 - protein, 2096 aa, synthetic construct
MPAAKRVKLDGGDKKYSIGLDIGTNSVGWAVITDEYKVPSKKFKVLGNTDRHSIKKNLIGALLFDSGETAEATRLKRTARRRYTRRKNRICYLQEIFSNEMAKVDDSFFHRLEESFLVEEDKKHERHPIFGNIVDEVAYHEKYPTIYHLRKKLVDSTDKADLRLIYLALAHMIKFRGHFLIEGDLNPDNSDVDKLFIQLVQTYNQLFEENPINASGVDAKAILSARLSKSRRLENLIAQLPGEKKNGLFGNLIALSLGLTPNFKSNFDLAEDAKLQLSKDTYDDDLDNLLAQIGDQYADLFLAAKNLSDAILLSDILRVNTEITKAPLSASMIKRYDEHHQDLTLLKALVRQQLPEKYKEIFFDQSKNGYAGYIDGGASQEEFYKFIKPILEKMDGTEELLVKLNREDLLRKQRTFDNGSIPHQIHLGELHAILRRQEDFYPFLKDNREKIEKILTFRIPYYVGPLARGNSRFAWMTRKSEETITPWNFEEVVDKGASAQSFIERMTNFDKNLPNEKVLPKHSLLYEYFTVYNELTKVKYVTEGMRKPAFLSGEQKKAIVDLLFKTNRKVTVKQLKEDYFKKIECFDSVEISGVEDRFNASLGTYHDLLKIIKDKDFLDNEENEDILEDIVLTLTLFEDREMIEERLKTYAHLFDDKVMKQLKRRRYTGWGRLSRKLINGIRDKQSGKTILDFLKSDGFANRNFMQLIHDDSLTFKEDIQKAQVSGQGDSLHEHIANLAGSPAIKKGILQTVKVVDELVKVMGRHKPENIVIEMARENQTTQKGQKNSRERMKRIEEGIKELGSQILKEHPVENTQLQNEKLYLYYLQNGRDMYVDQELDINRLSDYDVDHIVPQSFLKDDSIDNKVLTRSDKARGKSDNVPSEEVVKKMKNYWRQLLNAKLITQRKFDNLTKAERGGLSELDKAGFIKRQLVETRQITKHVAQILDSRMNTKYDENDKLIREVKVITLKSKLVSDFRKDFQFYKVREINNYHHAHDAYLNAVVGTALIKKYPKLESEFVYGDYKVYDVRKMIAKSEQEIGKATAKYFFYSNIMNFFKTEITLANGEIRKRPLIETNGETGEIVWDKGRDFATVRKVLSMPQVNIVKKTEVQTGGFSKESILPKRNSDKLIARKKDWDPKKYGGFDSPTVAYSVLVVAKVEKGKSKKLKSVKELLGITIMERSSFEKNPIDFLEAKGYKEVKKDLIIKLPKYSLFELENGRKRMLASAGELQKGNELALPSKYVNFLYLASHYEKLKGSPEDNEQKQLFVEQHKHYLDEIIEQISEFSKRVILADANLDKVLSAYNKHRDKPIREQAENIIHLFTLTNLGAPAAFKYFDTTIDRKRYTSTKEVLDATLIHQSITGLYETRIDLSQLGGDGGEAAAKGSSGGGGGTLNIEDEYRLHETSKGPDVPLGSTWLSDFPQAWAETGGMGLAVRQAPLIIPLKATSTPVSIKQYPMSQEARLGIKPHIQRLLDQGILVPCQSPWNTPLLPVKKPGTNDYRPVQDLREVNKRVEDIHPTVPNPYNLLSGLPPSHQWYTVLDLKDAFFCLRLHPTSQSLFAFEWRDPEMGISGQLTWTRLPQGFKNSPTLFNEALHRDLADFRIQHPDLILLQYVDDLLLAATSELDCQQGTRALLQTLGDLGYRASAKKAQICQKQVKYLGYLLKEGQRWLTEARKETVMGQPTPKTPRQLREFLGTAGFCRLWIPGFAEMAAPLYPLTKPGTLFEWGPDQQKAYQEIKQALLTAPALGLPDLTKPFELFVDEKQGYAKGVLTQKLGPWRRPVAYLSKKLDPVAAGWPPCLRMVAAIAVLTKDAGKLTMGQPLVILAPHAVEALVKQPPDRWLSNARMTHYQALLLDTDRVQFGPIVALNPATLLPLPEEGLQHDCLDILAEAHGTRPDLTDQPLPDADHTWYTDGSSFLQEGQRKAGAAVTTETEVVWAKALPAGTSAQRAELIALTQALKMAEGKKLNVYTDSRYAFATAHIHGEIYRRRGWLTSEGKEIKNKDEILALLKALFLPKRLSIIHCPGHQKGNRAEARGNRMADQAAREVATRETPETSTLLAGKRTADGSEFEKRTADGSEFESPKKKAKVE

SEQ ID NO: 2453 - protein, 2096 aa, synthetic construct
MPAAKRVKLDGGDKKYSIGLDIGTNSVGWAVITDEYKVPSKKFKVLGNTDRHSIKKNLIGALLFDSGETAEATRLKRTARRRYTRRKNRICYLQEIFSNEMAKVDDSFFHRLEESFLVEEDKKHERHPIFGNIVDEVAYHEKYPTIYHLRKKLVDSTDKADLRLIYLALAHMIKFRGHFLIEGDLNPDNSDVDKLFIQLVQTYNQLFEENPINASGVDAKAILSARLSKSRRLENLIAQLPGEKKNGLFGNLIALSLGLTPNFKSNFDLAEDAKLQLSKDTYDDDLDNLLAQIGDQYADLFLAAKNLSDAILLSDILRVNTEITKAPLSASMIKRYDEHHQDLTLLKALVRQQLPEKYKEIFFDQSKNGYAGYIDGGASQEEFYKFIKPILEKMDGTEELLVKLNREDLLRKQRTFDNGSIPHQIHLGELHAILRRQEDFYPFLKDNREKIEKILTFRIPYYVGPLARGNSRFAWMTRKSEETITPWNFEEVVDKGASAQSFIERMTNFDKNLPNEKVLPKHSLLYEYFTVYNELTKVKYVTEGMRKPAFLSGEQKKAIVDLLFKTNRKVTVKQLKEDYFKKIECFDSVEISGVEDRFNASLGTYHDLLKIIKDKDFLDNEENEDILEDIVLTLTLFEDREMIEERLKTYAHLFDDKVMKQLKRRRYTGWGRLSRKLINGIRDKQSGKTILDFLKSDGFANRNFMQLIHDDSLTFKEDIQKAQVSGQGDSLHEHIANLAGSPAIKKGILQTVKVVDELVKVMGRHKPENIVIEMARENQTTQKGQKNSRERMKRIEEGIKELGSQILKEHPVENTQLQNEKLYLYYLQNGRDMYVDQELDINRLSDYDVDHIVPQSFLKDDSIDNKVLTRSDKARGKSDNVPSEEVVKKMKNYWRQLLNAKLITQRKFDNLTKAERGGLSELDKAGFIKRQLVETRQITKHVAQILDSRMNTKYDENDKLIREVKVITLKSKLVSDFRKDFQFYKVREINNYHHAHDAYLNAVVGTALIKKYPKLESEFVYGDYKVYDVRKMIAKSEQEIGKATAKYFFYSNIMNFFKTEITLANGEIRKRPLIETNGETGEIVWDKGRDFATVRKVLSMPQVNIVKKTEVQTGGFSKESILPKRNSDKLIARKKDWDPKKYGGFDSPTVAYSVLVVAKVEKGKSKKLKSVKELLGITIMERSSFEKNPIDFLEAKGYKEVKKDLIIKLPKYSLFELENGRKRMLASAGELQKGNELALPSKYVNFLYLASHYEKLKGSPEDNEQKQLFVEQHKHYLDEIIEQISEFSKRVILADANLDKVLSAYNKHRDKPIREQAENIIHLFTLTNLGAPAAFKYFDTTIDRKRYTSTKEVLDATLIHQSITGLYETRIDLSQLGGDGGPAPGSSEAAAKGGTLNIEDEYRLHETSKGPDVPLGSTWLSDFPQAWAETGGMGLAVRQAPLIIPLKATSTPVSIKQYPMSQEARLGIKPHIQRLLDQGILVPCQSPWNTPLLPVKKPGTNDYRPVQDLREVNKRVEDIHPTVPNPYNLLSGLPPSHQWYTVLDLKDAFFCLRLHPTSQSLFAFEWRDPEMGISGQLTWTRLPQGFKNSPTLFNEALHRDLADFRIQHPDLILLQYVDDLLLAATSELDCQQGTRALLQTLGDLGYRASAKKAQICQKQVKYLGYLLKEGQRWLTEARKETVMGQPTPKTPRQLREFLGTAGFCRLWIPGFAEMAAPLYPLTKPGTLFEWGPDQQKAYQEIKQALLTAPALGLPDLTKPFELFVDEKQGYAKGVLTQKLGPWRRPVAYLSKKLDPVAAGWPPCLRMVAAIAVLTKDAGKLTMGQPLVILAPHAVEALVKQPPDRWLSNARMTHYQALLLDTDRVQFGPIVALNPATLLPLPEEGLQHDCLDILAEAHGTRPDLTDQPLPDADHTWYTDGSSFLQEGQRKAGAAVTTETEVVWAKALPAGTSAQRAELIALTQALKMAEGKKLNVYTDSRYAFATAHIHGEIYRRRGWLTSEGKEIKNKDEILALLKALFLPKRLSIIHCPGHQKGNRAEARGNRMADQAAREVATRETPETSTLLAGKRTADGSEFEKRTADGSEFESPKKKAKVE

SEQ ID NO: 2454 - protein, 2110 aa, synthetic construct
MPAAKRVKLDGGDKKYSIGLDIGTNSVGWAVITDEYKVPSKKFKVLGNTDRHSIKKNLIGALLFDSGETAEATRLKRTARRRYTRRKNRICYLQEIFSNEMAKVDDSFFHRLEESFLVEEDKKHERHPIFGNIVDEVAYHEKYPTIYHLRKKLVDSTDKADLRLIYLALAHMIKFRGHFLIEGDLNPDNSDVDKLFIQLVQTYNQLFEENPINASGVDAKAILSARLSKSRRLENLIAQLPGEKKNGLFGNLIALSLGLTPNFKSNFDLAEDAKLQLSKDTYDDDLDNLLAQIGDQYADLFLAAKNLSDAILLSDILRVNTEITKAPLSASMIKRYDEHHQDLTLLKALVRQQLPEKYKEIFFDQSKNGYAGYIDGGASQEEFYKFIKPILEKMDGTEELLVKLNREDLLRKQRTFDNGSIPHQIHLGELHAILRRQEDFYPFLKDNREKIEKILTFRIPYYVGPLARGNSRFAWMTRKSEETITPWNFEEVVDKGASAQSFIERMTNFDKNLPNEKVLPKHSLLYEYFTVYNELTKVKYVTEGMRKPAFLSGEQKKAIVDLLFKTNRKVTVKQLKEDYFKKIECFDSVEISGVEDRFNASLGTYHDLLKIIKDKDFLDNEENEDILEDIVLTLTLFEDREMIEERLKTYAHLFDDKVMKQLKRRRYTGWGRLSRKLINGIRDKQSGKTILDFLKSDGFANRNFMQLIHDDSLTFKEDIQKAQVSGQGDSLHEHIANLAGSPAIKKGILQTVKVVDELVKVMGRHKPENIVIEMARENQTTQKGQKNSRERMKRIEEGIKELGSQILKEHPVENTQLQNEKLYLYYLQNGRDMYVDQELDINRLSDYDVDHIVPQSFLKDDSIDNKVLTRSDKARGKSDNVPSEEVVKKMKNYWRQLLNAKLITQRKFDNLTKAERGGLSELDKAGFIKRQLVETRQITKHVAQILDSRMNTKYDENDKLIREVKVITLKSKLVSDFRKDFQFYKVREINNYHHAHDAYLNAVVGTALIKKYPKLESEFVYGDYKVYDVRKMIAKSEQEIGKATAKYFFYSNIMNFFKTEITLANGEIRKRPLIETNGETGEIVWDKGRDFATVRKVLSMPQVNIVKKTEVQTGGFSKESILPKRNSDKLIARKKDWDPKKYGGFDSPTVAYSVLVVAKVEKGKSKKLKSVKELLGITIMERSSFEKNPIDFLEAKGYKEVKKDLIIKLPKYSLFELENGRKRMLASAGELQKGNELALPSKYVNFLYLASHYEKLKGSPEDNEQKQLFVEQHKHYLDEIIEQISEFSKRVILADANLDKVLSAYNKHRDKPIREQAENIIHLFTLTNLGAPAAFKYFDTTIDRKRYTSTKEVLDATLIHQSITGLYETRIDLSQLGGDGGEAAAKEAAAKEAAAKEAAAKEAAAKGGTLNIEDEYRLHETSKGPDVPLGSTWLSDFPQAWAETGGMGLAVRQAPLIIPLKATSTPVSIKQYPMSQEARLGIKPHIQRLLDQGILVPCQSPWNTPLLPVKKPGTNDYRPVQDLREVNKRVEDIHPTVPNPYNLLSGLPPSHQWYTVLDLKDAFFCLRLHPTSQSLFAFEWRDPEMGISGQLTWTRLPQGFKNSPTLFNEALHRDLADFRIQHPDLILLQYVDDLLLAATSELDCQQGTRALLQTLGDLGYRASAKKAQICQKQVKYLGYLLKEGQRWLTEARKETVMGQPTPKTPRQLREFLGTAGFCRLWIPGFAEMAAPLYPLTKPGTLFEWGPDQQKAYQEIKQALLTAPALGLPDLTKPFELFVDEKQGYAKGVLTQKLGPWRRPVAYLSKKLDPVAAGWPPCLRMVAAIAVLTKDAGKLTMGQPLVILAPHAVEALVKQPPDRWLSNARMTHYQALLLDTDRVQFGPIVALNPATLLPLPEEGLQHDCLDILAEAHGTRPDLTDQPLPDADHTWYTDGSSFLQEGQRKAGAAVTTETEVVWAKALPAGTSAQRAELIALTQALKMAEGKKLNVYTDSRYAFATAHIHGEIYRRRGWLTSEGKEIKNKDEILALLKALFLPKRLSIIHCPGHQKGNRAEARGNRMADQAAREVATRETPETSTLLAGKRTADGSEFEKRTADGSEFESPKKKAKVE

SEQ ID NO: 2455 - protein, 2115 aa, synthetic construct
MPAAKRVKLDGGDKKYSIGLDIGTNSVGWAVITDEYKVPSKKFKVLGNTDRHSIKKNLIGALLFDSGETAEATRLKRTARRRYTRRKNRICYLQEIFSNEMAKVDDSFFHRLEESFLVEEDKKHERHPIFGNIVDEVAYHEKYPTIYHLRKKLVDSTDKADLRLIYLALAHMIKFRGHFLIEGDLNPDNSDVDKLFIQLVQTYNQLFEENPINASGVDAKAILSARLSKSRRLENLIAQLPGEKKNGLFGNLIALSLGLTPNFKSNFDLAEDAKLQLSKDTYDDDLDNLLAQIGDQYADLFLAAKNLSDAILLSDILRVNTEITKAPLSASMIKRYDEHHQDLTLLKALVRQQLPEKYKEIFFDQSKNGYAGYIDGGASQEEFYKFIKPILEKMDGTEELLVKLNREDLLRKQRTFDNGSIPHQIHLGELHAILRRQEDFYPFLKDNREKIEKILTFRIPYYVGPLARGNSRFAWMTRKSEETITPWNFEEVVDKGASAQSFIERMTNFDKNLPNEKVLPKHSLLYEYFTVYNELTKVKYVTEGMRKPAFLSGEQKKAIVDLLFKTNRKVTVKQLKEDYFKKIECFDSVEISGVEDRFNASLGTYHDLLKIIKDKDFLDNEENEDILEDIVLTLTLFEDREMIEERLKTYAHLFDDKVMKQLKRRRYTGWGRLSRKLINGIRDKQSGKTILDFLKSDGFANRNFMQLIHDDSLTFKEDIQKAQVSGQGDSLHEHIANLAGSPAIKKGILQTVKVVDELVKVMGRHKPENIVIEMARENQTTQKGQKNSRERMKRIEEGIKELGSQILKEHPVENTQLQNEKLYLYYLQNGRDMYVDQELDINRLSDYDVDHIVPQSFLKDDSIDNKVLTRSDKARGKSDNVPSEEVVKKMKNYWRQLLNAKLITQRKFDNLTKAERGGLSELDKAGFIKRQLVETRQITKHVAQILDSRMNTKYDENDKLIREVKVITLKSKLVSDFRKDFQFYKVREINNYHHAHDAYLNAVVGTALIKKYPKLESEFVYGDYKVYDVRKMIAKSEQEIGKATAKYFFYSNIMNFFKTEITLANGEIRKRPLIETNGETGEIVWDKGRDFATVRKVLSMPQVNIVKKTEVQTGGFSKESILPKRNSDKLIARKKDWDPKKYGGFDSPTVAYSVLVVAKVEKGKSKKLKSVKELLGITIMERSSFEKNPIDFLEAKGYKEVKKDLIIKLPKYSLFELENGRKRMLASAGELQKGNELALPSKYVNFLYLASHYEKLKGSPEDNEQKQLFVEQHKHYLDEIIEQISEFSKRVILADANLDKVLSAYNKHRDKPIREQAENIIHLFTLTNLGAPAAFKYFDTTIDRKRYTSTKEVLDATLIHQSITGLYETRIDLSQLGGDGGEAAAKEAAAKEAAAKEAAAKEAAAKEAAAKGGTLNIEDEYRLHETSKGPDVPLGSTWLSDFPQAWAETGGMGLAVRQAPLIIPLKATSTPVSIKQYPMSQEARLGIKPHIQRLLDQGILVPCQSPWNTPLLPVKKPGTNDYRPVQDLREVNKRVEDIHPTVPNPYNLLSGLPPSHQWYTVLDLKDAFFCLRLHPTSQSLFAFEWRDPEMGISGQLTWTRLPQGFKNSPTLFNEALHRDLADFRIQHPDLILLQYVDDLLLAATSELDCQQGTRALLQTLGDLGYRASAKKAQICQKQVKYLGYLLKEGQRWLTEARKETVMGQPTPKTPRQLREFLGTAGFCRLWIPGFAEMAAPLYPLTKPGTLFEWGPDQQKAYQEIKQALLTAPALGLPDLTKPFELFVDEKQGYAKGVLTQKLGPWRRPVAYLSKKLDPVAAGWPPCLRMVAAIAVLTKDAGKLTMGQPLVILAPHAVEALVKQPPDRWLSNARMTHYQALLLDTDRVQFGPIVALNPATLLPLPEEGLQHDCLDILAEAHGTRPDLTDQPLPDADHTWYTDGSSFLQEGQRKAGAAVTTETEVVWAKALPAGTSAQRAELIALTQALKMAEGKKLNVYTDSRYAFATAHIHGEIYRRRGWLTSEGKEIKNKDEILALLKALFLPKRLSIIHCPGHQKGNRAEARGNRMADQAAREVATRETPETSTLLAGKRTADGSEFEKRTADGSEFESPKKKAKVE

SEQ ID NO: 2456 - protein, 2093 aa, synthetic construct
MPAAKRVKLDGGDKKYSIGLDIGTNSVGWAVITDEYKVPSKKFKVLGNTDRHSIKKNLIGALLFDSGETAEATRLKRTARRRYTRRKNRICYLQEIFSNEMAKVDDSFFHRLEESFLVEEDKKHERHPIFGNIVDEVAYHEKYPTIYHLRKKLVDSTDKADLRLIYLALAHMIKFRGHFLIEGDLNPDNSDVDKLFIQLVQTYNQLFEENPINASGVDAKAILSARLSKSRRLENLIAQLPGEKKNGLFGNLIALSLGLTPNFKSNFDLAEDAKLQLSKDTYDDDLDNLLAQIGDQYADLFLAAKNLSDAILLSDILRVNTEITKAPLSASMIKRYDEHHQDLTLLKALVRQQLPEKYKEIFFDQSKNGYAGYIDGGASQEEFYKFIKPILEKMDGTEELLVKLNREDLLRKQRTFDNGSIPHQIHLGELHAILRRQEDFYPFLKDNREKIEKILTFRIPYYVGPLARGNSRFAWMTRKSEETITPWNFEEVVDKGASAQSFIERMTNFDKNLPNEKVLPKHSLLYEYFTVYNELTKVKYVTEGMRKPAFLSGEQKKAIVDLLFKTNRKVTVKQLKEDYFKKIECFDSVEISGVEDRFNASLGTYHDLLKIIKDKDFLDNEENEDILEDIVLTLTLFEDREMIEERLKTYAHLFDDKVMKQLKRRRYTGWGRLSRKLINGIRDKQSGKTILDFLKSDGFANRNFMQLIHDDSLTFKEDIQKAQVSGQGDSLHEHIANLAGSPAIKKGILQTVKVVDELVKVMGRHKPENIVIEMARENQTTQKGQKNSRERMKRIEEGIKELGSQILKEHPVENTQLQNEKLYLYYLQNGRDMYVDQELDINRLSDYDVDHIVPQSFLKDDSIDNKVLTRSDKARGKSDNVPSEEVVKKMKNYWRQLLNAKLITQRKFDNLTKAERGGLSELDKAGFIKRQLVETRQITKHVAQILDSRMNTKYDENDKLIREVKVITLKSKLVSDFRKDFQFYKVREINNYHHAHDAYLNAVVGTALIKKYPKLESEFVYGDYKVYDVRKMIAKSEQEIGKATAKYFFYSNIMNFFKTEITLANGEIRKRPLIETNGETGEIVWDKGRDFATVRKVLSMPQVNIVKKTEVQTGGFSKESILPKRNSDKLIARKKDWDPKKYGGFDSPTVAYSVLVVAKVEKGKSKKLKSVKELLGITIMERSSFEKNPIDFLEAKGYKEVKKDLIIKLPKYSLFELENGRKRMLASAGELQKGNELALPSKYVNFLYLASHYEKLKGSPEDNEQKQLFVEQHKHYLDEIIEQISEFSKRVILADANLDKVLSAYNKHRDKPIREQAENIIHLFTLTNLGAPAAFKYFDTTIDRKRYTSTKEVLDATLIHQSITGLYETRIDLSQLGGDGGEAAAKGGSGGTLNIEDEYRLHETSKGPDVPLGSTWLSDFPQAWAETGGMGLAVRQAPLIIPLKATSTPVSIKQYPMSQEARLGIKPHIQRLLDQGILVPCQSPWNTPLLPVKKPGTNDYRPVQDLREVNKRVEDIHPTVPNPYNLLSGLPPSHQWYTVLDLKDAFFCLRLHPTSQSLFAFEWRDPEMGISGQLTWTRLPQGFKNSPTLFNEALHRDLADFRIQHPDLILLQYVDDLLLAATSELDCQQGTRALLQTLGDLGYRASAKKAQICQKQVKYLGYLLKEGQRWLTEARKETVMGQPTPKTPRQLREFLGTAGFCRLWIPGFAEMAAPLYPLTKPGTLFEWGPDQQKAYQEIKQALLTAPALGLPDLTKPFELFVDEKQGYAKGVLTQKLGPWRRPVAYLSKKLDPVAAGWPPCLRMVAAIAVLTKDAGKLTMGQPLVILAPHAVEALVKQPPDRWLSNARMTHYQALLLDTDRVQFGPIVALNPATLLPLPEEGLQHDCLDILAEAHGTRPDLTDQPLPDADHTWYTDGSSFLQEGQRKAGAAVTTETEVVWAKALPAGTSAQRAELIALTQALKMAEGKKLNVYTDSRYAFATAHIHGEIYRRRGWLTSEGKEIKNKDEILALLKALFLPKRLSIIHCPGHQKGNRAEARGNRMADQAAREVATRETPETSTLLAGKRTADGSEFEKRTADGSEFESPKKKAKVE

SEQ ID NO: 2457 - protein, 2096 aa, synthetic construct
MPAAKRVKLDGGDKKYSIGLDIGTNSVGWAVITDEYKVPSKKFKVLGNTDRHSIKKNLIGALLFDSGETAEATRLKRTARRRYTRRKNRICYLQEIFSNEMAKVDDSFFHRLEESFLVEEDKKHERHPIFGNIVDEVAYHEKYPTIYHLRKKLVDSTDKADLRLIYLALAHMIKFRGHFLIEGDLNPDNSDVDKLFIQLVQTYNQLFEENPINASGVDAKAILSARLSKSRRLENLIAQLPGEKKNGLFGNLIALSLGLTPNFKSNFDLAEDAKLQLSKDTYDDDLDNLLAQIGDQYADLFLAAKNLSDAILLSDILRVNTEITKAPLSASMIKRYDEHHQDLTLLKALVRQQLPEKYKEIFFDQSKNGYAGYIDGGASQEEFYKFIKPILEKMDGTEELLVKLNREDLLRKQRTFDNGSIPHQIHLGELHAILRRQEDFYPFLKDNREKIEKILTFRIPYYVGPLARGNSRFAWMTRKSEETITPWNFEEVVDKGASAQSFIERMTNFDKNLPNEKVLPKHSLLYEYFTVYNELTKVKYVTEGMRKPAFLSGEQKKAIVDLLFKTNRKVTVKQLKEDYFKKIECFDSVEISGVEDRFNASLGTYHDLLKIIKDKDFLDNEENEDILEDIVLTLTLFEDREMIEERLKTYAHLFDDKVMKQLKRRRYTGWGRLSRKLINGIRDKQSGKTILDFLKSDGFANRNFMQLIHDDSLTFKEDIQKAQVSGQGDSLHEHIANLAGSPAIKKGILQTVKVVDELVKVMGRHKPENIVIEMARENQTTQKGQKNSRERMKRIEEGIKELGSQILKEHPVENTQLQNEKLYLYYLQNGRDMYVDQELDINRLSDYDVDHIVPQSFLKDDSIDNKVLTRSDKARGKSDNVPSEEVVKKMKNYWRQLLNAKLITQRKFDNLTKAERGGLSELDKAGFIKRQLVETRQITKHVAQILDSRMNTKYDENDKLIREVKVITLKSKLVSDFRKDFQFYKVREINNYHHAHDAYLNAVVGTALIKKYPKLESEFVYGDYKVYDVRKMIAKSEQEIGKATAKYFFYSNIMNFFKTEITLANGEIRKRPLIETNGETGEIVWDKGRDFATVRKVLSMPQVNIVKKTEVQTGGFSKESILPKRNSDKLIARKKDWDPKKYGGFDSPTVAYSVLVVAKVEKGKSKKLKSVKELLGITIMERSSFEKNPIDFLEAKGYKEVKKDLIIKLPKYSLFELENGRKRMLASAGELQKGNELALPSKYVNFLYLASHYEKLKGSPEDNEQKQLFVEQHKHYLDEIIEQISEFSKRVILADANLDKVLSAYNKHRDKPIREQAENIIHLFTLTNLGAPAAFKYFDTTIDRKRYTSTKEVLDATLIHQSITGLYETRIDLSQLGGDGGEAAAKGGGPAPGGTLNIEDEYRLHETSKGPDVPLGSTWLSDFPQAWAETGGMGLAVRQAPLIIPLKATSTPVSIKQYPMSQEARLGIKPHIQRLLDQGILVPCQSPWNTPLLPVKKPGTNDYRPVQDLREVNKRVEDIHPTVPNPYNLLSGLPPSHQWYTVLDLKDAFFCLRLHPTSQSLFAFEWRDPEMGISGQLTWTRLPQGFKNSPTLFNEALHRDLADFRIQHPDLILLQYVDDLLLAATSELDCQQGTRALLQTLGDLGYRASAKKAQICQKQVKYLGYLLKEGQRWLTEARKETVMGQPTPKTPRQLREFLGTAGFCRLWIPGFAEMAAPLYPLTKPGTLFEWGPDQQKAYQEIKQALLTAPALGLPDLTKPFELFVDEKQGYAKGVLTQKLGPWRRPVAYLSKKLDPVAAGWPPCLRMVAAIAVLTKDAGKLTMGQPLVILAPHAVEALVKQPPDRWLSNARMTHYQALLLDTDRVQFGPIVALNPATLLPLPEEGLQHDCLDILAEAHGTRPDLTDQPLPDADHTWYTDGSSFLQEGQRKAGAAVTTETEVVWAKALPAGTSAQRAELIALTQALKMAEGKKLNVYTDSRYAFATAHIHGEIYRRRGWLTSEGKEIKNKDEILALLKALFLPKRLSIIHCPGHQKGNRAEARGNRMADQAAREVATRETPETSTLLAGKRTADGSEFEKRTADGSEFESPKKKAKVE

SEQ ID NO: 2458 - protein, 2096 aa, synthetic construct
MPAAKRVKLDGGDKKYSIGLDIGTNSVGWAVITDEYKVPSKKFKVLGNTDRHSIKKNLIGALLFDSGETAEATRLKRTARRRYTRRKNRICYLQEIFSNEMAKVDDSFFHRLEESFLVEEDKKHERHPIFGNIVDEVAYHEKYPTIYHLRKKLVDSTDKADLRLIYLALAHMIKFRGHFLIEGDLNPDNSDVDKLFIQLVQTYNQLFEENPINASGVDAKAILSARLSKSRRLENLIAQLPGEKKNGLFGNLIALSLGLTPNFKSNFDLAEDAKLQLSKDTYDDDLDNLLAQIGDQYADLFLAAKNLSDAILLSDILRVNTEITKAPLSASMIKRYDEHHQDLTLLKALVRQQLPEKYKEIFFDQSKNGYAGYIDGGASQEEFYKFIKPILEKMDGTEELLVKLNREDLLRKQRTFDNGSIPHQIHLGELHAILRRQEDFYPFLKDNREKIEKILTFRIPYYVGPLARGNSRFAWMTRKSEETITPWNFEEVVDKGASAQSFIERMTNFDKNLPNEKVLPKHSLLYEYFTVYNELTKVKYVTEGMRKPAFLSGEQKKAIVDLLFKTNRKVTVKQLKEDYFKKIECFDSVEISGVEDRFNASLGTYHDLLKIIKDKDFLDNEENEDILEDIVLTLTLFEDREMIEERLKTYAHLFDDKVMKQLKRRRYTGWGRLSRKLINGIRDKQSGKTILDFLKSDGFANRNFMQLIHDDSLTFKEDIQKAQVSGQGDSLHEHIANLAGSPAIKKGILQTVKVVDELVKVMGRHKPENIVIEMARENQTTQKGQKNSRERMKRIEEGIKELGSQILKEHPVENTQLQNEKLYLYYLQNGRDMYVDQELDINRLSDYDVDHIVPQSFLKDDSIDNKVLTRSDKARGKSDNVPSEEVVKKMKNYWRQLLNAKLITQRKFDNLTKAERGGLSELDKAGFIKRQLVETRQITKHVAQILDSRMNTKYDENDKLIREVKVITLKSKLVSDFRKDFQFYKVREINNYHHAHDAYLNAVVGTALIKKYPKLESEFVYGDYKVYDVRKMIAKSEQEIGKATAKYFFYSNIMNFFKTEITLANGEIRKRPLIETNGETGEIVWDKGRDFATVRKVLSMPQVNIVKKTEVQTGGFSKESILPKRNSDKLIARKKDWDPKKYGGFDSPTVAYSVLVVAKVEKGKSKKLKSVKELLGITIMERSSFEKNPIDFLEAKGYKEVKKDLIIKLPKYSLFELENGRKRMLASAGELQKGNELALPSKYVNFLYLASHYEKLKGSPEDNEQKQLFVEQHKHYLDEIIEQISEFSKRVILADANLDKVLSAYNKHRDKPIREQAENIIHLFTLTNLGAPAAFKYFDTTIDRKRYTSTKEVLDATLIHQSITGLYETRIDLSQLGGDGGGSSEAAAKGGGGGTLNIEDEYRLHETSKGPDVPLGSTWLSDFPQAWAETGGMGLAVRQAPLIIPLKATSTPVSIKQYPMSQEARLGIKPHIQRLLDQGILVPCQSPWNTPLLPVKKPGTNDYRPVQDLREVNKRVEDIHPTVPNPYNLLSGLPPSHQWYTVLDLKDAFFCLRLHPTSQSLFAFEWRDPEMGISGQLTWTRLPQGFKNSPTLFNEALHRDLADFRIQHPDLILLQYVDDLLLAATSELDCQQGTRALLQTLGDLGYRASAKKAQICQKQVKYLGYLLKEGQRWLTEARKETVMGQPTPKTPRQLREFLGTAGFCRLWIPGFAEMAAPLYPLTKPGTLFEWGPDQQKAYQEIKQALLTAPALGLPDLTKPFELFVDEKQGYAKGVLTQKLGPWRRPVAYLSKKLDPVAAGWPPCLRMVAAIAVLTKDAGKLTMGQPLVILAPHAVEALVKQPPDRWLSNARMTHYQALLLDTDRVQFGPIVALNPATLLPLPEEGLQHDCLDILAEAHGTRPDLTDQPLPDADHTWYTDGSSFLQEGQRKAGAAVTTETEVVWAKALPAGTSAQRAELIALTQALKMAEGKKLNVYTDSRYAFATAHIHGEIYRRRGWLTSEGKEIKNKDEILALLKALFLPKRLSIIHCPGHQKGNRAEARGNRMADQAAREVATRETPETSTLLAGKRTADGSEFEKRTADGSEFESPKKKAKVE

SEQ ID NO: 2459 - protein, 2096 aa, synthetic construct
MPAAKRVKLDGGDKKYSIGLDIGTNSVGWAVITDEYKVPSKKFKVLGNTDRHSIKKNLIGALLFDSGETAEATRLKRTARRRYTRRKNRICYLQEIFSNEMAKVDDSFFHRLEESFLVEEDKKHERHPIFGNIVDEVAYHEKYPTIYHLRKKLVDSTDKADLRLIYLALAHMIKFRGHFLIEGDLNPDNSDVDKLFIQLVQTYNQLFEENPINASGVDAKAILSARLSKSRRLENLIAQLPGEKKNGLFGNLIALSLGLTPNFKSNFDLAEDAKLQLSKDTYDDDLDNLLAQIGDQYADLFLAAKNLSDAILLSDILRVNTEITKAPLSASMIKRYDEHHQDLTLLKALVRQQLPEKYKEIFFDQSKNGYAGYIDGGASQEEFYKFIKPILEKMDGTEELLVKLNREDLLRKQRTFDNGSIPHQIHLGELHAILRRQEDFYPFLKDNREKIEKILTFRIPYYVGPLARGNSRFAWMTRKSEETITPWNFEEVVDKGASAQSFIERMTNFDKNLPNEKVLPKHSLLYEYFTVYNELTKVKYVTEGMRKPAFLSGEQKKAIVDLLFKTNRKVTVKQLKEDYFKKIECFDSVEISGVEDRFNASLGTYHDLLKIIKDKDFLDNEENEDILEDIVLTLTLFEDREMIEERLKTYAHLFDDKVMKQLKRRRYTGWGRLSRKLINGIRDKQSGKTILDFLKSDGFANRNFMQLIHDDSLTFKEDIQKAQVSGQGDSLHEHIANLAGSPAIKKGILQTVKVVDELVKVMGRHKPENIVIEMARENQTTQKGQKNSRERMKRIEEGIKELGSQILKEHPVENTQLQNEKLYLYYLQNGRDMYVDQELDINRLSDYDVDHIVPQSFLKDDSIDNKVLTRSDKARGKSDNVPSEEVVKKMKNYWRQLLNAKLITQRKFDNLTKAERGGLSELDKAGFIKRQLVETRQITKHVAQILDSRMNTKYDENDKLIREVKVITLKSKLVSDFRKDFQFYKVREINNYHHAHDAYLNAVVGTALIKKYPKLESEFVYGDYKVYDVRKMIAKSEQEIGKATAKYFFYSNIMNFFKTEITLANGEIRKRPLIETNGETGEIVWDKGRDFATVRKVLSMPQVNIVKKTEVQTGGFSKESILPKRNSDKLIARKKDWDPKKYGGFDSPTVAYSVLVVAKVEKGKSKKLKSVKELLGITIMERSSFEKNPIDFLEAKGYKEVKKDLIIKLPKYSLFELENGRKRMLASAGELQKGNELALPSKYVNFLYLASHYEKLKGSPEDNEQKQLFVEQHKHYLDEIIEQISEFSKRVILADANLDKVLSAYNKHRDKPIREQAENIIHLFTLTNLGAPAAFKYFDTTIDRKRYTSTKEVLDATLIHQSITGLYETRIDLSQLGGDGGGGSGGGEAAAKGGTLNIEDEYRLHETSKGPDVPLGSTWLSDFPQAWAETGGMGLAVRQAPLIIPLKATSTPVSIKQYPMSQEARLGIKPHIQRLLDQGILVPCQSPWNTPLLPVKKPGTNDYRPVQDLREVNKRVEDIHPTVPNPYNLLSGLPPSHQWYTVLDLKDAFFCLRLHPTSQSLFAFEWRDPEMGISGQLTWTRLPQGFKNSPTLFNEALHRDLADFRIQHPDLILLQYVDDLLLAATSELDCQQGTRALLQTLGDLGYRASAKKAQICQKQVKYLGYLLKEGQRWLTEARKETVMGQPTPKTPRQLREFLGTAGFCRLWIPGFAEMAAPLYPLTKPGTLFEWGPDQQKAYQEIKQALLTAPALGLPDLTKPFELFVDEKQGYAKGVLTQKLGPWRRPVAYLSKKLDPVAAGWPPCLRMVAAIAVLTKDAGKLTMGQPLVILAPHAVEALVKQPPDRWLSNARMTHYQALLLDTDRVQFGPIVALNPATLLPLPEEGLQHDCLDILAEAHGTRPDLTDQPLPDADHTWYTDGSSFLQEGQRKAGAAVTTETEVVWAKALPAGTSAQRAELIALTQALKMAEGKKLNVYTDSRYAFATAHIHGEIYRRRGWLTSEGKEIKNKDEILALLKALFLPKRLSIIHCPGHQKGNRAEARGNRMADQAAREVATRETPETSTLLAGKRTADGSEFEKRTADGSEFESPKKKAKVE

SEQ ID NO: 2460 - protein, 2096 aa, synthetic construct
MPAAKRVKLDGGDKKYSIGLDIGTNSVGWAVITDEYKVPSKKFKVLGNTDRHSIKKNLIGALLFDSGETAEATRLKRTARRRYTRRKNRICYLQEIFSNEMAKVDDSFFHRLEESFLVEEDKKHERHPIFGNIVDEVAYHEKYPTIYHLRKKLVDSTDKADLRLIYLALAHMIKFRGHFLIEGDLNPDNSDVDKLFIQLVQTYNQLFEENPINASGVDAKAILSARLSKSRRLENLIAQLPGEKKNGLFGNLIALSLGLTPNFKSNFDLAEDAKLQLSKDTYDDDLDNLLAQIGDQYADLFLAAKNLSDAILLSDILRVNTEITKAPLSASMIKRYDEHHQDLTLLKALVRQQLPEKYKEIFFDQSKNGYAGYIDGGASQEEFYKFIKPILEKMDGTEELLVKLNREDLLRKQRTFDNGSIPHQIHLGELHAILRRQEDFYPFLKDNREKIEKILTFRIPYYVGPLARGNSRFAWMTRKSEETITPWNFEEVVDKGASAQSFIERMTNFDKNLPNEKVLPKHSLLYEYFTVYNELTKVKYVTEGMRKPAFLSGEQKKAIVDLLFKTNRKVTVKQLKEDYFKKIECFDSVEISGVEDRFNASLGTYHDLLKIIKDKDFLDNEENEDILEDIVLTLTLFEDREMIEERLKTYAHLFDDKVMKQLKRRRYTGWGRLSRKLINGIRDKQSGKTILDFLKSDGFANRNFMQLIHDDSLTFKEDIQKAQVSGQGDSLHEHIANLAGSPAIKKGILQTVKVVDELVKVMGRHKPENIVIEMARENQTTQKGQKNSRERMKRIEEGIKELGSQILKEHPVENTQLQNEKLYLYYLQNGRDMYVDQELDINRLSDYDVDHIVPQSFLKDDSIDNKVLTRSDKARGKSDNVPSEEVVKKMKNYWRQLLNAKLITQRKFDNLTKAERGGLSELDKAGFIKRQLVETRQITKHVAQILDSRMNTKYDENDKLIREVKVITLKSKLVSDFRKDFQFYKVREINNYHHAHDAYLNAVVGTALIKKYPKLESEFVYGDYKVYDVRKMIAKSEQEIGKATAKYFFYSNIMNFFKTEITLANGEIRKRPLIETNGETGEIVWDKGRDFATVRKVLSMPQVNIVKKTEVQTGGFSKESILPKRNSDKLIARKKDWDPKKYGGFDSPTVAYSVLVVAKVEKGKSKKLKSVKELLGITIMERSSFEKNPIDFLEAKGYKEVKKDLIIKLPKYSLFELENGRKRMLASAGELQKGNELALPSKYVNFLYLASHYEKLKGSPEDNEQKQLFVEQHKHYLDEIIEQISEFSKRVILADANLDKVLSAYNKHRDKPIREQAENIIHLFTLTNLGAPAAFKYFDTTIDRKRYTSTKEVLDATLIHQSITGLYETRIDLSQLGGDGGEAAAKGGSGSSGGTLNIEDEYRLHETSKGPDVPLGSTWLSDFPQAWAETGGMGLAVRQAPLIIPLKATSTPVSIKQYPMSQEARLGIKPHIQRLLDQGILVPCQSPWNTPLLPVKKPGTNDYRPVQDLREVNKRVEDIHPTVPNPYNLLSGLPPSHQWYTVLDLKDAFFCLRLHPTSQSLFAFEWRDPEMGISGQLTWTRLPQGFKNSPTLFNEALHRDLADFRIQHPDLILLQYVDDLLLAATSELDCQQGTRALLQTLGDLGYRASAKKAQICQKQVKYLGYLLKEGQRWLTEARKETVMGQPTPKTPRQLREFLGTAGFCRLWIPGFAEMAAPLYPLTKPGTLFEWGPDQQKAYQEIKQALLTAPALGLPDLTKPFELFVDEKQGYAKGVLTQKLGPWRRPVAYLSKKLDPVAAGWPPCLRMVAAIAVLTKDAGKLTMGQPLVILAPHAVEALVKQPPDRWLSNARMTHYQALLLDTDRVQFGPIVALNPATLLPLPEEGLQHDCLDILAEAHGTRPDLTDQPLPDADHTWYTDGSSFLQEGQRKAGAAVTTETEVVWAKALPAGTSAQRAELIALTQALKMAEGKKLNVYTDSRYAFATAHIHGEIYRRRGWLTSEGKEIKNKDEILALLKALFLPKRLSIIHCPGHQKGNRAEARGNRMADQAAREVATRETPETSTLLAGKRTADGSEFEKRTADGSEFESPKKKAKVE

SEQ ID NO: 2461 - protein, 2096 aa, synthetic construct
MPAAKRVKLDGGDKKYSIGLDIGTNSVGWAVITDEYKVPSKKFKVLGNTDRHSIKKNLIGALLFDSGETAEATRLKRTARRRYTRRKNRICYLQEIFSNEMAKVDDSFFHRLEESFLVEEDKKHERHPIFGNIVDEVAYHEKYPTIYHLRKKLVDSTDKADLRLIYLALAHMIKFRGHFLIEGDLNPDNSDVDKLFIQLVQTYNQLFEENPINASGVDAKAILSARLSKSRRLENLIAQLPGEKKNGLFGNLIALSLGLTPNFKSNFDLAEDAKLQLSKDTYDDDLDNLLAQIGDQYADLFLAAKNLSDAILLSDILRVNTEITKAPLSASMIKRYDEHHQDLTLLKALVRQQLPEKYKEIFFDQSKNGYAGYIDGGASQEEFYKFIKPILEKMDGTEELLVKLNREDLLRKQRTFDNGSIPHQIHLGELHAILRRQEDFYPFLKDNREKIEKILTFRIPYYVGPLARGNSRFAWMTRKSEETITPWNFEEVVDKGASAQSFIERMTNFDKNLPNEKVLPKHSLLYEYFTVYNELTKVKYVTEGMRKPAFLSGEQKKAIVDLLFKTNRKVTVKQLKEDYFKKIECFDSVEISGVEDRFNASLGTYHDLLKIIKDKDFLDNEENEDILEDIVLTLTLFEDREMIEERLKTYAHLFDDKVMKQLKRRRYTGWGRLSRKLINGIRDKQSGKTILDFLKSDGFANRNFMQLIHDDSLTFKEDIQKAQVSGQGDSLHEHIANLAGSPAIKKGILQTVKVVDELVKVMGRHKPENIVIEMARENQTTQKGQKNSRERMKRIEEGIKELGSQILKEHPVENTQLQNEKLYLYYLQNGRDMYVDQELDINRLSDYDVDHIVPQSFLKDDSIDNKVLTRSDKARGKSDNVPSEEVVKKMKNYWRQLLNAKLITQRKFDNLTKAERGGLSELDKAGFIKRQLVETRQITKHVAQILDSRMNTKYDENDKLIREVKVITLKSKLVSDFRKDFQFYKVREINNYHHAHDAYLNAVVGTALIKKYPKLESEFVYGDYKVYDVRKMIAKSEQEIGKATAKYFFYSNIMNFFKTEITLANGEIRKRPLIETNGETGEIVWDKGRDFATVRKVLSMPQVNIVKKTEVQTGGFSKESILPKRNSDKLIARKKDWDPKKYGGFDSPTVAYSVLVVAKVEKGKSKKLKSVKELLGITIMERSSFEKNPIDFLEAKGYKEVKKDLIIKLPKYSLFELENGRKRMLASAGELQKGNELALPSKYVNFLYLASHYEKLKGSPEDNEQKQLFVEQHKHYLDEIIEQISEFSKRVILADANLDKVLSAYNKHRDKPIREQAENIIHLFTLTNLGAPAAFKYFDTTIDRKRYTSTKEVLDATLIHQSITGLYETRIDLSQLGGDGGGGGGSSEAAAKGGTLNIEDEYRLHETSKGPDVPLGSTWLSDFPQAWAETGGMGLAVRQAPLIIPLKATSTPVSIKQYPMSQEARLGIKPHIQRLLDQGILVPCQSPWNTPLLPVKKPGTNDYRPVQDLREVNKRVEDIHPTVPNPYNLLSGLPPSHQWYTVLDLKDAFFCLRLHPTSQSLFAFEWRDPEMGISGQLTWTRLPQGFKNSPTLFNEALHRDLADFRIQHPDLILLQYVDDLLLAATSELDCQQGTRALLQTLGDLGYRASAKKAQICQKQVKYLGYLLKEGQRWLTEARKETVMGQPTPKTPRQLREFLGTAGFCRLWIPGFAEMAAPLYPLTKPGTLFEWGPDQQKAYQEIKQALLTAPALGLPDLTKPFELFVDEKQGYAKGVLTQKLGPWRRPVAYLSKKLDPVAAGWPPCLRMVAAIAVLTKDAGKLTMGQPLVILAPHAVEALVKQPPDRWLSNARMTHYQALLLDTDRVQFGPIVALNPATLLPLPEEGLQHDCLDILAEAHGTRPDLTDQPLPDADHTWYTDGSSFLQEGQRKAGAAVTTETEVVWAKALPAGTSAQRAELIALTQALKMAEGKKLNVYTDSRYAFATAHIHGEIYRRRGWLTSEGKEIKNKDEILALLKALFLPKRLSIIHCPGHQKGNRAEARGNRMADQAAREVATRETPETSTLLAGKRTADGSEFEKRTADGSEFESPKKKAKVE

SEQ ID NO: 2462 - protein, 2096 aa, synthetic construct
MPAAKRVKLDGGDKKYSIGLDIGTNSVGWAVITDEYKVPSKKFKVLGNTDRHSIKKNLIGALLFDSGETAEATRLKRTARRRYTRRKNRICYLQEIFSNEMAKVDDSFFHRLEESFLVEEDKKHERHPIFGNIVDEVAYHEKYPTIYHLRKKLVDSTDKADLRLIYLALAHMIKFRGHFLIEGDLNPDNSDVDKLFIQLVQTYNQLFEENPINASGVDAKAILSARLSKSRRLENLIAQLPGEKKNGLFGNLIALSLGLTPNFKSNFDLAEDAKLQLSKDTYDDDLDNLLAQIGDQYADLFLAAKNLSDAILLSDILRVNTEITKAPLSASMIKRYDEHHQDLTLLKALVRQQLPEKYKEIFFDQSKNGYAGYIDGGASQEEFYKFIKPILEKMDGTEELLVKLNREDLLRKQRTFDNGSIPHQIHLGELHAILRRQEDFYPFLKDNREKIEKILTFRIPYYVGPLARGNSRFAWMTRKSEETITPWNFEEVVDKGASAQSFIERMTNFDKNLPNEKVLPKHSLLYEYFTVYNELTKVKYVTEGMRKPAFLSGEQKKAIVDLLFKTNRKVTVKQLKEDYFKKIECFDSVEISGVEDRFNASLGTYHDLLKIIKDKDFLDNEENEDILEDIVLTLTLFEDREMIEERLKTYAHLFDDKVMKQLKRRRYTGWGRLSRKLINGIRDKQSGKTILDFLKSDGFANRNFMQLIHDDSLTFKEDIQKAQVSGQGDSLHEHIANLAGSPAIKKGILQTVKVVDELVKVMGRHKPENIVIEMARENQTTQKGQKNSRERMKRIEEGIKELGSQILKEHPVENTQLQNEKLYLYYLQNGRDMYVDQELDINRLSDYDVDHIVPQSFLKDDSIDNKVLTRSDKARGKSDNVPSEEVVKKMKNYWRQLLNAKLITQRKFDNLTKAERGGLSELDKAGFIKRQLVETRQITKHVAQILDSRMNTKYDENDKLIREVKVITLKSKLVSDFRKDFQFYKVREINNYHHAHDAYLNAVVGTALIKKYPKLESEFVYGDYKVYDVRKMIAKSEQEIGKATAKYFFYSNIMNFFKTEITLANGEIRKRPLIETNGETGEIVWDKGRDFATVRKVLSMPQVNIVKKTEVQTGGFSKESILPKRNSDKLIARKKDWDPKKYGGFDSPTVAYSVLVVAKVEKGKSKKLKSVKELLGITIMERSSFEKNPIDFLEAKGYKEVKKDLIIKLPKYSLFELENGRKRMLASAGELQKGNELALPSKYVNFLYLASHYEKLKGSPEDNEQKQLFVEQHKHYLDEIIEQISEFSKRVILADANLDKVLSAYNKHRDKPIREQAENIIHLFTLTNLGAPAAFKYFDTTIDRKRYTSTKEVLDATLIHQSITGLYETRIDLSQLGGDGGEAAAKGGGGSSGGTLNIEDEYRLHETSKGPDVPLGSTWLSDFPQAWAETGGMGLAVRQAPLIIPLKATSTPVSIKQYPMSQEARLGIKPHIQRLLDQGILVPCQSPWNTPLLPVKKPGTNDYRPVQDLREVNKRVEDIHPTVPNPYNLLSGLPPSHQWYTVLDLKDAFFCLRLHPTSQSLFAFEWRDPEMGISGQLTWTRLPQGFKNSPTLFNEALHRDLADFRIQHPDLILLQYVDDLLLAATSELDCQQGTRALLQTLGDLGYRASAKKAQICQKQVKYLGYLLKEGQRWLTEARKETVMGQPTPKTPRQLREFLGTAGFCRLWIPGFAEMAAPLYPLTKPGTLFEWGPDQQKAYQEIKQALLTAPALGLPDLTKPFELFVDEKQGYAKGVLTQKLGPWRRPVAYLSKKLDPVAAGWPPCLRMVAAIAVLTKDAGKLTMGQPLVILAPHAVEALVKQPPDRWLSNARMTHYQALLLDTDRVQFGPIVALNPATLLPLPEEGLQHDCLDILAEAHGTRPDLTDQPLPDADHTWYTDGSSFLQEGQRKAGAAVTTETEVVWAKALPAGTSAQRAELIALTQALKMAEGKKLNVYTDSRYAFATAHIHGEIYRRRGWLTSEGKEIKNKDEILALLKALFLPKRLSIIHCPGHQKGNRAEARGNRMADQAAREVATRETPETSTLLAGKRTADGSEFEKRTADGSEFESPKKKAKVE

SEQ ID NO: 2463 - protein, 2094 aa, synthetic construct
MPAAKRVKLDGGDKKYSIGLDIGTNSVGWAVITDEYKVPSKKFKVLGNTDRHSIKKNLIGALLFDSGETAEATRLKRTARRRYTRRKNRICYLQEIFSNEMAKVDDSFFHRLEESFLVEEDKKHERHPIFGNIVDEVAYHEKYPTIYHLRKKLVDSTDKADLRLIYLALAHMIKFRGHFLIEGDLNPDNSDVDKLFIQLVQTYNQLFEENPINASGVDAKAILSARLSKSRRLENLIAQLPGEKKNGLFGNLIALSLGLTPNFKSNFDLAEDAKLQLSKDTYDDDLDNLLAQIGDQYADLFLAAKNLSDAILLSDILRVNTEITKAPLSASMIKRYDEHHQDLTLLKALVRQQLPEKYKEIFFDQSKNGYAGYIDGGASQEEFYKFIKPILEKMDGTEELLVKLNREDLLRKQRTFDNGSIPHQIHLGELHAILRRQEDFYPFLKDNREKIEKILTFRIPYYVGPLARGNSRFAWMTRKSEETITPWNFEEVVDKGASAQSFIERMTNFDKNLPNEKVLPKHSLLYEYFTVYNELTKVKYVTEGMRKPAFLSGEQKKAIVDLLFKTNRKVTVKQLKEDYFKKIECFDSVEISGVEDRFNASLGTYHDLLKIIKDKDFLDNEENEDILEDIVLTLTLFEDREMIEERLKTYAHLFDDKVMKQLKRRRYTGWGRLSRKLINGIRDKQSGKTILDFLKSDGFANRNFMQLIHDDSLTFKEDIQKAQVSGQGDSLHEHIANLAGSPAIKKGILQTVKVVDELVKVMGRHKPENIVIEMARENQTTQKGQKNSRERMKRIEEGIKELGSQILKEHPVENTQLQNEKLYLYYLQNGRDMYVDQELDINRLSDYDVDHIVPQSFLKDDSIDNKVLTRSDKARGKSDNVPSEEVVKKMKNYWRQLLNAKLITQRKFDNLTKAERGGLSELDKAGFIKRQLVETRQITKHVAQILDSRMNTKYDENDKLIREVKVITLKSKLVSDFRKDFQFYKVREINNYHHAHDAYLNAVVGTALIKKYPKLESEFVYGDYKVYDVRKMIAKSEQEIGKATAKYFFYSNIMNFFKTEITLANGEIRKRPLIETNGETGEIVWDKGRDFATVRKVLSMPQVNIVKKTEVQTGGFSKESILPKRNSDKLIARKKDWDPKKYGGFDSPTVAYSVLVVAKVEKGKSKKLKSVKELLGITIMERSSFEKNPIDFLEAKGYKEVKKDLIIKLPKYSLFELENGRKRMLASAGELQKGNELALPSKYVNFLYLASHYEKLKGSPEDNEQKQLFVEQHKHYLDEIIEQISEFSKRVILADANLDKVLSAYNKHRDKPIREQAENIIHLFTLTNLGAPAAFKYFDTTIDRKRYTSTKEVLDATLIHQSITGLYETRIDLSQLGGDGGGSSGGSGGGGGTLNIEDEYRLHETSKGPDVPLGSTWLSDFPQAWAETGGMGLAVRQAPLIIPLKATSTPVSIKQYPMSQEARLGIKPHIQRLLDQGILVPCQSPWNTPLLPVKKPGTNDYRPVQDLREVNKRVEDIHPTVPNPYNLLSGLPPSHQWYTVLDLKDAFFCLRLHPTSQSLFAFEWRDPEMGISGQLTWTRLPQGFKNSPTLFNEALHRDLADFRIQHPDLILLQYVDDLLLAATSELDCQQGTRALLQTLGDLGYRASAKKAQICQKQVKYLGYLLKEGQRWLTEARKETVMGQPTPKTPRQLREFLGTAGFCRLWIPGFAEMAAPLYPLTKPGTLFEWGPDQQKAYQEIKQALLTAPALGLPDLTKPFELFVDEKQGYAKGVLTQKLGPWRRPVAYLSKKLDPVAAGWPPCLRMVAAIAVLTKDAGKLTMGQPLVILAPHAVEALVKQPPDRWLSNARMTHYQALLLDTDRVQFGPIVALNPATLLPLPEEGLQHDCLDILAEAHGTRPDLTDQPLPDADHTWYTDGSSFLQEGQRKAGAAVTTETEVVWAKALPAGTSAQRAELIALTQALKMAEGKKLNVYTDSRYAFATAHIHGEIYRRRGWLTSEGKEIKNKDEILALLKALFLPKRLSIIHCPGHQKGNRAEARGNRMADQAAREVATRETPETSTLLAGKRTADGSEFEKRTADGSEFESPKKKAKVE

SEQ ID NO: 2464 - protein, 2105 aa, synthetic construct
MPAAKRVKLDGGDKKYSIGLDIGTNSVGWAVITDEYKVPSKKFKVLGNTDRHSIKKNLIGALLFDSGETAEATRLKRTARRRYTRRKNRICYLQEIFSNEMAKVDDSFFHRLEESFLVEEDKKHERHPIFGNIVDEVAYHEKYPTIYHLRKKLVDSTDKADLRLIYLALAHMIKFRGHFLIEGDLNPDNSDVDKLFIQLVQTYNQLFEENPINASGVDAKAILSARLSKSRRLENLIAQLPGEKKNGLFGNLIALSLGLTPNFKSNFDLAEDAKLQLSKDTYDDDLDNLLAQIGDQYADLFLAAKNLSDAILLSDILRVNTEITKAPLSASMIKRYDEHHQDLTLLKALVRQQLPEKYKEIFFDQSKNGYAGYIDGGASQEEFYKFIKPILEKMDGTEELLVKLNREDLLRKQRTFDNGSIPHQIHLGELHAILRRQEDFYPFLKDNREKIEKILTFRIPYYVGPLARGNSRFAWMTRKSEETITPWNFEEVVDKGASAQSFIERMTNFDKNLPNEKVLPKHSLLYEYFTVYNELTKVKYVTEGMRKPAFLSGEQKKAIVDLLFKTNRKVTVKQLKEDYFKKIECFDSVEISGVEDRFNASLGTYHDLLKIIKDKDFLDNEENEDILEDIVLTLTLFEDREMIEERLKTYAHLFDDKVMKQLKRRRYTGWGRLSRKLINGIRDKQSGKTILDFLKSDGFANRNFMQLIHDDSLTFKEDIQKAQVSGQGDSLHEHIANLAGSPAIKKGILQTVKVVDELVKVMGRHKPENIVIEMARENQTTQKGQKNSRERMKRIEEGIKELGSQILKEHPVENTQLQNEKLYLYYLQNGRDMYVDQELDINRLSDYDVDHIVPQSFLKDDSIDNKVLTRSDKARGKSDNVPSEEVVKKMKNYWRQLLNAKLITQRKFDNLTKAERGGLSELDKAGFIKRQLVETRQITKHVAQILDSRMNTKYDENDKLIREVKVITLKSKLVSDFRKDFQFYKVREINNYHHAHDAYLNAVVGTALIKKYPKLESEFVYGDYKVYDVRKMIAKSEQEIGKATAKYFFYSNIMNFFKTEITLANGEIRKRPLIETNGETGEIVWDKGRDFATVRKVLSMPQVNIVKKTEVQTGGFSKESILPKRNSDKLIARKKDWDPKKYGGFDSPTVAYSVLVVAKVEKGKSKKLKSVKELLGITIMERSSFEKNPIDFLEAKGYKEVKKDLIIKLPKYSLFELENGRKRMLASAGELQKGNELALPSKYVNFLYLASHYEKLKGSPEDNEQKQLFVEQHKHYLDEIIEQISEFSKRVILADANLDKVLSAYNKHRDKPIREQAENIIHLFTLTNLGAPAAFKYFDTTIDRKRYTSTKEVLDATLIHQSITGLYETRIDLSQLGGDGGGGGGSGGGGSGGGGSGGGGSGGTLNIEDEYRLHETSKGPDVPLGSTWLSDFPQAWAETGGMGLAVRQAPLIIPLKATSTPVSIKQYPMSQEARLGIKPHIQRLLDQGILVPCQSPWNTPLLPVKKPGTNDYRPVQDLREVNKRVEDIHPTVPNPYNLLSGLPPSHQWYTVLDLKDAFFCLRLHPTSQSLFAFEWRDPEMGISGQLTWTRLPQGFKNSPTLFNEALHRDLADFRIQHPDLILLQYVDDLLLAATSELDCQQGTRALLQTLGDLGYRASAKKAQICQKQVKYLGYLLKEGQRWLTEARKETVMGQPTPKTPRQLREFLGTAGFCRLWIPGFAEMAAPLYPLTKPGTLFEWGPDQQKAYQEIKQALLTAPALGLPDLTKPFELFVDEKQGYAKGVLTQKLGPWRRPVAYLSKKLDPVAAGWPPCLRMVAAIAVLTKDAGKLTMGQPLVILAPHAVEALVKQPPDRWLSNARMTHYQALLLDTDRVQFGPIVALNPATLLPLPEEGLQHDCLDILAEAHGTRPDLTDQPLPDADHTWYTDGSSFLQEGQRKAGAAVTTETEVVWAKALPAGTSAQRAELIALTQALKMAEGKKLNVYTDSRYAFATAHIHGEIYRRRGWLTSEGKEIKNKDEILALLKALFLPKRLSIIHCPGHQKGNRAEARGNRMADQAAREVATRETPETSTLLAGKRTADGSEFEKRTADGSEFESPKKKAKVE

SEQ ID NO: 2465 - protein, 2100 aa, synthetic construct
MPAAKRVKLDGGDKKYSIGLDIGTNSVGWAVITDEYKVPSKKFKVLGNTDRHSIKKNLIGALLFDSGETAEATRLKRTARRRYTRRKNRICYLQEIFSNEMAKVDDSFFHRLEESFLVEEDKKHERHPIFGNIVDEVAYHEKYPTIYHLRKKLVDSTDKADLRLIYLALAHMIKFRGHFLIEGDLNPDNSDVDKLFIQLVQTYNQLFEENPINASGVDAKAILSARLSKSRRLENLIAQLPGEKKNGLFGNLIALSLGLTPNFKSNFDLAEDAKLQLSKDTYDDDLDNLLAQIGDQYADLFLAAKNLSDAILLSDILRVNTEITKAPLSASMIKRYDEHHQDLTLLKALVRQQLPEKYKEIFFDQSKNGYAGYIDGGASQEEFYKFIKPILEKMDGTEELLVKLNREDLLRKQRTFDNGSIPHQIHLGELHAILRRQEDFYPFLKDNREKIEKILTFRIPYYVGPLARGNSRFAWMTRKSEETITPWNFEEVVDKGASAQSFIERMTNFDKNLPNEKVLPKHSLLYEYFTVYNELTKVKYVTEGMRKPAFLSGEQKKAIVDLLFKTNRKVTVKQLKEDYFKKIECFDSVEISGVEDRFNASLGTYHDLLKIIKDKDFLDNEENEDILEDIVLTLTLFEDREMIEERLKTYAHLFDDKVMKQLKRRRYTGWGRLSRKLINGIRDKQSGKTILDFLKSDGFANRNFMQLIHDDSLTFKEDIQKAQVSGQGDSLHEHIANLAGSPAIKKGILQTVKVVDELVKVMGRHKPENIVIEMARENQTTQKGQKNSRERMKRIEEGIKELGSQILKEHPVENTQLQNEKLYLYYLQNGRDMYVDQELDINRLSDYDVDHIVPQSFLKDDSIDNKVLTRSDKARGKSDNVPSEEVVKKMKNYWRQLLNAKLITQRKFDNLTKAERGGLSELDKAGFIKRQLVETRQITKHVAQILDSRMNTKYDENDKLIREVKVITLKSKLVSDFRKDFQFYKVREINNYHHAHDAYLNAVVGTALIKKYPKLESEFVYGDYKVYDVRKMIAKSEQEIGKATAKYFFYSNIMNFFKTEITLANGEIRKRPLIETNGETGEIVWDKGRDFATVRKVLSMPQVNIVKKTEVQTGGFSKESILPKRNSDKLIARKKDWDPKKYGGFDSPTVAYSVLVVAKVEKGKSKKLKSVKELLGITIMERSSFEKNPIDFLEAKGYKEVKKDLIIKLPKYSLFELENGRKRMLASAGELQKGNELALPSKYVNFLYLASHYEKLKGSPEDNEQKQLFVEQHKHYLDEIIEQISEFSKRVILADANLDKVLSAYNKHRDKPIREQAENIIHLFTLTNLGAPAAFKYFDTTIDRKRYTSTKEVLDATLIHQSITGLYETRIDLSQLGGDGGGGSGGSGGSGGSGGSGGTLNIEDEYRLHETSKGPDVPLGSTWLSDFPQAWAETGGMGLAVRQAPLIIPLKATSTPVSIKQYPMSQEARLGIKPHIQRLLDQGILVPCQSPWNTPLLPVKKPGTNDYRPVQDLREVNKRVEDIHPTVPNPYNLLSGLPPSHQWYTVLDLKDAFFCLRLHPTSQSLFAFEWRDPEMGISGQLTWTRLPQGFKNSPTLFNEALHRDLADFRIQHPDLILLQYVDDLLLAATSELDCQQGTRALLQTLGDLGYRASAKKAQICQKQVKYLGYLLKEGQRWLTEARKETVMGQPTPKTPRQLREFLGTAGFCRLWIPGFAEMAAPLYPLTKPGTLFEWGPDQQKAYQEIKQALLTAPALGLPDLTKPFELFVDEKQGYAKGVLTQKLGPWRRPVAYLSKKLDPVAAGWPPCLRMVAAIAVLTKDAGKLTMGQPLVILAPHAVEALVKQPPDRWLSNARMTHYQALLLDTDRVQFGPIVALNPATLLPLPEEGLQHDCLDILAEAHGTRPDLTDQPLPDADHTWYTDGSSFLQEGQRKAGAAVTTETEVVWAKALPAGTSAQRAELIALTQALKMAEGKKLNVYTDSRYAFATAHIHGEIYRRRGWLTSEGKEIKNKDEILALLKALFLPKRLSIIHCPGHQKGNRAEARGNRMADQAAREVATRETPETSTLLAGKRTADGSEFEKRTADGSEFESPKKKAKVE

SEQ ID NO: 2466 - protein, 2096 aa, synthetic construct
MPAAKRVKLDGGDKKYSIGLDIGTNSVGWAVITDEYKVPSKKFKVLGNTDRHSIKKNLIGALLFDSGETAEATRLKRTARRRYTRRKNRICYLQEIFSNEMAKVDDSFFHRLEESFLVEEDKKHERHPIFGNIVDEVAYHEKYPTIYHLRKKLVDSTDKADLRLIYLALAHMIKFRGHFLIEGDLNPDNSDVDKLFIQLVQTYNQLFEENPINASGVDAKAILSARLSKSRRLENLIAQLPGEKKNGLFGNLIALSLGLTPNFKSNFDLAEDAKLQLSKDTYDDDLDNLLAQIGDQYADLFLAAKNLSDAILLSDILRVNTEITKAPLSASMIKRYDEHHQDLTLLKALVRQQLPEKYKEIFFDQSKNGYAGYIDGGASQEEFYKFIKPILEKMDGTEELLVKLNREDLLRKQRTFDNGSIPHQIHLGELHAILRRQEDFYPFLKDNREKIEKILTFRIPYYVGPLARGNSRFAWMTRKSEETITPWNFEEVVDKGASAQSFIERMTNFDKNLPNEKVLPKHSLLYEYFTVYNELTKVKYVTEGMRKPAFLSGEQKKAIVDLLFKTNRKVTVKQLKEDYFKKIECFDSVEISGVEDRFNASLGTYHDLLKIIKDKDFLDNEENEDILEDIVLTLTLFEDREMIEERLKTYAHLFDDKVMKQLKRRRYTGWGRLSRKLINGIRDKQSGKTILDFLKSDGFANRNFMQLIHDDSLTFKEDIQKAQVSGQGDSLHEHIANLAGSPAIKKGILQTVKVVDELVKVMGRHKPENIVIEMARENQTTQKGQKNSRERMKRIEEGIKELGSQILKEHPVENTQLQNEKLYLYYLQNGRDMYVDQELDINRLSDYDVDHIVPQSFLKDDSIDNKVLTRSDKARGKSDNVPSEEVVKKMKNYWRQLLNAKLITQRKFDNLTKAERGGLSELDKAGFIKRQLVETRQITKHVAQILDSRMNTKYDENDKLIREVKVITLKSKLVSDFRKDFQFYKVREINNYHHAHDAYLNAVVGTALIKKYPKLESEFVYGDYKVYDVRKMIAKSEQEIGKATAKYFFYSNIMNFFKTEITLANGEIRKRPLIETNGETGEIVWDKGRDFATVRKVLSMPQVNIVKKTEVQTGGFSKESILPKRNSDKLIARKKDWDPKKYGGFDSPTVAYSVLVVAKVEKGKSKKLKSVKELLGITIMERSSFEKNPIDFLEAKGYKEVKKDLIIKLPKYSLFELENGRKRMLASAGELQKGNELALPSKYVNFLYLASHYEKLKGSPEDNEQKQLFVEQHKHYLDEIIEQISEFSKRVILADANLDKVLSAYNKHRDKPIREQAENIIHLFTLTNLGAPAAFKYFDTTIDRKRYTSTKEVLDATLIHQSITGLYETRIDLSQLGGDGGPAPEAAAKGSSGGTLNIEDEYRLHETSKGPDVPLGSTWLSDFPQAWAETGGMGLAVRQAPLIIPLKATSTPVSIKQYPMSQEARLGIKPHIQRLLDQGILVPCQSPWNTPLLPVKKPGTNDYRPVQDLREVNKRVEDIHPTVPNPYNLLSGLPPSHQWYTVLDLKDAFFCLRLHPTSQSLFAFEWRDPEMGISGQLTWTRLPQGFKNSPTLFNEALHRDLADFRIQHPDLILLQYVDDLLLAATSELDCQQGTRALLQTLGDLGYRASAKKAQICQKQVKYLGYLLKEGQRWLTEARKETVMGQPTPKTPRQLREFLGTAGFCRLWIPGFAEMAAPLYPLTKPGTLFEWGPDQQKAYQEIKQALLTAPALGLPDLTKPFELFVDEKQGYAKGVLTQKLGPWRRPVAYLSKKLDPVAAGWPPCLRMVAAIAVLTKDAGKLTMGQPLVILAPHAVEALVKQPPDRWLSNARMTHYQALLLDTDRVQFGPIVALNPATLLPLPEEGLQHDCLDILAEAHGTRPDLTDQPLPDADHTWYTDGSSFLQEGQRKAGAAVTTETEVVWAKALPAGTSAQRAELIALTQALKMAEGKKLNVYTDSRYAFATAHIHGEIYRRRGWLTSEGKEIKNKDEILALLKALFLPKRLSIIHCPGHQKGNRAEARGNRMADQAAREVATRETPETSTLLAGKRTADGSEFEKRTADGSEFESPKKKAKVE

SEQ ID NO: 2467 - protein, 2094 aa, synthetic construct
MPAAKRVKLDGGDKKYSIGLDIGTNSVGWAVITDEYKVPSKKFKVLGNTDRHSIKKNLIGALLFDSGETAEATRLKRTARRRYTRRKNRICYLQEIFSNEMAKVDDSFFHRLEESFLVEEDKKHERHPIFGNIVDEVAYHEKYPTIYHLRKKLVDSTDKADLRLIYLALAHMIKFRGHFLIEGDLNPDNSDVDKLFIQLVQTYNQLFEENPINASGVDAKAILSARLSKSRRLENLIAQLPGEKKNGLFGNLIALSLGLTPNFKSNFDLAEDAKLQLSKDTYDDDLDNLLAQIGDQYADLFLAAKNLSDAILLSDILRVNTEITKAPLSASMIKRYDEHHQDLTLLKALVRQQLPEKYKEIFFDQSKNGYAGYIDGGASQEEFYKFIKPILEKMDGTEELLVKLNREDLLRKQRTFDNGSIPHQIHLGELHAILRRQEDFYPFLKDNREKIEKILTFRIPYYVGPLARGNSRFAWMTRKSEETITPWNFEEVVDKGASAQSFIERMTNFDKNLPNEKVLPKHSLLYEYFTVYNELTKVKYVTEGMRKPAFLSGEQKKAIVDLLFKTNRKVTVKQLKEDYFKKIECFDSVEISGVEDRFNASLGTYHDLLKIIKDKDFLDNEENEDILEDIVLTLTLFEDREMIEERLKTYAHLFDDKVMKQLKRRRYTGWGRLSRKLINGIRDKQSGKTILDFLKSDGFANRNFMQLIHDDSLTFKEDIQKAQVSGQGDSLHEHIANLAGSPAIKKGILQTVKVVDELVKVMGRHKPENIVIEMARENQTTQKGQKNSRERMKRIEEGIKELGSQILKEHPVENTQLQNEKLYLYYLQNGRDMYVDQELDINRLSDYDVDHIVPQSFLKDDSIDNKVLTRSDKARGKSDNVPSEEVVKKMKNYWRQLLNAKLITQRKFDNLTKAERGGLSELDKAGFIKRQLVETRQITKHVAQILDSRMNTKYDENDKLIREVKVITLKSKLVSDFRKDFQFYKVREINNYHHAHDAYLNAVVGTALIKKYPKLESEFVYGDYKVYDVRKMIAKSEQEIGKATAKYFFYSNIMNFFKTEITLANGEIRKRPLIETNGETGEIVWDKGRDFATVRKVLSMPQVNIVKKTEVQTGGFSKESILPKRNSDKLIARKKDWDPKKYGGFDSPTVAYSVLVVAKVEKGKSKKLKSVKELLGITIMERSSFEKNPIDFLEAKGYKEVKKDLIIKLPKYSLFELENGRKRMLASAGELQKGNELALPSKYVNFLYLASHYEKLKGSPEDNEQKQLFVEQHKHYLDEIIEQISEFSKRVILADANLDKVLSAYNKHRDKPIREQAENIIHLFTLTNLGAPAAFKYFDTTIDRKRYTSTKEVLDATLIHQSITGLYETRIDLSQLGGDGGPAPGGSGSSGGTLNIEDEYRLHETSKGPDVPLGSTWLSDFPQAWAETGGMGLAVRQAPLIIPLKATSTPVSIKQYPMSQEARLGIKPHIQRLLDQGILVPCQSPWNTPLLPVKKPGTNDYRPVQDLREVNKRVEDIHPTVPNPYNLLSGLPPSHQWYTVLDLKDAFFCLRLHPTSQSLFAFEWRDPEMGISGQLTWTRLPQGFKNSPTLFNEALHRDLADFRIQHPDLILLQYVDDLLLAATSELDCQQGTRALLQTLGDLGYRASAKKAQICQKQVKYLGYLLKEGQRWLTEARKETVMGQPTPKTPRQLREFLGTAGFCRLWIPGFAEMAAPLYPLTKPGTLFEWGPDQQKAYQEIKQALLTAPALGLPDLTKPFELFVDEKQGYAKGVLTQKLGPWRRPVAYLSKKLDPVAAGWPPCLRMVAAIAVLTKDAGKLTMGQPLVILAPHAVEALVKQPPDRWLSNARMTHYQALLLDTDRVQFGPIVALNPATLLPLPEEGLQHDCLDILAEAHGTRPDLTDQPLPDADHTWYTDGSSFLQEGQRKAGAAVTTETEVVWAKALPAGTSAQRAELIALTQALKMAEGKKLNVYTDSRYAFATAHIHGEIYRRRGWLTSEGKEIKNKDEILALLKALFLPKRLSIIHCPGHQKGNRAEARGNRMADQAAREVATRETPETSTLLAGKRTADGSEFEKRTADGSEFESPKKKAKVE

SEQ ID NO: 2468 - protein, 2091 aa, synthetic construct
MPAAKRVKLDGGDKKYSIGLDIGTNSVGWAVITDEYKVPSKKFKVLGNTDRHSIKKNLIGALLFDSGETAEATRLKRTARRRYTRRKNRICYLQEIFSNEMAKVDDSFFHRLEESFLVEEDKKHERHPIFGNIVDEVAYHEKYPTIYHLRKKLVDSTDKADLRLIYLALAHMIKFRGHFLIEGDLNPDNSDVDKLFIQLVQTYNQLFEENPINASGVDAKAILSARLSKSRRLENLIAQLPGEKKNGLFGNLIALSLGLTPNFKSNFDLAEDAKLQLSKDTYDDDLDNLLAQIGDQYADLFLAAKNLSDAILLSDILRVNTEITKAPLSASMIKRYDEHHQDLTLLKALVRQQLPEKYKEIFFDQSKNGYAGYIDGGASQEEFYKFIKPILEKMDGTEELLVKLNREDLLRKQRTFDNGSIPHQIHLGELHAILRRQEDFYPFLKDNREKIEKILTFRIPYYVGPLARGNSRFAWMTRKSEETITPWNFEEVVDKGASAQSFIERMTNFDKNLPNEKVLPKHSLLYEYFTVYNELTKVKYVTEGMRKPAFLSGEQKKAIVDLLFKTNRKVTVKQLKEDYFKKIECFDSVEISGVEDRFNASLGTYHDLLKIIKDKDFLDNEENEDILEDIVLTLTLFEDREMIEERLKTYAHLFDDKVMKQLKRRRYTGWGRLSRKLINGIRDKQSGKTILDFLKSDGFANRNFMQLIHDDSLTFKEDIQKAQVSGQGDSLHEHIANLAGSPAIKKGILQTVKVVDELVKVMGRHKPENIVIEMARENQTTQKGQKNSRERMKRIEEGIKELGSQILKEHPVENTQLQNEKLYLYYLQNGRDMYVDQELDINRLSDYDVDHIVPQSFLKDDSIDNKVLTRSDKARGKSDNVPSEEVVKKMKNYWRQLLNAKLITQRKFDNLTKAERGGLSELDKAGFIKRQLVETRQITKHVAQILDSRMNTKYDENDKLIREVKVITLKSKLVSDFRKDFQFYKVREINNYHHAHDAYLNAVVGTALIKKYPKLESEFVYGDYKVYDVRKMIAKSEQEIGKATAKYFFYSNIMNFFKTEITLANGEIRKRPLIETNGETGEIVWDKGRDFATVRKVLSMPQVNIVKKTEVQTGGFSKESILPKRNSDKLIARKKDWDPKKYGGFDSPTVAYSVLVVAKVEKGKSKKLKSVKELLGITIMERSSFEKNPIDFLEAKGYKEVKKDLIIKLPKYSLFELENGRKRMLASAGELQKGNELALPSKYVNFLYLASHYEKLKGSPEDNEQKQLFVEQHKHYLDEIIEQISEFSKRVILADANLDKVLSAYNKHRDKPIREQAENIIHLFTLTNLGAPAAFKYFDTTIDRKRYTSTKEVLDATLIHQSITGLYETRIDLSQLGGDGGGGGGSSGGTLNIEDEYRLHETSKGPDVPLGSTWLSDFPQAWAETGGMGLAVRQAPLIIPLKATSTPVSIKQYPMSQEARLGIKPHIQRLLDQGILVPCQSPWNTPLLPVKKPGTNDYRPVQDLREVNKRVEDIHPTVPNPYNLLSGLPPSHQWYTVLDLKDAFFCLRLHPTSQSLFAFEWRDPEMGISGQLTWTRLPQGFKNSPTLFNEALHRDLADFRIQHPDLILLQYVDDLLLAATSELDCQQGTRALLQTLGDLGYRASAKKAQICQKQVKYLGYLLKEGQRWLTEARKETVMGQPTPKTPRQLREFLGTAGFCRLWIPGFAEMAAPLYPLTKPGTLFEWGPDQQKAYQEIKQALLTAPALGLPDLTKPFELFVDEKQGYAKGVLTQKLGPWRRPVAYLSKKLDPVAAGWPPCLRMVAAIAVLTKDAGKLTMGQPLVILAPHAVEALVKQPPDRWLSNARMTHYQALLLDTDRVQFGPIVALNPATLLPLPEEGLQHDCLDILAEAHGTRPDLTDQPLPDADHTWYTDGSSFLQEGQRKAGAAVTTETEVVWAKALPAGTSAQRAELIALTQALKMAEGKKLNVYTDSRYAFATAHIHGEIYRRRGWLTSEGKEIKNKDEILALLKALFLPKRLSIIHCPGHQKGNRAEARGNRMADQAAREVATRETPETSTLLAGKRTADGSEFEKRTADGSEFESPKKKAKVE

SEQ ID NO: 2469 - protein, 2096 aa, synthetic construct
MPAAKRVKLDGGDKKYSIGLDIGTNSVGWAVITDEYKVPSKKFKVLGNTDRHSIKKNLIGALLFDSGETAEATRLKRTARRRYTRRKNRICYLQEIFSNEMAKVDDSFFHRLEESFLVEEDKKHERHPIFGNIVDEVAYHEKYPTIYHLRKKLVDSTDKADLRLIYLALAHMIKFRGHFLIEGDLNPDNSDVDKLFIQLVQTYNQLFEENPINASGVDAKAILSARLSKSRRLENLIAQLPGEKKNGLFGNLIALSLGLTPNFKSNFDLAEDAKLQLSKDTYDDDLDNLLAQIGDQYADLFLAAKNLSDAILLSDILRVNTEITKAPLSASMIKRYDEHHQDLTLLKALVRQQLPEKYKEIFFDQSKNGYAGYIDGGASQEEFYKFIKPILEKMDGTEELLVKLNREDLLRKQRTFDNGSIPHQIHLGELHAILRRQEDFYPFLKDNREKIEKILTFRIPYYVGPLARGNSRFAWMTRKSEETITPWNFEEVVDKGASAQSFIERMTNFDKNLPNEKVLPKHSLLYEYFTVYNELTKVKYVTEGMRKPAFLSGEQKKAIVDLLFKTNRKVTVKQLKEDYFKKIECFDSVEISGVEDRFNASLGTYHDLLKIIKDKDFLDNEENEDILEDIVLTLTLFEDREMIEERLKTYAHLFDDKVMKQLKRRRYTGWGRLSRKLINGIRDKQSGKTILDFLKSDGFANRNFMQLIHDDSLTFKEDIQKAQVSGQGDSLHEHIANLAGSPAIKKGILQTVKVVDELVKVMGRHKPENIVIEMARENQTTQKGQKNSRERMKRIEEGIKELGSQILKEHPVENTQLQNEKLYLYYLQNGRDMYVDQELDINRLSDYDVDHIVPQSFLKDDSIDNKVLTRSDKARGKSDNVPSEEVVKKMKNYWRQLLNAKLITQRKFDNLTKAERGGLSELDKAGFIKRQLVETRQITKHVAQILDSRMNTKYDENDKLIREVKVITLKSKLVSDFRKDFQFYKVREINNYHHAHDAYLNAVVGTALIKKYPKLESEFVYGDYKVYDVRKMIAKSEQEIGKATAKYFFYSNIMNFFKTEITLANGEIRKRPLIETNGETGEIVWDKGRDFATVRKVLSMPQVNIVKKTEVQTGGFSKESILPKRNSDKLIARKKDWDPKKYGGFDSPTVAYSVLVVAKVEKGKSKKLKSVKELLGITIMERSSFEKNPIDFLEAKGYKEVKKDLIIKLPKYSLFELENGRKRMLASAGELQKGNELALPSKYVNFLYLASHYEKLKGSPEDNEQKQLFVEQHKHYLDEIIEQISEFSKRVILADANLDKVLSAYNKHRDKPIREQAENIIHLFTLTNLGAPAAFKYFDTTIDRKRYTSTKEVLDATLIHQSITGLYETRIDLSQLGGDGGEAAAKGSSPAPGGTLNIEDEYRLHETSKGPDVPLGSTWLSDFPQAWAETGGMGLAVRQAPLIIPLKATSTPVSIKQYPMSQEARLGIKPHIQRLLDQGILVPCQSPWNTPLLPVKKPGTNDYRPVQDLREVNKRVEDIHPTVPNPYNLLSGLPPSHQWYTVLDLKDAFFCLRLHPTSQSLFAFEWRDPEMGISGQLTWTRLPQGFKNSPTLFNEALHRDLADFRIQHPDLILLQYVDDLLLAATSELDCQQGTRALLQTLGDLGYRASAKKAQICQKQVKYLGYLLKEGQRWLTEARKETVMGQPTPKTPRQLREFLGTAGFCRLWIPGFAEMAAPLYPLTKPGTLFEWGPDQQKAYQEIKQALLTAPALGLPDLTKPFELFVDEKQGYAKGVLTQKLGPWRRPVAYLSKKLDPVAAGWPPCLRMVAAIAVLTKDAGKLTMGQPLVILAPHAVEALVKQPPDRWLSNARMTHYQALLLDTDRVQFGPIVALNPATLLPLPEEGLQHDCLDILAEAHGTRPDLTDQPLPDADHTWYTDGSSFLQEGQRKAGAAVTTETEVVWAKALPAGTSAQRAELIALTQALKMAEGKKLNVYTDSRYAFATAHIHGEIYRRRGWLTSEGKEIKNKDEILALLKALFLPKRLSIIHCPGHQKGNRAEARGNRMADQAAREVATRETPETSTLLAGKRTADGSEFEKRTADGSEFESPKKKAKVE

SEQ ID NO: 2470 - protein, 2096 aa, synthetic construct
MPAAKRVKLDGGDKKYSIGLDIGTNSVGWAVITDEYKVPSKKFKVLGNTDRHSIKKNLIGALLFDSGETAEATRLKRTARRRYTRRKNRICYLQEIFSNEMAKVDDSFFHRLEESFLVEEDKKHERHPIFGNIVDEVAYHEKYPTIYHLRKKLVDSTDKADLRLIYLALAHMIKFRGHFLIEGDLNPDNSDVDKLFIQLVQTYNQLFEENPINASGVDAKAILSARLSKSRRLENLIAQLPGEKKNGLFGNLIALSLGLTPNFKSNFDLAEDAKLQLSKDTYDDDLDNLLAQIGDQYADLFLAAKNLSDAILLSDILRVNTEITKAPLSASMIKRYDEHHQDLTLLKALVRQQLPEKYKEIFFDQSKNGYAGYIDGGASQEEFYKFIKPILEKMDGTEELLVKLNREDLLRKQRTFDNGSIPHQIHLGELHAILRRQEDFYPFLKDNREKIEKILTFRIPYYVGPLARGNSRFAWMTRKSEETITPWNFEEVVDKGASAQSFIERMTNFDKNLPNEKVLPKHSLLYEYFTVYNELTKVKYVTEGMRKPAFLSGEQKKAIVDLLFKTNRKVTVKQLKEDYFKKIECFDSVEISGVEDRFNASLGTYHDLLKIIKDKDFLDNEENEDILEDIVLTLTLFEDREMIEERLKTYAHLFDDKVMKQLKRRRYTGWGRLSRKLINGIRDKQSGKTILDFLKSDGFANRNFMQLIHDDSLTFKEDIQKAQVSGQGDSLHEHIANLAGSPAIKKGILQTVKVVDELVKVMGRHKPENIVIEMARENQTTQKGQKNSRERMKRIEEGIKELGSQILKEHPVENTQLQNEKLYLYYLQNGRDMYVDQELDINRLSDYDVDHIVPQSFLKDDSIDNKVLTRSDKARGKSDNVPSEEVVKKMKNYWRQLLNAKLITQRKFDNLTKAERGGLSELDKAGFIKRQLVETRQITKHVAQILDSRMNTKYDENDKLIREVKVITLKSKLVSDFRKDFQFYKVREINNYHHAHDAYLNAVVGTALIKKYPKLESEFVYGDYKVYDVRKMIAKSEQEIGKATAKYFFYSNIMNFFKTEITLANGEIRKRPLIETNGETGEIVWDKGRDFATVRKVLSMPQVNIVKKTEVQTGGFSKESILPKRNSDKLIARKKDWDPKKYGGFDSPTVAYSVLVVAKVEKGKSKKLKSVKELLGITIMERSSFEKNPIDFLEAKGYKEVKKDLIIKLPKYSLFELENGRKRMLASAGELQKGNELALPSKYVNFLYLASHYEKLKGSPEDNEQKQLFVEQHKHYLDEIIEQISEFSKRVILADANLDKVLSAYNKHRDKPIREQAENIIHLFTLTNLGAPAAFKYFDTTIDRKRYTSTKEVLDATLIHQSITGLYETRIDLSQLGGDGGGGSGSSEAAAKGGTLNIEDEYRLHETSKGPDVPLGSTWLSDFPQAWAETGGMGLAVRQAPLIIPLKATSTPVSIKQYPMSQEARLGIKPHIQRLLDQGILVPCQSPWNTPLLPVKKPGTNDYRPVQDLREVNKRVEDIHPTVPNPYNLLSGLPPSHQWYTVLDLKDAFFCLRLHPTSQSLFAFEWRDPEMGISGQLTWTRLPQGFKNSPTLFNEALHRDLADFRIQHPDLILLQYVDDLLLAATSELDCQQGTRALLQTLGDLGYRASAKKAQICQKQVKYLGYLLKEGQRWLTEARKETVMGQPTPKTPRQLREFLGTAGFCRLWIPGFAEMAAPLYPLTKPGTLFEWGPDQQKAYQEIKQALLTAPALGLPDLTKPFELFVDEKQGYAKGVLTQKLGPWRRPVAYLSKKLDPVAAGWPPCLRMVAAIAVLTKDAGKLTMGQPLVILAPHAVEALVKQPPDRWLSNARMTHYQALLLDTDRVQFGPIVALNPATLLPLPEEGLQHDCLDILAEAHGTRPDLTDQPLPDADHTWYTDGSSFLQEGQRKAGAAVTTETEVVWAKALPAGTSAQRAELIALTQALKMAEGKKLNVYTDSRYAFATAHIHGEIYRRRGWLTSEGKEIKNKDEILALLKALFLPKRLSIIHCPGHQKGNRAEARGNRMADQAAREVATRETPETSTLLAGKRTADGSEFEKRTADGSEFESPKKKAKVE

SEQ ID NO: 2471 - protein, 2094 aa, synthetic construct
MPAAKRVKLDGGDKKYSIGLDIGTNSVGWAVITDEYKVPSKKFKVLGNTDRHSIKKNLIGALLFDSGETAEATRLKRTARRRYTRRKNRICYLQEIFSNEMAKVDDSFFHRLEESFLVEEDKKHERHPIFGNIVDEVAYHEKYPTIYHLRKKLVDSTDKADLRLIYLALAHMIKFRGHFLIEGDLNPDNSDVDKLFIQLVQTYNQLFEENPINASGVDAKAILSARLSKSRRLENLIAQLPGEKKNGLFGNLIALSLGLTPNFKSNFDLAEDAKLQLSKDTYDDDLDNLLAQIGDQYADLFLAAKNLSDAILLSDILRVNTEITKAPLSASMIKRYDEHHQDLTLLKALVRQQLPEKYKEIFFDQSKNGYAGYIDGGASQEEFYKFIKPILEKMDGTEELLVKLNREDLLRKQRTFDNGSIPHQIHLGELHAILRRQEDFYPFLKDNREKIEKILTFRIPYYVGPLARGNSRFAWMTRKSEETITPWNFEEVVDKGASAQSFIERMTNFDKNLPNEKVLPKHSLLYEYFTVYNELTKVKYVTEGMRKPAFLSGEQKKAIVDLLFKTNRKVTVKQLKEDYFKKIECFDSVEISGVEDRFNASLGTYHDLLKIIKDKDFLDNEENEDILEDIVLTLTLFEDREMIEERLKTYAHLFDDKVMKQLKRRRYTGWGRLSRKLINGIRDKQSGKTILDFLKSDGFANRNFMQLIHDDSLTFKEDIQKAQVSGQGDSLHEHIANLAGSPAIKKGILQTVKVVDELVKVMGRHKPENIVIEMARENQTTQKGQKNSRERMKRIEEGIKELGSQILKEHPVENTQLQNEKLYLYYLQNGRDMYVDQELDINRLSDYDVDHIVPQSFLKDDSIDNKVLTRSDKARGKSDNVPSEEVVKKMKNYWRQLLNAKLITQRKFDNLTKAERGGLSELDKAGFIKRQLVETRQITKHVAQILDSRMNTKYDENDKLIREVKVITLKSKLVSDFRKDFQFYKVREINNYHHAHDAYLNAVVGTALIKKYPKLESEFVYGDYKVYDVRKMIAKSEQEIGKATAKYFFYSNIMNFFKTEITLANGEIRKRPLIETNGETGEIVWDKGRDFATVRKVLSMPQVNIVKKTEVQTGGFSKESILPKRNSDKLIARKKDWDPKKYGGFDSPTVAYSVLVVAKVEKGKSKKLKSVKELLGITIMERSSFEKNPIDFLEAKGYKEVKKDLIIKLPKYSLFELENGRKRMLASAGELQKGNELALPSKYVNFLYLASHYEKLKGSPEDNEQKQLFVEQHKHYLDEIIEQISEFSKRVILADANLDKVLSAYNKHRDKPIREQAENIIHLFTLTNLGAPAAFKYFDTTIDRKRYTSTKEVLDATLIHQSITGLYETRIDLSQLGGDGGGSSGSSGSSGGTLNIEDEYRLHETSKGPDVPLGSTWLSDFPQAWAETGGMGLAVRQAPLIIPLKATSTPVSIKQYPMSQEARLGIKPHIQRLLDQGILVPCQSPWNTPLLPVKKPGTNDYRPVQDLREVNKRVEDIHPTVPNPYNLLSGLPPSHQWYTVLDLKDAFFCLRLHPTSQSLFAFEWRDPEMGISGQLTWTRLPQGFKNSPTLFNEALHRDLADFRIQHPDLILLQYVDDLLLAATSELDCQQGTRALLQTLGDLGYRASAKKAQICQKQVKYLGYLLKEGQRWLTEARKETVMGQPTPKTPRQLREFLGTAGFCRLWIPGFAEMAAPLYPLTKPGTLFEWGPDQQKAYQEIKQALLTAPALGLPDLTKPFELFVDEKQGYAKGVLTQKLGPWRRPVAYLSKKLDPVAAGWPPCLRMVAAIAVLTKDAGKLTMGQPLVILAPHAVEALVKQPPDRWLSNARMTHYQALLLDTDRVQFGPIVALNPATLLPLPEEGLQHDCLDILAEAHGTRPDLTDQPLPDADHTWYTDGSSFLQEGQRKAGAAVTTETEVVWAKALPAGTSAQRAELIALTQALKMAEGKKLNVYTDSRYAFATAHIHGEIYRRRGWLTSEGKEIKNKDEILALLKALFLPKRLSIIHCPGHQKGNRAEARGNRMADQAAREVATRETPETSTLLAGKRTADGSEFEKRTADGSEFESPKKKAKVE

SEQ ID NO: 2472 - protein, 2096 aa, synthetic construct
MPAAKRVKLDGGDKKYSIGLDIGTNSVGWAVITDEYKVPSKKFKVLGNTDRHSIKKNLIGALLFDSGETAEATRLKRTARRRYTRRKNRICYLQEIFSNEMAKVDDSFFHRLEESFLVEEDKKHERHPIFGNIVDEVAYHEKYPTIYHLRKKLVDSTDKADLRLIYLALAHMIKFRGHFLIEGDLNPDNSDVDKLFIQLVQTYNQLFEENPINASGVDAKAILSARLSKSRRLENLIAQLPGEKKNGLFGNLIALSLGLTPNFKSNFDLAEDAKLQLSKDTYDDDLDNLLAQIGDQYADLFLAAKNLSDAILLSDILRVNTEITKAPLSASMIKRYDEHHQDLTLLKALVRQQLPEKYKEIFFDQSKNGYAGYIDGGASQEEFYKFIKPILEKMDGTEELLVKLNREDLLRKQRTFDNGSIPHQIHLGELHAILRRQEDFYPFLKDNREKIEKILTFRIPYYVGPLARGNSRFAWMTRKSEETITPWNFEEVVDKGASAQSFIERMTNFDKNLPNEKVLPKHSLLYEYFTVYNELTKVKYVTEGMRKPAFLSGEQKKAIVDLLFKTNRKVTVKQLKEDYFKKIECFDSVEISGVEDRFNASLGTYHDLLKIIKDKDFLDNEENEDILEDIVLTLTLFEDREMIEERLKTYAHLFDDKVMKQLKRRRYTGWGRLSRKLINGIRDKQSGKTILDFLKSDGFANRNFMQLIHDDSLTFKEDIQKAQVSGQGDSLHEHIANLAGSPAIKKGILQTVKVVDELVKVMGRHKPENIVIEMARENQTTQKGQKNSRERMKRIEEGIKELGSQILKEHPVENTQLQNEKLYLYYLQNGRDMYVDQELDINRLSDYDVDHIVPQSFLKDDSIDNKVLTRSDKARGKSDNVPSEEVVKKMKNYWRQLLNAKLITQRKFDNLTKAERGGLSELDKAGFIKRQLVETRQITKHVAQILDSRMNTKYDENDKLIREVKVITLKSKLVSDFRKDFQFYKVREINNYHHAHDAYLNAVVGTALIKKYPKLESEFVYGDYKVYDVRKMIAKSEQEIGKATAKYFFYSNIMNFFKTEITLANGEIRKRPLIETNGETGEIVWDKGRDFATVRKVLSMPQVNIVKKTEVQTGGFSKESILPKRNSDKLIARKKDWDPKKYGGFDSPTVAYSVLVVAKVEKGKSKKLKSVKELLGITIMERSSFEKNPIDFLEAKGYKEVKKDLIIKLPKYSLFELENGRKRMLASAGELQKGNELALPSKYVNFLYLASHYEKLKGSPEDNEQKQLFVEQHKHYLDEIIEQISEFSKRVILADANLDKVLSAYNKHRDKPIREQAENIIHLFTLTNLGAPAAFKYFDTTIDRKRYTSTKEVLDATLIHQSITGLYETRIDLSQLGGDGGGGGPAPEAAAKGGTLNIEDEYRLHETSKGPDVPLGSTWLSDFPQAWAETGGMGLAVRQAPLIIPLKATSTPVSIKQYPMSQEARLGIKPHIQRLLDQGILVPCQSPWNTPLLPVKKPGTNDYRPVQDLREVNKRVEDIHPTVPNPYNLLSGLPPSHQWYTVLDLKDAFFCLRLHPTSQSLFAFEWRDPEMGISGQLTWTRLPQGFKNSPTLFNEALHRDLADFRIQHPDLILLQYVDDLLLAATSELDCQQGTRALLQTLGDLGYRASAKKAQICQKQVKYLGYLLKEGQRWLTEARKETVMGQPTPKTPRQLREFLGTAGFCRLWIPGFAEMAAPLYPLTKPGTLFEWGPDQQKAYQEIKQALLTAPALGLPDLTKPFELFVDEKQGYAKGVLTQKLGPWRRPVAYLSKKLDPVAAGWPPCLRMVAAIAVLTKDAGKLTMGQPLVILAPHAVEALVKQPPDRWLSNARMTHYQALLLDTDRVQFGPIVALNPATLLPLPEEGLQHDCLDILAEAHGTRPDLTDQPLPDADHTWYTDGSSFLQEGQRKAGAAVTTETEVVWAKALPAGTSAQRAELIALTQALKMAEGKKLNVYTDSRYAFATAHIHGEIYRRRGWLTSEGKEIKNKDEILALLKALFLPKRLSIIHCPGHQKGNRAEARGNRMADQAAREVATRETPETSTLLAGKRTADGSEFEKRTADGSEFESPKKKAKVE

SEQ ID NO: 2473 - protein, 2096 aa, synthetic construct
MPAAKRVKLDGGDKKYSIGLDIGTNSVGWAVITDEYKVPSKKFKVLGNTDRHSIKKNLIGALLFDSGETAEATRLKRTARRRYTRRKNRICYLQEIFSNEMAKVDDSFFHRLEESFLVEEDKKHERHPIFGNIVDEVAYHEKYPTIYHLRKKLVDSTDKADLRLIYLALAHMIKFRGHFLIEGDLNPDNSDVDKLFIQLVQTYNQLFEENPINASGVDAKAILSARLSKSRRLENLIAQLPGEKKNGLFGNLIALSLGLTPNFKSNFDLAEDAKLQLSKDTYDDDLDNLLAQIGDQYADLFLAAKNLSDAILLSDILRVNTEITKAPLSASMIKRYDEHHQDLTLLKALVRQQLPEKYKEIFFDQSKNGYAGYIDGGASQEEFYKFIKPILEKMDGTEELLVKLNREDLLRKQRTFDNGSIPHQIHLGELHAILRRQEDFYPFLKDNREKIEKILTFRIPYYVGPLARGNSRFAWMTRKSEETITPWNFEEVVDKGASAQSFIERMTNFDKNLPNEKVLPKHSLLYEYFTVYNELTKVKYVTEGMRKPAFLSGEQKKAIVDLLFKTNRKVTVKQLKEDYFKKIECFDSVEISGVEDRFNASLGTYHDLLKIIKDKDFLDNEENEDILEDIVLTLTLFEDREMIEERLKTYAHLFDDKVMKQLKRRRYTGWGRLSRKLINGIRDKQSGKTILDFLKSDGFANRNFMQLIHDDSLTFKEDIQKAQVSGQGDSLHEHIANLAGSPAIKKGILQTVKVVDELVKVMGRHKPENIVIEMARENQTTQKGQKNSRERMKRIEEGIKELGSQILKEHPVENTQLQNEKLYLYYLQNGRDMYVDQELDINRLSDYDVDHIVPQSFLKDDSIDNKVLTRSDKARGKSDNVPSEEVVKKMKNYWRQLLNAKLITQRKFDNLTKAERGGLSELDKAGFIKRQLVETRQITKHVAQILDSRMNTKYDENDKLIREVKVITLKSKLVSDFRKDFQFYKVREINNYHHAHDAYLNAVVGTALIKKYPKLESEFVYGDYKVYDVRKMIAKSEQEIGKATAKYFFYSNIMNFFKTEITLANGEIRKRPLIETNGETGEIVWDKGRDFATVRKVLSMPQVNIVKKTEVQTGGFSKESILPKRNSDKLIARKKDWDPKKYGGFDSPTVAYSVLVVAKVEKGKSKKLKSVKELLGITIMERSSFEKNPIDFLEAKGYKEVKKDLIIKLPKYSLFELENGRKRMLASAGELQKGNELALPSKYVNFLYLASHYEKLKGSPEDNEQKQLFVEQHKHYLDEIIEQISEFSKRVILADANLDKVLSAYNKHRDKPIREQAENIIHLFTLTNLGAPAAFKYFDTTIDRKRYTSTKEVLDATLIHQSITGLYETRIDLSQLGGDGGEAAAKPAPGSSGGTLNIEDEYRLHETSKGPDVPLGSTWLSDFPQAWAETGGMGLAVRQAPLIIPLKATSTPVSIKQYPMSQEARLGIKPHIQRLLDQGILVPCQSPWNTPLLPVKKPGTNDYRPVQDLREVNKRVEDIHPTVPNPYNLLSGLPPSHQWYTVLDLKDAFFCLRLHPTSQSLFAFEWRDPEMGISGQLTWTRLPQGFKNSPTLFNEALHRDLADFRIQHPDLILLQYVDDLLLAATSELDCQQGTRALLQTLGDLGYRASAKKAQICQKQVKYLGYLLKEGQRWLTEARKETVMGQPTPKTPRQLREFLGTAGFCRLWIPGFAEMAAPLYPLTKPGTLFEWGPDQQKAYQEIKQALLTAPALGLPDLTKPFELFVDEKQGYAKGVLTQKLGPWRRPVAYLSKKLDPVAAGWPPCLRMVAAIAVLTKDAGKLTMGQPLVILAPHAVEALVKQPPDRWLSNARMTHYQALLLDTDRVQFGPIVALNPATLLPLPEEGLQHDCLDILAEAHGTRPDLTDQPLPDADHTWYTDGSSFLQEGQRKAGAAVTTETEVVWAKALPAGTSAQRAELIALTQALKMAEGKKLNVYTDSRYAFATAHIHGEIYRRRGWLTSEGKEIKNKDEILALLKALFLPKRLSIIHCPGHQKGNRAEARGNRMADQAAREVATRETPETSTLLAGKRTADGSEFEKRTADGSEFESPKKKAKVE

SEQ ID NO: 2474 - protein, 2096 aa, synthetic construct
MPAAKRVKLDGGDKKYSIGLDIGTNSVGWAVITDEYKVPSKKFKVLGNTDRHSIKKNLIGALLFDSGETAEATRLKRTARRRYTRRKNRICYLQEIFSNEMAKVDDSFFHRLEESFLVEEDKKHERHPIFGNIVDEVAYHEKYPTIYHLRKKLVDSTDKADLRLIYLALAHMIKFRGHFLIEGDLNPDNSDVDKLFIQLVQTYNQLFEENPINASGVDAKAILSARLSKSRRLENLIAQLPGEKKNGLFGNLIALSLGLTPNFKSNFDLAEDAKLQLSKDTYDDDLDNLLAQIGDQYADLFLAAKNLSDAILLSDILRVNTEITKAPLSASMIKRYDEHHQDLTLLKALVRQQLPEKYKEIFFDQSKNGYAGYIDGGASQEEFYKFIKPILEKMDGTEELLVKLNREDLLRKQRTFDNGSIPHQIHLGELHAILRRQEDFYPFLKDNREKIEKILTFRIPYYVGPLARGNSRFAWMTRKSEETITPWNFEEVVDKGASAQSFIERMTNFDKNLPNEKVLPKHSLLYEYFTVYNELTKVKYVTEGMRKPAFLSGEQKKAIVDLLFKTNRKVTVKQLKEDYFKKIECFDSVEISGVEDRFNASLGTYHDLLKIIKDKDFLDNEENEDILEDIVLTLTLFEDREMIEERLKTYAHLFDDKVMKQLKRRRYTGWGRLSRKLINGIRDKQSGKTILDFLKSDGFANRNFMQLIHDDSLTFKEDIQKAQVSGQGDSLHEHIANLAGSPAIKKGILQTVKVVDELVKVMGRHKPENIVIEMARENQTTQKGQKNSRERMKRIEEGIKELGSQILKEHPVENTQLQNEKLYLYYLQNGRDMYVDQELDINRLSDYDVDHIVPQSFLKDDSIDNKVLTRSDKARGKSDNVPSEEVVKKMKNYWRQLLNAKLITQRKFDNLTKAERGGLSELDKAGFIKRQLVETRQITKHVAQILDSRMNTKYDENDKLIREVKVITLKSKLVSDFRKDFQFYKVREINNYHHAHDAYLNAVVGTALIKKYPKLESEFVYGDYKVYDVRKMIAKSEQEIGKATAKYFFYSNIMNFFKTEITLANGEIRKRPLIETNGETGEIVWDKGRDFATVRKVLSMPQVNIVKKTEVQTGGFSKESILPKRNSDKLIARKKDWDPKKYGGFDSPTVAYSVLVVAKVEKGKSKKLKSVKELLGITIMERSSFEKNPIDFLEAKGYKEVKKDLIIKLPKYSLFELENGRKRMLASAGELQKGNELALPSKYVNFLYLASHYEKLKGSPEDNEQKQLFVEQHKHYLDEIIEQISEFSKRVILADANLDKVLSAYNKHRDKPIREQAENIIHLFTLTNLGAPAAFKYFDTTIDRKRYTSTKEVLDATLIHQSITGLYETRIDLSQLGGDGGEAAAKGGSPAPGGTLNIEDEYRLHETSKGPDVPLGSTWLSDFPQAWAETGGMGLAVRQAPLIIPLKATSTPVSIKQYPMSQEARLGIKPHIQRLLDQGILVPCQSPWNTPLLPVKKPGTNDYRPVQDLREVNKRVEDIHPTVPNPYNLLSGLPPSHQWYTVLDLKDAFFCLRLHPTSQSLFAFEWRDPEMGISGQLTWTRLPQGFKNSPTLFNEALHRDLADFRIQHPDLILLQYVDDLLLAATSELDCQQGTRALLQTLGDLGYRASAKKAQICQKQVKYLGYLLKEGQRWLTEARKETVMGQPTPKTPRQLREFLGTAGFCRLWIPGFAEMAAPLYPLTKPGTLFEWGPDQQKAYQEIKQALLTAPALGLPDLTKPFELFVDEKQGYAKGVLTQKLGPWRRPVAYLSKKLDPVAAGWPPCLRMVAAIAVLTKDAGKLTMGQPLVILAPHAVEALVKQPPDRWLSNARMTHYQALLLDTDRVQFGPIVALNPATLLPLPEEGLQHDCLDILAEAHGTRPDLTDQPLPDADHTWYTDGSSFLQEGQRKAGAAVTTETEVVWAKALPAGTSAQRAELIALTQALKMAEGKKLNVYTDSRYAFATAHIHGEIYRRRGWLTSEGKEIKNKDEILALLKALFLPKRLSIIHCPGHQKGNRAEARGNRMADQAAREVATRETPETSTLLAGKRTADGSEFEKRTADGSEFESPKKKAKVE

SEQ ID NO: 2475 - protein, 2093 aa, synthetic construct
MPAAKRVKLDGGDKKYSIGLDIGTNSVGWAVITDEYKVPSKKFKVLGNTDRHSIKKNLIGALLFDSGETAEATRLKRTARRRYTRRKNRICYLQEIFSNEMAKVDDSFFHRLEESFLVEEDKKHERHPIFGNIVDEVAYHEKYPTIYHLRKKLVDSTDKADLRLIYLALAHMIKFRGHFLIEGDLNPDNSDVDKLFIQLVQTYNQLFEENPINASGVDAKAILSARLSKSRRLENLIAQLPGEKKNGLFGNLIALSLGLTPNFKSNFDLAEDAKLQLSKDTYDDDLDNLLAQIGDQYADLFLAAKNLSDAILLSDILRVNTEITKAPLSASMIKRYDEHHQDLTLLKALVRQQLPEKYKEIFFDQSKNGYAGYIDGGASQEEFYKFIKPILEKMDGTEELLVKLNREDLLRKQRTFDNGSIPHQIHLGELHAILRRQEDFYPFLKDNREKIEKILTFRIPYYVGPLARGNSRFAWMTRKSEETITPWNFEEVVDKGASAQSFIERMTNFDKNLPNEKVLPKHSLLYEYFTVYNELTKVKYVTEGMRKPAFLSGEQKKAIVDLLFKTNRKVTVKQLKEDYFKKIECFDSVEISGVEDRFNASLGTYHDLLKIIKDKDFLDNEENEDILEDIVLTLTLFEDREMIEERLKTYAHLFDDKVMKQLKRRRYTGWGRLSRKLINGIRDKQSGKTILDFLKSDGFANRNFMQLIHDDSLTFKEDIQKAQVSGQGDSLHEHIANLAGSPAIKKGILQTVKVVDELVKVMGRHKPENIVIEMARENQTTQKGQKNSRERMKRIEEGIKELGSQILKEHPVENTQLQNEKLYLYYLQNGRDMYVDQELDINRLSDYDVDHIVPQSFLKDDSIDNKVLTRSDKARGKSDNVPSEEVVKKMKNYWRQLLNAKLITQRKFDNLTKAERGGLSELDKAGFIKRQLVETRQITKHVAQILDSRMNTKYDENDKLIREVKVITLKSKLVSDFRKDFQFYKVREINNYHHAHDAYLNAVVGTALIKKYPKLESEFVYGDYKVYDVRKMIAKSEQEIGKATAKYFFYSNIMNFFKTEITLANGEIRKRPLIETNGETGEIVWDKGRDFATVRKVLSMPQVNIVKKTEVQTGGFSKESILPKRNSDKLIARKKDWDPKKYGGFDSPTVAYSVLVVAKVEKGKSKKLKSVKELLGITIMERSSFEKNPIDFLEAKGYKEVKKDLIIKLPKYSLFELENGRKRMLASAGELQKGNELALPSKYVNFLYLASHYEKLKGSPEDNEQKQLFVEQHKHYLDEIIEQISEFSKRVILADANLDKVLSAYNKHRDKPIREQAENIIHLFTLTNLGAPAAFKYFDTTIDRKRYTSTKEVLDATLIHQSITGLYETRIDLSQLGGDGGGSSEAAAKGGTLNIEDEYRLHETSKGPDVPLGSTWLSDFPQAWAETGGMGLAVRQAPLIIPLKATSTPVSIKQYPMSQEARLGIKPHIQRLLDQGILVPCQSPWNTPLLPVKKPGTNDYRPVQDLREVNKRVEDIHPTVPNPYNLLSGLPPSHQWYTVLDLKDAFFCLRLHPTSQSLFAFEWRDPEMGISGQLTWTRLPQGFKNSPTLFNEALHRDLADFRIQHPDLILLQYVDDLLLAATSELDCQQGTRALLQTLGDLGYRASAKKAQICQKQVKYLGYLLKEGQRWLTEARKETVMGQPTPKTPRQLREFLGTAGFCRLWIPGFAEMAAPLYPLTKPGTLFEWGPDQQKAYQEIKQALLTAPALGLPDLTKPFELFVDEKQGYAKGVLTQKLGPWRRPVAYLSKKLDPVAAGWPPCLRMVAAIAVLTKDAGKLTMGQPLVILAPHAVEALVKQPPDRWLSNARMTHYQALLLDTDRVQFGPIVALNPATLLPLPEEGLQHDCLDILAEAHGTRPDLTDQPLPDADHTWYTDGSSFLQEGQRKAGAAVTTETEVVWAKALPAGTSAQRAELIALTQALKMAEGKKLNVYTDSRYAFATAHIHGEIYRRRGWLTSEGKEIKNKDEILALLKALFLPKRLSIIHCPGHQKGNRAEARGNRMADQAAREVATRETPETSTLLAGKRTADGSEFEKRTADGSEFESPKKKAKVE

SEQ ID NO: 2476 - protein, 2094 aa, synthetic construct
MPAAKRVKLDGGDKKYSIGLDIGTNSVGWAVITDEYKVPSKKFKVLGNTDRHSIKKNLIGALLFDSGETAEATRLKRTARRRYTRRKNRICYLQEIFSNEMAKVDDSFFHRLEESFLVEEDKKHERHPIFGNIVDEVAYHEKYPTIYHLRKKLVDSTDKADLRLIYLALAHMIKFRGHFLIEGDLNPDNSDVDKLFIQLVQTYNQLFEENPINASGVDAKAILSARLSKSRRLENLIAQLPGEKKNGLFGNLIALSLGLTPNFKSNFDLAEDAKLQLSKDTYDDDLDNLLAQIGDQYADLFLAAKNLSDAILLSDILRVNTEITKAPLSASMIKRYDEHHQDLTLLKALVRQQLPEKYKEIFFDQSKNGYAGYIDGGASQEEFYKFIKPILEKMDGTEELLVKLNREDLLRKQRTFDNGSIPHQIHLGELHAILRRQEDFYPFLKDNREKIEKILTFRIPYYVGPLARGNSRFAWMTRKSEETITPWNFEEVVDKGASAQSFIERMTNFDKNLPNEKVLPKHSLLYEYFTVYNELTKVKYVTEGMRKPAFLSGEQKKAIVDLLFKTNRKVTVKQLKEDYFKKIECFDSVEISGVEDRFNASLGTYHDLLKIIKDKDFLDNEENEDILEDIVLTLTLFEDREMIEERLKTYAHLFDDKVMKQLKRRRYTGWGRLSRKLINGIRDKQSGKTILDFLKSDGFANRNFMQLIHDDSLTFKEDIQKAQVSGQGDSLHEHIANLAGSPAIKKGILQTVKVVDELVKVMGRHKPENIVIEMARENQTTQKGQKNSRERMKRIEEGIKELGSQILKEHPVENTQLQNEKLYLYYLQNGRDMYVDQELDINRLSDYDVDHIVPQSFLKDDSIDNKVLTRSDKARGKSDNVPSEEVVKKMKNYWRQLLNAKLITQRKFDNLTKAERGGLSELDKAGFIKRQLVETRQITKHVAQILDSRMNTKYDENDKLIREVKVITLKSKLVSDFRKDFQFYKVREINNYHHAHDAYLNAVVGTALIKKYPKLESEFVYGDYKVYDVRKMIAKSEQEIGKATAKYFFYSNIMNFFKTEITLANGEIRKRPLIETNGETGEIVWDKGRDFATVRKVLSMPQVNIVKKTEVQTGGFSKESILPKRNSDKLIARKKDWDPKKYGGFDSPTVAYSVLVVAKVEKGKSKKLKSVKELLGITIMERSSFEKNPIDFLEAKGYKEVKKDLIIKLPKYSLFELENGRKRMLASAGELQKGNELALPSKYVNFLYLASHYEKLKGSPEDNEQKQLFVEQHKHYLDEIIEQISEFSKRVILADANLDKVLSAYNKHRDKPIREQAENIIHLFTLTNLGAPAAFKYFDTTIDRKRYTSTKEVLDATLIHQSITGLYETRIDLSQLGGDGGGGSPAPGGGGGTLNIEDEYRLHETSKGPDVPLGSTWLSDFPQAWAETGGMGLAVRQAPLIIPLKATSTPVSIKQYPMSQEARLGIKPHIQRLLDQGILVPCQSPWNTPLLPVKKPGTNDYRPVQDLREVNKRVEDIHPTVPNPYNLLSGLPPSHQWYTVLDLKDAFFCLRLHPTSQSLFAFEWRDPEMGISGQLTWTRLPQGFKNSPTLFNEALHRDLADFRIQHPDLILLQYVDDLLLAATSELDCQQGTRALLQTLGDLGYRASAKKAQICQKQVKYLGYLLKEGQRWLTEARKETVMGQPTPKTPRQLREFLGTAGFCRLWIPGFAEMAAPLYPLTKPGTLFEWGPDQQKAYQEIKQALLTAPALGLPDLTKPFELFVDEKQGYAKGVLTQKLGPWRRPVAYLSKKLDPVAAGWPPCLRMVAAIAVLTKDAGKLTMGQPLVILAPHAVEALVKQPPDRWLSNARMTHYQALLLDTDRVQFGPIVALNPATLLPLPEEGLQHDCLDILAEAHGTRPDLTDQPLPDADHTWYTDGSSFLQEGQRKAGAAVTTETEVVWAKALPAGTSAQRAELIALTQALKMAEGKKLNVYTDSRYAFATAHIHGEIYRRRGWLTSEGKEIKNKDEILALLKALFLPKRLSIIHCPGHQKGNRAEARGNRMADQAAREVATRETPETSTLLAGKRTADGSEFEKRTADGSEFESPKKKAKVE

SEQ ID NO: 2477 - protein, 2091 aa, synthetic construct
MPAAKRVKLDGGDKKYSIGLDIGTNSVGWAVITDEYKVPSKKFKVLGNTDRHSIKKNLIGALLFDSGETAEATRLKRTARRRYTRRKNRICYLQEIFSNEMAKVDDSFFHRLEESFLVEEDKKHERHPIFGNIVDEVAYHEKYPTIYHLRKKLVDSTDKADLRLIYLALAHMIKFRGHFLIEGDLNPDNSDVDKLFIQLVQTYNQLFEENPINASGVDAKAILSARLSKSRRLENLIAQLPGEKKNGLFGNLIALSLGLTPNFKSNFDLAEDAKLQLSKDTYDDDLDNLLAQIGDQYADLFLAAKNLSDAILLSDILRVNTEITKAPLSASMIKRYDEHHQDLTLLKALVRQQLPEKYKEIFFDQSKNGYAGYIDGGASQEEFYKFIKPILEKMDGTEELLVKLNREDLLRKQRTFDNGSIPHQIHLGELHAILRRQEDFYPFLKDNREKIEKILTFRIPYYVGPLARGNSRFAWMTRKSEETITPWNFEEVVDKGASAQSFIERMTNFDKNLPNEKVLPKHSLLYEYFTVYNELTKVKYVTEGMRKPAFLSGEQKKAIVDLLFKTNRKVTVKQLKEDYFKKIECFDSVEISGVEDRFNASLGTYHDLLKIIKDKDFLDNEENEDILEDIVLTLTLFEDREMIEERLKTYAHLFDDKVMKQLKRRRYTGWGRLSRKLINGIRDKQSGKTILDFLKSDGFANRNFMQLIHDDSLTFKEDIQKAQVSGQGDSLHEHIANLAGSPAIKKGILQTVKVVDELVKVMGRHKPENIVIEMARENQTTQKGQKNSRERMKRIEEGIKELGSQILKEHPVENTQLQNEKLYLYYLQNGRDMYVDQELDINRLSDYDVDHIVPQSFLKDDSIDNKVLTRSDKARGKSDNVPSEEVVKKMKNYWRQLLNAKLITQRKFDNLTKAERGGLSELDKAGFIKRQLVETRQITKHVAQILDSRMNTKYDENDKLIREVKVITLKSKLVSDFRKDFQFYKVREINNYHHAHDAYLNAVVGTALIKKYPKLESEFVYGDYKVYDVRKMIAKSEQEIGKATAKYFFYSNIMNFFKTEITLANGEIRKRPLIETNGETGEIVWDKGRDFATVRKVLSMPQVNIVKKTEVQTGGFSKESILPKRNSDKLIARKKDWDPKKYGGFDSPTVAYSVLVVAKVEKGKSKKLKSVKELLGITIMERSSFEKNPIDFLEAKGYKEVKKDLIIKLPKYSLFELENGRKRMLASAGELQKGNELALPSKYVNFLYLASHYEKLKGSPEDNEQKQLFVEQHKHYLDEIIEQISEFSKRVILADANLDKVLSAYNKHRDKPIREQAENIIHLFTLTNLGAPAAFKYFDTTIDRKRYTSTKEVLDATLIHQSITGLYETRIDLSQLGGDGGGSSPAPGGTLNIEDEYRLHETSKGPDVPLGSTWLSDFPQAWAETGGMGLAVRQAPLIIPLKATSTPVSIKQYPMSQEARLGIKPHIQRLLDQGILVPCQSPWNTPLLPVKKPGTNDYRPVQDLREVNKRVEDIHPTVPNPYNLLSGLPPSHQWYTVLDLKDAFFCLRLHPTSQSLFAFEWRDPEMGISGQLTWTRLPQGFKNSPTLFNEALHRDLADFRIQHPDLILLQYVDDLLLAATSELDCQQGTRALLQTLGDLGYRASAKKAQICQKQVKYLGYLLKEGQRWLTEARKETVMGQPTPKTPRQLREFLGTAGFCRLWIPGFAEMAAPLYPLTKPGTLFEWGPDQQKAYQEIKQALLTAPALGLPDLTKPFELFVDEKQGYAKGVLTQKLGPWRRPVAYLSKKLDPVAAGWPPCLRMVAAIAVLTKDAGKLTMGQPLVILAPHAVEALVKQPPDRWLSNARMTHYQALLLDTDRVQFGPIVALNPATLLPLPEEGLQHDCLDILAEAHGTRPDLTDQPLPDADHTWYTDGSSFLQEGQRKAGAAVTTETEVVWAKALPAGTSAQRAELIALTQALKMAEGKKLNVYTDSRYAFATAHIHGEIYRRRGWLTSEGKEIKNKDEILALLKALFLPKRLSIIHCPGHQKGNRAEARGNRMADQAAREVATRETPETSTLLAGKRTADGSEFEKRTADGSEFESPKKKAKVE

SEQ ID NO: 2478 - protein, 2091 aa, synthetic construct
MPAAKRVKLDGGDKKYSIGLDIGTNSVGWAVITDEYKVPSKKFKVLGNTDRHSIKKNLIGALLFDSGETAEATRLKRTARRRYTRRKNRICYLQEIFSNEMAKVDDSFFHRLEESFLVEEDKKHERHPIFGNIVDEVAYHEKYPTIYHLRKKLVDSTDKADLRLIYLALAHMIKFRGHFLIEGDLNPDNSDVDKLFIQLVQTYNQLFEENPINASGVDAKAILSARLSKSRRLENLIAQLPGEKKNGLFGNLIALSLGLTPNFKSNFDLAEDAKLQLSKDTYDDDLDNLLAQIGDQYADLFLAAKNLSDAILLSDILRVNTEITKAPLSASMIKRYDEHHQDLTLLKALVRQQLPEKYKEIFFDQSKNGYAGYIDGGASQEEFYKFIKPILEKMDGTEELLVKLNREDLLRKQRTFDNGSIPHQIHLGELHAILRRQEDFYPFLKDNREKIEKILTFRIPYYVGPLARGNSRFAWMTRKSEETITPWNFEEVVDKGASAQSFIERMTNFDKNLPNEKVLPKHSLLYEYFTVYNELTKVKYVTEGMRKPAFLSGEQKKAIVDLLFKTNRKVTVKQLKEDYFKKIECFDSVEISGVEDRFNASLGTYHDLLKIIKDKDFLDNEENEDILEDIVLTLTLFEDREMIEERLKTYAHLFDDKVMKQLKRRRYTGWGRLSRKLINGIRDKQSGKTILDFLKSDGFANRNFMQLIHDDSLTFKEDIQKAQVSGQGDSLHEHIANLAGSPAIKKGILQTVKVVDELVKVMGRHKPENIVIEMARENQTTQKGQKNSRERMKRIEEGIKELGSQILKEHPVENTQLQNEKLYLYYLQNGRDMYVDQELDINRLSDYDVDHIVPQSFLKDDSIDNKVLTRSDKARGKSDNVPSEEVVKKMKNYWRQLLNAKLITQRKFDNLTKAERGGLSELDKAGFIKRQLVETRQITKHVAQILDSRMNTKYDENDKLIREVKVITLKSKLVSDFRKDFQFYKVREINNYHHAHDAYLNAVVGTALIKKYPKLESEFVYGDYKVYDVRKMIAKSEQEIGKATAKYFFYSNIMNFFKTEITLANGEIRKRPLIETNGETGEIVWDKGRDFATVRKVLSMPQVNIVKKTEVQTGGFSKESILPKRNSDKLIARKKDWDPKKYGGFDSPTVAYSVLVVAKVEKGKSKKLKSVKELLGITIMERSSFEKNPIDFLEAKGYKEVKKDLIIKLPKYSLFELENGRKRMLASAGELQKGNELALPSKYVNFLYLASHYEKLKGSPEDNEQKQLFVEQHKHYLDEIIEQISEFSKRVILADANLDKVLSAYNKHRDKPIREQAENIIHLFTLTNLGAPAAFKYFDTTIDRKRYTSTKEVLDATLIHQSITGLYETRIDLSQLGGDGGGGSGGGGGTLNIEDEYRLHETSKGPDVPLGSTWLSDFPQAWAETGGMGLAVRQAPLIIPLKATSTPVSIKQYPMSQEARLGIKPHIQRLLDQGILVPCQSPWNTPLLPVKKPGTNDYRPVQDLREVNKRVEDIHPTVPNPYNLLSGLPPSHQWYTVLDLKDAFFCLRLHPTSQSLFAFEWRDPEMGISGQLTWTRLPQGFKNSPTLFNEALHRDLADFRIQHPDLILLQYVDDLLLAATSELDCQQGTRALLQTLGDLGYRASAKKAQICQKQVKYLGYLLKEGQRWLTEARKETVMGQPTPKTPRQLREFLGTAGFCRLWIPGFAEMAAPLYPLTKPGTLFEWGPDQQKAYQEIKQALLTAPALGLPDLTKPFELFVDEKQGYAKGVLTQKLGPWRRPVAYLSKKLDPVAAGWPPCLRMVAAIAVLTKDAGKLTMGQPLVILAPHAVEALVKQPPDRWLSNARMTHYQALLLDTDRVQFGPIVALNPATLLPLPEEGLQHDCLDILAEAHGTRPDLTDQPLPDADHTWYTDGSSFLQEGQRKAGAAVTTETEVVWAKALPAGTSAQRAELIALTQALKMAEGKKLNVYTDSRYAFATAHIHGEIYRRRGWLTSEGKEIKNKDEILALLKALFLPKRLSIIHCPGHQKGNRAEARGNRMADQAAREVATRETPETSTLLAGKRTADGSEFEKRTADGSEFESPKKKAKVE

SEQ ID NO: 2479 - protein, 2094 aa, synthetic construct
MPAAKRVKLDGGDKKYSIGLDIGTNSVGWAVITDEYKVPSKKFKVLGNTDRHSIKKNLIGALLFDSGETAEATRLKRTARRRYTRRKNRICYLQEIFSNEMAKVDDSFFHRLEESFLVEEDKKHERHPIFGNIVDEVAYHEKYPTIYHLRKKLVDSTDKADLRLIYLALAHMIKFRGHFLIEGDLNPDNSDVDKLFIQLVQTYNQLFEENPINASGVDAKAILSARLSKSRRLENLIAQLPGEKKNGLFGNLIALSLGLTPNFKSNFDLAEDAKLQLSKDTYDDDLDNLLAQIGDQYADLFLAAKNLSDAILLSDILRVNTEITKAPLSASMIKRYDEHHQDLTLLKALVRQQLPEKYKEIFFDQSKNGYAGYIDGGASQEEFYKFIKPILEKMDGTEELLVKLNREDLLRKQRTFDNGSIPHQIHLGELHAILRRQEDFYPFLKDNREKIEKILTFRIPYYVGPLARGNSRFAWMTRKSEETITPWNFEEVVDKGASAQSFIERMTNFDKNLPNEKVLPKHSLLYEYFTVYNELTKVKYVTEGMRKPAFLSGEQKKAIVDLLFKTNRKVTVKQLKEDYFKKIECFDSVEISGVEDRFNASLGTYHDLLKIIKDKDFLDNEENEDILEDIVLTLTLFEDREMIEERLKTYAHLFDDKVMKQLKRRRYTGWGRLSRKLINGIRDKQSGKTILDFLKSDGFANRNFMQLIHDDSLTFKEDIQKAQVSGQGDSLHEHIANLAGSPAIKKGILQTVKVVDELVKVMGRHKPENIVIEMARENQTTQKGQKNSRERMKRIEEGIKELGSQILKEHPVENTQLQNEKLYLYYLQNGRDMYVDQELDINRLSDYDVDHIVPQSFLKDDSIDNKVLTRSDKARGKSDNVPSEEVVKKMKNYWRQLLNAKLITQRKFDNLTKAERGGLSELDKAGFIKRQLVETRQITKHVAQILDSRMNTKYDENDKLIREVKVITLKSKLVSDFRKDFQFYKVREINNYHHAHDAYLNAVVGTALIKKYPKLESEFVYGDYKVYDVRKMIAKSEQEIGKATAKYFFYSNIMNFFKTEITLANGEIRKRPLIETNGETGEIVWDKGRDFATVRKVLSMPQVNIVKKTEVQTGGFSKESILPKRNSDKLIARKKDWDPKKYGGFDSPTVAYSVLVVAKVEKGKSKKLKSVKELLGITIMERSSFEKNPIDFLEAKGYKEVKKDLIIKLPKYSLFELENGRKRMLASAGELQKGNELALPSKYVNFLYLASHYEKLKGSPEDNEQKQLFVEQHKHYLDEIIEQISEFSKRVILADANLDKVLSAYNKHRDKPIREQAENIIHLFTLTNLGAPAAFKYFDTTIDRKRYTSTKEVLDATLIHQSITGLYETRIDLSQLGGDGGGGSGGGGSSGGTLNIEDEYRLHETSKGPDVPLGSTWLSDFPQAWAETGGMGLAVRQAPLIIPLKATSTPVSIKQYPMSQEARLGIKPHIQRLLDQGILVPCQSPWNTPLLPVKKPGTNDYRPVQDLREVNKRVEDIHPTVPNPYNLLSGLPPSHQWYTVLDLKDAFFCLRLHPTSQSLFAFEWRDPEMGISGQLTWTRLPQGFKNSPTLFNEALHRDLADFRIQHPDLILLQYVDDLLLAATSELDCQQGTRALLQTLGDLGYRASAKKAQICQKQVKYLGYLLKEGQRWLTEARKETVMGQPTPKTPRQLREFLGTAGFCRLWIPGFAEMAAPLYPLTKPGTLFEWGPDQQKAYQEIKQALLTAPALGLPDLTKPFELFVDEKQGYAKGVLTQKLGPWRRPVAYLSKKLDPVAAGWPPCLRMVAAIAVLTKDAGKLTMGQPLVILAPHAVEALVKQPPDRWLSNARMTHYQALLLDTDRVQFGPIVALNPATLLPLPEEGLQHDCLDILAEAHGTRPDLTDQPLPDADHTWYTDGSSFLQEGQRKAGAAVTTETEVVWAKALPAGTSAQRAELIALTQALKMAEGKKLNVYTDSRYAFATAHIHGEIYRRRGWLTSEGKEIKNKDEILALLKALFLPKRLSIIHCPGHQKGNRAEARGNRMADQAAREVATRETPETSTLLAGKRTADGSEFEKRTADGSEFESPKKKAKVE

SEQ ID NO: 2480 - protein, 2096 aa, synthetic construct
MPAAKRVKLDGGDKKYSIGLDIGTNSVGWAVITDEYKVPSKKFKVLGNTDRHSIKKNLIGALLFDSGETAEATRLKRTARRRYTRRKNRICYLQEIFSNEMAKVDDSFFHRLEESFLVEEDKKHERHPIFGNIVDEVAYHEKYPTIYHLRKKLVDSTDKADLRLIYLALAHMIKFRGHFLIEGDLNPDNSDVDKLFIQLVQTYNQLFEENPINASGVDAKAILSARLSKSRRLENLIAQLPGEKKNGLFGNLIALSLGLTPNFKSNFDLAEDAKLQLSKDTYDDDLDNLLAQIGDQYADLFLAAKNLSDAILLSDILRVNTEITKAPLSASMIKRYDEHHQDLTLLKALVRQQLPEKYKEIFFDQSKNGYAGYIDGGASQEEFYKFIKPILEKMDGTEELLVKLNREDLLRKQRTFDNGSIPHQIHLGELHAILRRQEDFYPFLKDNREKIEKILTFRIPYYVGPLARGNSRFAWMTRKSEETITPWNFEEVVDKGASAQSFIERMTNFDKNLPNEKVLPKHSLLYEYFTVYNELTKVKYVTEGMRKPAFLSGEQKKAIVDLLFKTNRKVTVKQLKEDYFKKIECFDSVEISGVEDRFNASLGTYHDLLKIIKDKDFLDNEENEDILEDIVLTLTLFEDREMIEERLKTYAHLFDDKVMKQLKRRRYTGWGRLSRKLINGIRDKQSGKTILDFLKSDGFANRNFMQLIHDDSLTFKEDIQKAQVSGQGDSLHEHIANLAGSPAIKKGILQTVKVVDELVKVMGRHKPENIVIEMARENQTTQKGQKNSRERMKRIEEGIKELGSQILKEHPVENTQLQNEKLYLYYLQNGRDMYVDQELDINRLSDYDVDHIVPQSFLKDDSIDNKVLTRSDKARGKSDNVPSEEVVKKMKNYWRQLLNAKLITQRKFDNLTKAERGGLSELDKAGFIKRQLVETRQITKHVAQILDSRMNTKYDENDKLIREVKVITLKSKLVSDFRKDFQFYKVREINNYHHAHDAYLNAVVGTALIKKYPKLESEFVYGDYKVYDVRKMIAKSEQEIGKATAKYFFYSNIMNFFKTEITLANGEIRKRPLIETNGETGEIVWDKGRDFATVRKVLSMPQVNIVKKTEVQTGGFSKESILPKRNSDKLIARKKDWDPKKYGGFDSPTVAYSVLVVAKVEKGKSKKLKSVKELLGITIMERSSFEKNPIDFLEAKGYKEVKKDLIIKLPKYSLFELENGRKRMLASAGELQKGNELALPSKYVNFLYLASHYEKLKGSPEDNEQKQLFVEQHKHYLDEIIEQISEFSKRVILADANLDKVLSAYNKHRDKPIREQAENIIHLFTLTNLGAPAAFKYFDTTIDRKRYTSTKEVLDATLIHQSITGLYETRIDLSQLGGDGGGSSPAPEAAAKGGTLNIEDEYRLHETSKGPDVPLGSTWLSDFPQAWAETGGMGLAVRQAPLIIPLKATSTPVSIKQYPMSQEARLGIKPHIQRLLDQGILVPCQSPWNTPLLPVKKPGTNDYRPVQDLREVNKRVEDIHPTVPNPYNLLSGLPPSHQWYTVLDLKDAFFCLRLHPTSQSLFAFEWRDPEMGISGQLTWTRLPQGFKNSPTLFNEALHRDLADFRIQHPDLILLQYVDDLLLAATSELDCQQGTRALLQTLGDLGYRASAKKAQICQKQVKYLGYLLKEGQRWLTEARKETVMGQPTPKTPRQLREFLGTAGFCRLWIPGFAEMAAPLYPLTKPGTLFEWGPDQQKAYQEIKQALLTAPALGLPDLTKPFELFVDEKQGYAKGVLTQKLGPWRRPVAYLSKKLDPVAAGWPPCLRMVAAIAVLTKDAGKLTMGQPLVILAPHAVEALVKQPPDRWLSNARMTHYQALLLDTDRVQFGPIVALNPATLLPLPEEGLQHDCLDILAEAHGTRPDLTDQPLPDADHTWYTDGSSFLQEGQRKAGAAVTTETEVVWAKALPAGTSAQRAELIALTQALKMAEGKKLNVYTDSRYAFATAHIHGEIYRRRGWLTSEGKEIKNKDEILALLKALFLPKRLSIIHCPGHQKGNRAEARGNRMADQAAREVATRETPETSTLLAGKRTADGSEFEKRTADGSEFESPKKKAKVE

SEQ ID NO: 2481 - protein, 2091 aa, synthetic construct
MPAAKRVKLDGGDKKYSIGLDIGTNSVGWAVITDEYKVPSKKFKVLGNTDRHSIKKNLIGALLFDSGETAEATRLKRTARRRYTRRKNRICYLQEIFSNEMAKVDDSFFHRLEESFLVEEDKKHERHPIFGNIVDEVAYHEKYPTIYHLRKKLVDSTDKADLRLIYLALAHMIKFRGHFLIEGDLNPDNSDVDKLFIQLVQTYNQLFEENPINASGVDAKAILSARLSKSRRLENLIAQLPGEKKNGLFGNLIALSLGLTPNFKSNFDLAEDAKLQLSKDTYDDDLDNLLAQIGDQYADLFLAAKNLSDAILLSDILRVNTEITKAPLSASMIKRYDEHHQDLTLLKALVRQQLPEKYKEIFFDQSKNGYAGYIDGGASQEEFYKFIKPILEKMDGTEELLVKLNREDLLRKQRTFDNGSIPHQIHLGELHAILRRQEDFYPFLKDNREKIEKILTFRIPYYVGPLARGNSRFAWMTRKSEETITPWNFEEVVDKGASAQSFIERMTNFDKNLPNEKVLPKHSLLYEYFTVYNELTKVKYVTEGMRKPAFLSGEQKKAIVDLLFKTNRKVTVKQLKEDYFKKIECFDSVEISGVEDRFNASLGTYHDLLKIIKDKDFLDNEENEDILEDIVLTLTLFEDREMIEERLKTYAHLFDDKVMKQLKRRRYTGWGRLSRKLINGIRDKQSGKTILDFLKSDGFANRNFMQLIHDDSLTFKEDIQKAQVSGQGDSLHEHIANLAGSPAIKKGILQTVKVVDELVKVMGRHKPENIVIEMARENQTTQKGQKNSRERMKRIEEGIKELGSQILKEHPVENTQLQNEKLYLYYLQNGRDMYVDQELDINRLSDYDVDHIVPQSFLKDDSIDNKVLTRSDKARGKSDNVPSEEVVKKMKNYWRQLLNAKLITQRKFDNLTKAERGGLSELDKAGFIKRQLVETRQITKHVAQILDSRMNTKYDENDKLIREVKVITLKSKLVSDFRKDFQFYKVREINNYHHAHDAYLNAVVGTALIKKYPKLESEFVYGDYKVYDVRKMIAKSEQEIGKATAKYFFYSNIMNFFKTEITLANGEIRKRPLIETNGETGEIVWDKGRDFATVRKVLSMPQVNIVKKTEVQTGGFSKESILPKRNSDKLIARKKDWDPKKYGGFDSPTVAYSVLVVAKVEKGKSKKLKSVKELLGITIMERSSFEKNPIDFLEAKGYKEVKKDLIIKLPKYSLFELENGRKRMLASAGELQKGNELALPSKYVNFLYLASHYEKLKGSPEDNEQKQLFVEQHKHYLDEIIEQISEFSKRVILADANLDKVLSAYNKHRDKPIREQAENIIHLFTLTNLGAPAAFKYFDTTIDRKRYTSTKEVLDATLIHQSITGLYETRIDLSQLGGDGGGGSPAPGGTLNIEDEYRLHETSKGPDVPLGSTWLSDFPQAWAETGGMGLAVRQAPLIIPLKATSTPVSIKQYPMSQEARLGIKPHIQRLLDQGILVPCQSPWNTPLLPVKKPGTNDYRPVQDLREVNKRVEDIHPTVPNPYNLLSGLPPSHQWYTVLDLKDAFFCLRLHPTSQSLFAFEWRDPEMGISGQLTWTRLPQGFKNSPTLFNEALHRDLADFRIQHPDLILLQYVDDLLLAATSELDCQQGTRALLQTLGDLGYRASAKKAQICQKQVKYLGYLLKEGQRWLTEARKETVMGQPTPKTPRQLREFLGTAGFCRLWIPGFAEMAAPLYPLTKPGTLFEWGPDQQKAYQEIKQALLTAPALGLPDLTKPFELFVDEKQGYAKGVLTQKLGPWRRPVAYLSKKLDPVAAGWPPCLRMVAAIAVLTKDAGKLTMGQPLVILAPHAVEALVKQPPDRWLSNARMTHYQALLLDTDRVQFGPIVALNPATLLPLPEEGLQHDCLDILAEAHGTRPDLTDQPLPDADHTWYTDGSSFLQEGQRKAGAAVTTETEVVWAKALPAGTSAQRAELIALTQALKMAEGKKLNVYTDSRYAFATAHIHGEIYRRRGWLTSEGKEIKNKDEILALLKALFLPKRLSIIHCPGHQKGNRAEARGNRMADQAAREVATRETPETSTLLAGKRTADGSEFEKRTADGSEFESPKKKAKVE

SEQ ID NO: 2482 - protein, 2090 aa, synthetic construct
MPAAKRVKLDGGDKKYSIGLDIGTNSVGWAVITDEYKVPSKKFKVLGNTDRHSIKKNLIGALLFDSGETAEATRLKRTARRRYTRRKNRICYLQEIFSNEMAKVDDSFFHRLEESFLVEEDKKHERHPIFGNIVDEVAYHEKYPTIYHLRKKLVDSTDKADLRLIYLALAHMIKFRGHFLIEGDLNPDNSDVDKLFIQLVQTYNQLFEENPINASGVDAKAILSARLSKSRRLENLIAQLPGEKKNGLFGNLIALSLGLTPNFKSNFDLAEDAKLQLSKDTYDDDLDNLLAQIGDQYADLFLAAKNLSDAILLSDILRVNTEITKAPLSASMIKRYDEHHQDLTLLKALVRQQLPEKYKEIFFDQSKNGYAGYIDGGASQEEFYKFIKPILEKMDGTEELLVKLNREDLLRKQRTFDNGSIPHQIHLGELHAILRRQEDFYPFLKDNREKIEKILTFRIPYYVGPLARGNSRFAWMTRKSEETITPWNFEEVVDKGASAQSFIERMTNFDKNLPNEKVLPKHSLLYEYFTVYNELTKVKYVTEGMRKPAFLSGEQKKAIVDLLFKTNRKVTVKQLKEDYFKKIECFDSVEISGVEDRFNASLGTYHDLLKIIKDKDFLDNEENEDILEDIVLTLTLFEDREMIEERLKTYAHLFDDKVMKQLKRRRYTGWGRLSRKLINGIRDKQSGKTILDFLKSDGFANRNFMQLIHDDSLTFKEDIQKAQVSGQGDSLHEHIANLAGSPAIKKGILQTVKVVDELVKVMGRHKPENIVIEMARENQTTQKGQKNSRERMKRIEEGIKELGSQILKEHPVENTQLQNEKLYLYYLQNGRDMYVDQELDINRLSDYDVDHIVPQSFLKDDSIDNKVLTRSDKARGKSDNVPSEEVVKKMKNYWRQLLNAKLITQRKFDNLTKAERGGLSELDKAGFIKRQLVETRQITKHVAQILDSRMNTKYDENDKLIREVKVITLKSKLVSDFRKDFQFYKVREINNYHHAHDAYLNAVVGTALIKKYPKLESEFVYGDYKVYDVRKMIAKSEQEIGKATAKYFFYSNIMNFFKTEITLANGEIRKRPLIETNGETGEIVWDKGRDFATVRKVLSMPQVNIVKKTEVQTGGFSKESILPKRNSDKLIARKKDWDPKKYGGFDSPTVAYSVLVVAKVEKGKSKKLKSVKELLGITIMERSSFEKNPIDFLEAKGYKEVKKDLIIKLPKYSLFELENGRKRMLASAGELQKGNELALPSKYVNFLYLASHYEKLKGSPEDNEQKQLFVEQHKHYLDEIIEQISEFSKRVILADANLDKVLSAYNKHRDKPIREQAENIIHLFTLTNLGAPAAFKYFDTTIDRKRYTSTKEVLDATLIHQSITGLYETRIDLSQLGGDGGGGGGSGGTLNIEDEYRLHETSKGPDVPLGSTWLSDFPQAWAETGGMGLAVRQAPLIIPLKATSTPVSIKQYPMSQEARLGIKPHIQRLLDQGILVPCQSPWNTPLLPVKKPGTNDYRPVQDLREVNKRVEDIHPTVPNPYNLLSGLPPSHQWYTVLDLKDAFFCLRLHPTSQSLFAFEWRDPEMGISGQLTWTRLPQGFKNSPTLFNEALHRDLADFRIQHPDLILLQYVDDLLLAATSELDCQQGTRALLQTLGDLGYRASAKKAQICQKQVKYLGYLLKEGQRWLTEARKETVMGQPTPKTPRQLREFLGTAGFCRLWIPGFAEMAAPLYPLTKPGTLFEWGPDQQKAYQEIKQALLTAPALGLPDLTKPFELFVDEKQGYAKGVLTQKLGPWRRPVAYLSKKLDPVAAGWPPCLRMVAAIAVLTKDAGKLTMGQPLVILAPHAVEALVKQPPDRWLSNARMTHYQALLLDTDRVQFGPIVALNPATLLPLPEEGLQHDCLDILAEAHGTRPDLTDQPLPDADHTWYTDGSSFLQEGQRKAGAAVTTETEVVWAKALPAGTSAQRAELIALTQALKMAEGKKLNVYTDSRYAFATAHIHGEIYRRRGWLTSEGKEIKNKDEILALLKALFLPKRLSIIHCPGHQKGNRAEARGNRMADQAAREVATRETPETSTLLAGKRTADGSEFEKRTADGSEFESPKKKAKVE

SEQ ID NO: 2483 - protein, 2096 aa, synthetic construct
MPAAKRVKLDGGDKKYSIGLDIGTNSVGWAVITDEYKVPSKKFKVLGNTDRHSIKKNLIGALLFDSGETAEATRLKRTARRRYTRRKNRICYLQEIFSNEMAKVDDSFFHRLEESFLVEEDKKHERHPIFGNIVDEVAYHEKYPTIYHLRKKLVDSTDKADLRLIYLALAHMIKFRGHFLIEGDLNPDNSDVDKLFIQLVQTYNQLFEENPINASGVDAKAILSARLSKSRRLENLIAQLPGEKKNGLFGNLIALSLGLTPNFKSNFDLAEDAKLQLSKDTYDDDLDNLLAQIGDQYADLFLAAKNLSDAILLSDILRVNTEITKAPLSASMIKRYDEHHQDLTLLKALVRQQLPEKYKEIFFDQSKNGYAGYIDGGASQEEFYKFIKPILEKMDGTEELLVKLNREDLLRKQRTFDNGSIPHQIHLGELHAILRRQEDFYPFLKDNREKIEKILTFRIPYYVGPLARGNSRFAWMTRKSEETITPWNFEEVVDKGASAQSFIERMTNFDKNLPNEKVLPKHSLLYEYFTVYNELTKVKYVTEGMRKPAFLSGEQKKAIVDLLFKTNRKVTVKQLKEDYFKKIECFDSVEISGVEDRFNASLGTYHDLLKIIKDKDFLDNEENEDILEDIVLTLTLFEDREMIEERLKTYAHLFDDKVMKQLKRRRYTGWGRLSRKLINGIRDKQSGKTILDFLKSDGFANRNFMQLIHDDSLTFKEDIQKAQVSGQGDSLHEHIANLAGSPAIKKGILQTVKVVDELVKVMGRHKPENIVIEMARENQTTQKGQKNSRERMKRIEEGIKELGSQILKEHPVENTQLQNEKLYLYYLQNGRDMYVDQELDINRLSDYDVDHIVPQSFLKDDSIDNKVLTRSDKARGKSDNVPSEEVVKKMKNYWRQLLNAKLITQRKFDNLTKAERGGLSELDKAGFIKRQLVETRQITKHVAQILDSRMNTKYDENDKLIREVKVITLKSKLVSDFRKDFQFYKVREINNYHHAHDAYLNAVVGTALIKKYPKLESEFVYGDYKVYDVRKMIAKSEQEIGKATAKYFFYSNIMNFFKTEITLANGEIRKRPLIETNGETGEIVWDKGRDFATVRKVLSMPQVNIVKKTEVQTGGFSKESILPKRNSDKLIARKKDWDPKKYGGFDSPTVAYSVLVVAKVEKGKSKKLKSVKELLGITIMERSSFEKNPIDFLEAKGYKEVKKDLIIKLPKYSLFELENGRKRMLASAGELQKGNELALPSKYVNFLYLASHYEKLKGSPEDNEQKQLFVEQHKHYLDEIIEQISEFSKRVILADANLDKVLSAYNKHRDKPIREQAENIIHLFTLTNLGAPAAFKYFDTTIDRKRYTSTKEVLDATLIHQSITGLYETRIDLSQLGGDGGEAAAKGGGGGSGGTLNIEDEYRLHETSKGPDVPLGSTWLSDFPQAWAETGGMGLAVRQAPLIIPLKATSTPVSIKQYPMSQEARLGIKPHIQRLLDQGILVPCQSPWNTPLLPVKKPGTNDYRPVQDLREVNKRVEDIHPTVPNPYNLLSGLPPSHQWYTVLDLKDAFFCLRLHPTSQSLFAFEWRDPEMGISGQLTWTRLPQGFKNSPTLFNEALHRDLADFRIQHPDLILLQYVDDLLLAATSELDCQQGTRALLQTLGDLGYRASAKKAQICQKQVKYLGYLLKEGQRWLTEARKETVMGQPTPKTPRQLREFLGTAGFCRLWIPGFAEMAAPLYPLTKPGTLFEWGPDQQKAYQEIKQALLTAPALGLPDLTKPFELFVDEKQGYAKGVLTQKLGPWRRPVAYLSKKLDPVAAGWPPCLRMVAAIAVLTKDAGKLTMGQPLVILAPHAVEALVKQPPDRWLSNARMTHYQALLLDTDRVQFGPIVALNPATLLPLPEEGLQHDCLDILAEAHGTRPDLTDQPLPDADHTWYTDGSSFLQEGQRKAGAAVTTETEVVWAKALPAGTSAQRAELIALTQALKMAEGKKLNVYTDSRYAFATAHIHGEIYRRRGWLTSEGKEIKNKDEILALLKALFLPKRLSIIHCPGHQKGNRAEARGNRMADQAAREVATRETPETSTLLAGKRTADGSEFEKRTADGSEFESPKKKAKVE

SEQ ID NO: 2484 - protein, 2095 aa, synthetic construct
MPAAKRVKLDGGDKKYSIGLDIGTNSVGWAVITDEYKVPSKKFKVLGNTDRHSIKKNLIGALLFDSGETAEATRLKRTARRRYTRRKNRICYLQEIFSNEMAKVDDSFFHRLEESFLVEEDKKHERHPIFGNIVDEVAYHEKYPTIYHLRKKLVDSTDKADLRLIYLALAHMIKFRGHFLIEGDLNPDNSDVDKLFIQLVQTYNQLFEENPINASGVDAKAILSARLSKSRRLENLIAQLPGEKKNGLFGNLIALSLGLTPNFKSNFDLAEDAKLQLSKDTYDDDLDNLLAQIGDQYADLFLAAKNLSDAILLSDILRVNTEITKAPLSASMIKRYDEHHQDLTLLKALVRQQLPEKYKEIFFDQSKNGYAGYIDGGASQEEFYKFIKPILEKMDGTEELLVKLNREDLLRKQRTFDNGSIPHQIHLGELHAILRRQEDFYPFLKDNREKIEKILTFRIPYYVGPLARGNSRFAWMTRKSEETITPWNFEEVVDKGASAQSFIERMTNFDKNLPNEKVLPKHSLLYEYFTVYNELTKVKYVTEGMRKPAFLSGEQKKAIVDLLFKTNRKVTVKQLKEDYFKKIECFDSVEISGVEDRFNASLGTYHDLLKIIKDKDFLDNEENEDILEDIVLTLTLFEDREMIEERLKTYAHLFDDKVMKQLKRRRYTGWGRLSRKLINGIRDKQSGKTILDFLKSDGFANRNFMQLIHDDSLTFKEDIQKAQVSGQGDSLHEHIANLAGSPAIKKGILQTVKVVDELVKVMGRHKPENIVIEMARENQTTQKGQKNSRERMKRIEEGIKELGSQILKEHPVENTQLQNEKLYLYYLQNGRDMYVDQELDINRLSDYDVDHIVPQSFLKDDSIDNKVLTRSDKARGKSDNVPSEEVVKKMKNYWRQLLNAKLITQRKFDNLTKAERGGLSELDKAGFIKRQLVETRQITKHVAQILDSRMNTKYDENDKLIREVKVITLKSKLVSDFRKDFQFYKVREINNYHHAHDAYLNAVVGTALIKKYPKLESEFVYGDYKVYDVRKMIAKSEQEIGKATAKYFFYSNIMNFFKTEITLANGEIRKRPLIETNGETGEIVWDKGRDFATVRKVLSMPQVNIVKKTEVQTGGFSKESILPKRNSDKLIARKKDWDPKKYGGFDSPTVAYSVLVVAKVEKGKSKKLKSVKELLGITIMERSSFEKNPIDFLEAKGYKEVKKDLIIKLPKYSLFELENGRKRMLASAGELQKGNELALPSKYVNFLYLASHYEKLKGSPEDNEQKQLFVEQHKHYLDEIIEQISEFSKRVILADANLDKVLSAYNKHRDKPIREQAENIIHLFTLTNLGAPAAFKYFDTTIDRKRYTSTKEVLDATLIHQSITGLYETRIDLSQLGGDGGEAAAKEAAAKGGTLNIEDEYRLHETSKGPDVPLGSTWLSDFPQAWAETGGMGLAVRQAPLIIPLKATSTPVSIKQYPMSQEARLGIKPHIQRLLDQGILVPCQSPWNTPLLPVKKPGTNDYRPVQDLREVNKRVEDIHPTVPNPYNLLSGLPPSHQWYTVLDLKDAFFCLRLHPTSQSLFAFEWRDPEMGISGQLTWTRLPQGFKNSPTLFNEALHRDLADFRIQHPDLILLQYVDDLLLAATSELDCQQGTRALLQTLGDLGYRASAKKAQICQKQVKYLGYLLKEGQRWLTEARKETVMGQPTPKTPRQLREFLGTAGFCRLWIPGFAEMAAPLYPLTKPGTLFEWGPDQQKAYQEIKQALLTAPALGLPDLTKPFELFVDEKQGYAKGVLTQKLGPWRRPVAYLSKKLDPVAAGWPPCLRMVAAIAVLTKDAGKLTMGQPLVILAPHAVEALVKQPPDRWLSNARMTHYQALLLDTDRVQFGPIVALNPATLLPLPEEGLQHDCLDILAEAHGTRPDLTDQPLPDADHTWYTDGSSFLQEGQRKAGAAVTTETEVVWAKALPAGTSAQRAELIALTQALKMAEGKKLNVYTDSRYAFATAHIHGEIYRRRGWLTSEGKEIKNKDEILALLKALFLPKRLSIIHCPGHQKGNRAEARGNRMADQAAREVATRETPETSTLLAGKRTADGSEFEKRTADGSEFESPKKKAKVE

SEQ ID NO: 2485 - protein, 2096 aa, synthetic construct
MPAAKRVKLDGGDKKYSIGLDIGTNSVGWAVITDEYKVPSKKFKVLGNTDRHSIKKNLIGALLFDSGETAEATRLKRTARRRYTRRKNRICYLQEIFSNEMAKVDDSFFHRLEESFLVEEDKKHERHPIFGNIVDEVAYHEKYPTIYHLRKKLVDSTDKADLRLIYLALAHMIKFRGHFLIEGDLNPDNSDVDKLFIQLVQTYNQLFEENPINASGVDAKAILSARLSKSRRLENLIAQLPGEKKNGLFGNLIALSLGLTPNFKSNFDLAEDAKLQLSKDTYDDDLDNLLAQIGDQYADLFLAAKNLSDAILLSDILRVNTEITKAPLSASMIKRYDEHHQDLTLLKALVRQQLPEKYKEIFFDQSKNGYAGYIDGGASQEEFYKFIKPILEKMDGTEELLVKLNREDLLRKQRTFDNGSIPHQIHLGELHAILRRQEDFYPFLKDNREKIEKILTFRIPYYVGPLARGNSRFAWMTRKSEETITPWNFEEVVDKGASAQSFIERMTNFDKNLPNEKVLPKHSLLYEYFTVYNELTKVKYVTEGMRKPAFLSGEQKKAIVDLLFKTNRKVTVKQLKEDYFKKIECFDSVEISGVEDRFNASLGTYHDLLKIIKDKDFLDNEENEDILEDIVLTLTLFEDREMIEERLKTYAHLFDDKVMKQLKRRRYTGWGRLSRKLINGIRDKQSGKTILDFLKSDGFANRNFMQLIHDDSLTFKEDIQKAQVSGQGDSLHEHIANLAGSPAIKKGILQTVKVVDELVKVMGRHKPENIVIEMARENQTTQKGQKNSRERMKRIEEGIKELGSQILKEHPVENTQLQNEKLYLYYLQNGRDMYVDQELDINRLSDYDVDHIVPQSFLKDDSIDNKVLTRSDKARGKSDNVPSEEVVKKMKNYWRQLLNAKLITQRKFDNLTKAERGGLSELDKAGFIKRQLVETRQITKHVAQILDSRMNTKYDENDKLIREVKVITLKSKLVSDFRKDFQFYKVREINNYHHAHDAYLNAVVGTALIKKYPKLESEFVYGDYKVYDVRKMIAKSEQEIGKATAKYFFYSNIMNFFKTEITLANGEIRKRPLIETNGETGEIVWDKGRDFATVRKVLSMPQVNIVKKTEVQTGGFSKESILPKRNSDKLIARKKDWDPKKYGGFDSPTVAYSVLVVAKVEKGKSKKLKSVKELLGITIMERSSFEKNPIDFLEAKGYKEVKKDLIIKLPKYSLFELENGRKRMLASAGELQKGNELALPSKYVNFLYLASHYEKLKGSPEDNEQKQLFVEQHKHYLDEIIEQISEFSKRVILADANLDKVLSAYNKHRDKPIREQAENIIHLFTLTNLGAPAAFKYFDTTIDRKRYTSTKEVLDATLIHQSITGLYETRIDLSQLGGDGGGSSEAAAKPAPGGTLNIEDEYRLHETSKGPDVPLGSTWLSDFPQAWAETGGMGLAVRQAPLIIPLKATSTPVSIKQYPMSQEARLGIKPHIQRLLDQGILVPCQSPWNTPLLPVKKPGTNDYRPVQDLREVNKRVEDIHPTVPNPYNLLSGLPPSHQWYTVLDLKDAFFCLRLHPTSQSLFAFEWRDPEMGISGQLTWTRLPQGFKNSPTLFNEALHRDLADFRIQHPDLILLQYVDDLLLAATSELDCQQGTRALLQTLGDLGYRASAKKAQICQKQVKYLGYLLKEGQRWLTEARKETVMGQPTPKTPRQLREFLGTAGFCRLWIPGFAEMAAPLYPLTKPGTLFEWGPDQQKAYQEIKQALLTAPALGLPDLTKPFELFVDEKQGYAKGVLTQKLGPWRRPVAYLSKKLDPVAAGWPPCLRMVAAIAVLTKDAGKLTMGQPLVILAPHAVEALVKQPPDRWLSNARMTHYQALLLDTDRVQFGPIVALNPATLLPLPEEGLQHDCLDILAEAHGTRPDLTDQPLPDADHTWYTDGSSFLQEGQRKAGAAVTTETEVVWAKALPAGTSAQRAELIALTQALKMAEGKKLNVYTDSRYAFATAHIHGEIYRRRGWLTSEGKEIKNKDEILALLKALFLPKRLSIIHCPGHQKGNRAEARGNRMADQAAREVATRETPETSTLLAGKRTADGSEFEKRTADGSEFESPKKKAKVE

SEQ ID NO: 2486 - protein, 2096 aa, synthetic construct
MPAAKRVKLDGGDKKYSIGLDIGTNSVGWAVITDEYKVPSKKFKVLGNTDRHSIKKNLIGALLFDSGETAEATRLKRTARRRYTRRKNRICYLQEIFSNEMAKVDDSFFHRLEESFLVEEDKKHERHPIFGNIVDEVAYHEKYPTIYHLRKKLVDSTDKADLRLIYLALAHMIKFRGHFLIEGDLNPDNSDVDKLFIQLVQTYNQLFEENPINASGVDAKAILSARLSKSRRLENLIAQLPGEKKNGLFGNLIALSLGLTPNFKSNFDLAEDAKLQLSKDTYDDDLDNLLAQIGDQYADLFLAAKNLSDAILLSDILRVNTEITKAPLSASMIKRYDEHHQDLTLLKALVRQQLPEKYKEIFFDQSKNGYAGYIDGGASQEEFYKFIKPILEKMDGTEELLVKLNREDLLRKQRTFDNGSIPHQIHLGELHAILRRQEDFYPFLKDNREKIEKILTFRIPYYVGPLARGNSRFAWMTRKSEETITPWNFEEVVDKGASAQSFIERMTNFDKNLPNEKVLPKHSLLYEYFTVYNELTKVKYVTEGMRKPAFLSGEQKKAIVDLLFKTNRKVTVKQLKEDYFKKIECFDSVEISGVEDRFNASLGTYHDLLKIIKDKDFLDNEENEDILEDIVLTLTLFEDREMIEERLKTYAHLFDDKVMKQLKRRRYTGWGRLSRKLINGIRDKQSGKTILDFLKSDGFANRNFMQLIHDDSLTFKEDIQKAQVSGQGDSLHEHIANLAGSPAIKKGILQTVKVVDELVKVMGRHKPENIVIEMARENQTTQKGQKNSRERMKRIEEGIKELGSQILKEHPVENTQLQNEKLYLYYLQNGRDMYVDQELDINRLSDYDVDHIVPQSFLKDDSIDNKVLTRSDKARGKSDNVPSEEVVKKMKNYWRQLLNAKLITQRKFDNLTKAERGGLSELDKAGFIKRQLVETRQITKHVAQILDSRMNTKYDENDKLIREVKVITLKSKLVSDFRKDFQFYKVREINNYHHAHDAYLNAVVGTALIKKYPKLESEFVYGDYKVYDVRKMIAKSEQEIGKATAKYFFYSNIMNFFKTEITLANGEIRKRPLIETNGETGEIVWDKGRDFATVRKVLSMPQVNIVKKTEVQTGGFSKESILPKRNSDKLIARKKDWDPKKYGGFDSPTVAYSVLVVAKVEKGKSKKLKSVKELLGITIMERSSFEKNPIDFLEAKGYKEVKKDLIIKLPKYSLFELENGRKRMLASAGELQKGNELALPSKYVNFLYLASHYEKLKGSPEDNEQKQLFVEQHKHYLDEIIEQISEFSKRVILADANLDKVLSAYNKHRDKPIREQAENIIHLFTLTNLGAPAAFKYFDTTIDRKRYTSTKEVLDATLIHQSITGLYETRIDLSQLGGDGGGGSEAAAKPAPGGTLNIEDEYRLHETSKGPDVPLGSTWLSDFPQAWAETGGMGLAVRQAPLIIPLKATSTPVSIKQYPMSQEARLGIKPHIQRLLDQGILVPCQSPWNTPLLPVKKPGTNDYRPVQDLREVNKRVEDIHPTVPNPYNLLSGLPPSHQWYTVLDLKDAFFCLRLHPTSQSLFAFEWRDPEMGISGQLTWTRLPQGFKNSPTLFNEALHRDLADFRIQHPDLILLQYVDDLLLAATSELDCQQGTRALLQTLGDLGYRASAKKAQICQKQVKYLGYLLKEGQRWLTEARKETVMGQPTPKTPRQLREFLGTAGFCRLWIPGFAEMAAPLYPLTKPGTLFEWGPDQQKAYQEIKQALLTAPALGLPDLTKPFELFVDEKQGYAKGVLTQKLGPWRRPVAYLSKKLDPVAAGWPPCLRMVAAIAVLTKDAGKLTMGQPLVILAPHAVEALVKQPPDRWLSNARMTHYQALLLDTDRVQFGPIVALNPATLLPLPEEGLQHDCLDILAEAHGTRPDLTDQPLPDADHTWYTDGSSFLQEGQRKAGAAVTTETEVVWAKALPAGTSAQRAELIALTQALKMAEGKKLNVYTDSRYAFATAHIHGEIYRRRGWLTSEGKEIKNKDEILALLKALFLPKRLSIIHCPGHQKGNRAEARGNRMADQAAREVATRETPETSTLLAGKRTADGSEFEKRTADGSEFESPKKKAKVE

SEQ ID NO: 2487 - protein, 2091 aa, synthetic construct
MPAAKRVKLDGGDKKYSIGLDIGTNSVGWAVITDEYKVPSKKFKVLGNTDRHSIKKNLIGALLFDSGETAEATRLKRTARRRYTRRKNRICYLQEIFSNEMAKVDDSFFHRLEESFLVEEDKKHERHPIFGNIVDEVAYHEKYPTIYHLRKKLVDSTDKADLRLIYLALAHMIKFRGHFLIEGDLNPDNSDVDKLFIQLVQTYNQLFEENPINASGVDAKAILSARLSKSRRLENLIAQLPGEKKNGLFGNLIALSLGLTPNFKSNFDLAEDAKLQLSKDTYDDDLDNLLAQIGDQYADLFLAAKNLSDAILLSDILRVNTEITKAPLSASMIKRYDEHHQDLTLLKALVRQQLPEKYKEIFFDQSKNGYAGYIDGGASQEEFYKFIKPILEKMDGTEELLVKLNREDLLRKQRTFDNGSIPHQIHLGELHAILRRQEDFYPFLKDNREKIEKILTFRIPYYVGPLARGNSRFAWMTRKSEETITPWNFEEVVDKGASAQSFIERMTNFDKNLPNEKVLPKHSLLYEYFTVYNELTKVKYVTEGMRKPAFLSGEQKKAIVDLLFKTNRKVTVKQLKEDYFKKIECFDSVEISGVEDRFNASLGTYHDLLKIIKDKDFLDNEENEDILEDIVLTLTLFEDREMIEERLKTYAHLFDDKVMKQLKRRRYTGWGRLSRKLINGIRDKQSGKTILDFLKSDGFANRNFMQLIHDDSLTFKEDIQKAQVSGQGDSLHEHIANLAGSPAIKKGILQTVKVVDELVKVMGRHKPENIVIEMARENQTTQKGQKNSRERMKRIEEGIKELGSQILKEHPVENTQLQNEKLYLYYLQNGRDMYVDQELDINRLSDYDVDHIVPQSFLKDDSIDNKVLTRSDKARGKSDNVPSEEVVKKMKNYWRQLLNAKLITQRKFDNLTKAERGGLSELDKAGFIKRQLVETRQITKHVAQILDSRMNTKYDENDKLIREVKVITLKSKLVSDFRKDFQFYKVREINNYHHAHDAYLNAVVGTALIKKYPKLESEFVYGDYKVYDVRKMIAKSEQEIGKATAKYFFYSNIMNFFKTEITLANGEIRKRPLIETNGETGEIVWDKGRDFATVRKVLSMPQVNIVKKTEVQTGGFSKESILPKRNSDKLIARKKDWDPKKYGGFDSPTVAYSVLVVAKVEKGKSKKLKSVKELLGITIMERSSFEKNPIDFLEAKGYKEVKKDLIIKLPKYSLFELENGRKRMLASAGELQKGNELALPSKYVNFLYLASHYEKLKGSPEDNEQKQLFVEQHKHYLDEIIEQISEFSKRVILADANLDKVLSAYNKHRDKPIREQAENIIHLFTLTNLGAPAAFKYFDTTIDRKRYTSTKEVLDATLIHQSITGLYETRIDLSQLGGDGGGGSGSSGGTLNIEDEYRLHETSKGPDVPLGSTWLSDFPQAWAETGGMGLAVRQAPLIIPLKATSTPVSIKQYPMSQEARLGIKPHIQRLLDQGILVPCQSPWNTPLLPVKKPGTNDYRPVQDLREVNKRVEDIHPTVPNPYNLLSGLPPSHQWYTVLDLKDAFFCLRLHPTSQSLFAFEWRDPEMGISGQLTWTRLPQGFKNSPTLFNEALHRDLADFRIQHPDLILLQYVDDLLLAATSELDCQQGTRALLQTLGDLGYRASAKKAQICQKQVKYLGYLLKEGQRWLTEARKETVMGQPTPKTPRQLREFLGTAGFCRLWIPGFAEMAAPLYPLTKPGTLFEWGPDQQKAYQEIKQALLTAPALGLPDLTKPFELFVDEKQGYAKGVLTQKLGPWRRPVAYLSKKLDPVAAGWPPCLRMVAAIAVLTKDAGKLTMGQPLVILAPHAVEALVKQPPDRWLSNARMTHYQALLLDTDRVQFGPIVALNPATLLPLPEEGLQHDCLDILAEAHGTRPDLTDQPLPDADHTWYTDGSSFLQEGQRKAGAAVTTETEVVWAKALPAGTSAQRAELIALTQALKMAEGKKLNVYTDSRYAFATAHIHGEIYRRRGWLTSEGKEIKNKDEILALLKALFLPKRLSIIHCPGHQKGNRAEARGNRMADQAAREVATRETPETSTLLAGKRTADGSEFEKRTADGSEFESPKKKAKVE

SEQ ID NO: 2488 - protein, 2096 aa, synthetic construct
MPAAKRVKLDGGDKKYSIGLDIGTNSVGWAVITDEYKVPSKKFKVLGNTDRHSIKKNLIGALLFDSGETAEATRLKRTARRRYTRRKNRICYLQEIFSNEMAKVDDSFFHRLEESFLVEEDKKHERHPIFGNIVDEVAYHEKYPTIYHLRKKLVDSTDKADLRLIYLALAHMIKFRGHFLIEGDLNPDNSDVDKLFIQLVQTYNQLFEENPINASGVDAKAILSARLSKSRRLENLIAQLPGEKKNGLFGNLIALSLGLTPNFKSNFDLAEDAKLQLSKDTYDDDLDNLLAQIGDQYADLFLAAKNLSDAILLSDILRVNTEITKAPLSASMIKRYDEHHQDLTLLKALVRQQLPEKYKEIFFDQSKNGYAGYIDGGASQEEFYKFIKPILEKMDGTEELLVKLNREDLLRKQRTFDNGSIPHQIHLGELHAILRRQEDFYPFLKDNREKIEKILTFRIPYYVGPLARGNSRFAWMTRKSEETITPWNFEEVVDKGASAQSFIERMTNFDKNLPNEKVLPKHSLLYEYFTVYNELTKVKYVTEGMRKPAFLSGEQKKAIVDLLFKTNRKVTVKQLKEDYFKKIECFDSVEISGVEDRFNASLGTYHDLLKIIKDKDFLDNEENEDILEDIVLTLTLFEDREMIEERLKTYAHLFDDKVMKQLKRRRYTGWGRLSRKLINGIRDKQSGKTILDFLKSDGFANRNFMQLIHDDSLTFKEDIQKAQVSGQGDSLHEHIANLAGSPAIKKGILQTVKVVDELVKVMGRHKPENIVIEMARENQTTQKGQKNSRERMKRIEEGIKELGSQILKEHPVENTQLQNEKLYLYYLQNGRDMYVDQELDINRLSDYDVDHIVPQSFLKDDSIDNKVLTRSDKARGKSDNVPSEEVVKKMKNYWRQLLNAKLITQRKFDNLTKAERGGLSELDKAGFIKRQLVETRQITKHVAQILDSRMNTKYDENDKLIREVKVITLKSKLVSDFRKDFQFYKVREINNYHHAHDAYLNAVVGTALIKKYPKLESEFVYGDYKVYDVRKMIAKSEQEIGKATAKYFFYSNIMNFFKTEITLANGEIRKRPLIETNGETGEIVWDKGRDFATVRKVLSMPQVNIVKKTEVQTGGFSKESILPKRNSDKLIARKKDWDPKKYGGFDSPTVAYSVLVVAKVEKGKSKKLKSVKELLGITIMERSSFEKNPIDFLEAKGYKEVKKDLIIKLPKYSLFELENGRKRMLASAGELQKGNELALPSKYVNFLYLASHYEKLKGSPEDNEQKQLFVEQHKHYLDEIIEQISEFSKRVILADANLDKVLSAYNKHRDKPIREQAENIIHLFTLTNLGAPAAFKYFDTTIDRKRYTSTKEVLDATLIHQSITGLYETRIDLSQLGGDGGGSSGGSEAAAKGGTLNIEDEYRLHETSKGPDVPLGSTWLSDFPQAWAETGGMGLAVRQAPLIIPLKATSTPVSIKQYPMSQEARLGIKPHIQRLLDQGILVPCQSPWNTPLLPVKKPGTNDYRPVQDLREVNKRVEDIHPTVPNPYNLLSGLPPSHQWYTVLDLKDAFFCLRLHPTSQSLFAFEWRDPEMGISGQLTWTRLPQGFKNSPTLFNEALHRDLADFRIQHPDLILLQYVDDLLLAATSELDCQQGTRALLQTLGDLGYRASAKKAQICQKQVKYLGYLLKEGQRWLTEARKETVMGQPTPKTPRQLREFLGTAGFCRLWIPGFAEMAAPLYPLTKPGTLFEWGPDQQKAYQEIKQALLTAPALGLPDLTKPFELFVDEKQGYAKGVLTQKLGPWRRPVAYLSKKLDPVAAGWPPCLRMVAAIAVLTKDAGKLTMGQPLVILAPHAVEALVKQPPDRWLSNARMTHYQALLLDTDRVQFGPIVALNPATLLPLPEEGLQHDCLDILAEAHGTRPDLTDQPLPDADHTWYTDGSSFLQEGQRKAGAAVTTETEVVWAKALPAGTSAQRAELIALTQALKMAEGKKLNVYTDSRYAFATAHIHGEIYRRRGWLTSEGKEIKNKDEILALLKALFLPKRLSIIHCPGHQKGNRAEARGNRMADQAAREVATRETPETSTLLAGKRTADGSEFEKRTADGSEFESPKKKAKVE

SEQ ID NO: 2489 - protein, 2101 aa, synthetic construct
MPAAKRVKLDGGDKKYSIGLDIGTNSVGWAVITDEYKVPSKKFKVLGNTDRHSIKKNLIGALLFDSGETAEATRLKRTARRRYTRRKNRICYLQEIFSNEMAKVDDSFFHRLEESFLVEEDKKHERHPIFGNIVDEVAYHEKYPTIYHLRKKLVDSTDKADLRLIYLALAHMIKFRGHFLIEGDLNPDNSDVDKLFIQLVQTYNQLFEENPINASGVDAKAILSARLSKSRRLENLIAQLPGEKKNGLFGNLIALSLGLTPNFKSNFDLAEDAKLQLSKDTYDDDLDNLLAQIGDQYADLFLAAKNLSDAILLSDILRVNTEITKAPLSASMIKRYDEHHQDLTLLKALVRQQLPEKYKEIFFDQSKNGYAGYIDGGASQEEFYKFIKPILEKMDGTEELLVKLNREDLLRKQRTFDNGSIPHQIHLGELHAILRRQEDFYPFLKDNREKIEKILTFRIPYYVGPLARGNSRFAWMTRKSEETITPWNFEEVVDKGASAQSFIERMTNFDKNLPNEKVLPKHSLLYEYFTVYNELTKVKYVTEGMRKPAFLSGEQKKAIVDLLFKTNRKVTVKQLKEDYFKKIECFDSVEISGVEDRFNASLGTYHDLLKIIKDKDFLDNEENEDILEDIVLTLTLFEDREMIEERLKTYAHLFDDKVMKQLKRRRYTGWGRLSRKLINGIRDKQSGKTILDFLKSDGFANRNFMQLIHDDSLTFKEDIQKAQVSGQGDSLHEHIANLAGSPAIKKGILQTVKVVDELVKVMGRHKPENIVIEMARENQTTQKGQKNSRERMKRIEEGIKELGSQILKEHPVENTQLQNEKLYLYYLQNGRDMYVDQELDINRLSDYDVDHIVPQSFLKDDSIDNKVLTRSDKARGKSDNVPSEEVVKKMKNYWRQLLNAKLITQRKFDNLTKAERGGLSELDKAGFIKRQLVETRQITKHVAQILDSRMNTKYDENDKLIREVKVITLKSKLVSDFRKDFQFYKVREINNYHHAHDAYLNAVVGTALIKKYPKLESEFVYGDYKVYDVRKMIAKSEQEIGKATAKYFFYSNIMNFFKTEITLANGEIRKRPLIETNGETGEIVWDKGRDFATVRKVLSMPQVNIVKKTEVQTGGFSKESILPKRNSDKLIARKKDWDPKKYGGFDSPTVAYSVLVVAKVEKGKSKKLKSVKELLGITIMERSSFEKNPIDFLEAKGYKEVKKDLIIKLPKYSLFELENGRKRMLASAGELQKGNELALPSKYVNFLYLASHYEKLKGSPEDNEQKQLFVEQHKHYLDEIIEQISEFSKRVILADANLDKVLSAYNKHRDKPIREQAENIIHLFTLTNLGAPAAFKYFDTTIDRKRYTSTKEVLDATLIHQSITGLYETRIDLSQLGGDGGSGSETPGTSESATPESGGTLNIEDEYRLHETSKGPDVPLGSTWLSDFPQAWAETGGMGLAVRQAPLIIPLKATSTPVSIKQYPMSQEARLGIKPHIQRLLDQGILVPCQSPWNTPLLPVKKPGTNDYRPVQDLREVNKRVEDIHPTVPNPYNLLSGLPPSHQWYTVLDLKDAFFCLRLHPTSQSLFAFEWRDPEMGISGQLTWTRLPQGFKNSPTLFNEALHRDLADFRIQHPDLILLQYVDDLLLAATSELDCQQGTRALLQTLGDLGYRASAKKAQICQKQVKYLGYLLKEGQRWLTEARKETVMGQPTPKTPRQLREFLGTAGFCRLWIPGFAEMAAPLYPLTKPGTLFEWGPDQQKAYQEIKQALLTAPALGLPDLTKPFELFVDEKQGYAKGVLTQKLGPWRRPVAYLSKKLDPVAAGWPPCLRMVAAIAVLTKDAGKLTMGQPLVILAPHAVEALVKQPPDRWLSNARMTHYQALLLDTDRVQFGPIVALNPATLLPLPEEGLQHDCLDILAEAHGTRPDLTDQPLPDADHTWYTDGSSFLQEGQRKAGAAVTTETEVVWAKALPAGTSAQRAELIALTQALKMAEGKKLNVYTDSRYAFATAHIHGEIYRRRGWLTSEGKEIKNKDEILALLKALFLPKRLSIIHCPGHQKGNRAEARGNRMADQAAREVATRETPETSTLLAGKRTADGSEFEKRTADGSEFESPKKKAKVE

SEQ ID NO: 2490 - protein, 2097 aa, synthetic construct
MPAAKRVKLDGGDKKYSIGLDIGTNSVGWAVITDEYKVPSKKFKVLGNTDRHSIKKNLIGALLFDSGETAEATRLKRTARRRYTRRKNRICYLQEIFSNEMAKVDDSFFHRLEESFLVEEDKKHERHPIFGNIVDEVAYHEKYPTIYHLRKKLVDSTDKADLRLIYLALAHMIKFRGHFLIEGDLNPDNSDVDKLFIQLVQTYNQLFEENPINASGVDAKAILSARLSKSRRLENLIAQLPGEKKNGLFGNLIALSLGLTPNFKSNFDLAEDAKLQLSKDTYDDDLDNLLAQIGDQYADLFLAAKNLSDAILLSDILRVNTEITKAPLSASMIKRYDEHHQDLTLLKALVRQQLPEKYKEIFFDQSKNGYAGYIDGGASQEEFYKFIKPILEKMDGTEELLVKLNREDLLRKQRTFDNGSIPHQIHLGELHAILRRQEDFYPFLKDNREKIEKILTFRIPYYVGPLARGNSRFAWMTRKSEETITPWNFEEVVDKGASAQSFIERMTNFDKNLPNEKVLPKHSLLYEYFTVYNELTKVKYVTEGMRKPAFLSGEQKKAIVDLLFKTNRKVTVKQLKEDYFKKIECFDSVEISGVEDRFNASLGTYHDLLKIIKDKDFLDNEENEDILEDIVLTLTLFEDREMIEERLKTYAHLFDDKVMKQLKRRRYTGWGRLSRKLINGIRDKQSGKTILDFLKSDGFANRNFMQLIHDDSLTFKEDIQKAQVSGQGDSLHEHIANLAGSPAIKKGILQTVKVVDELVKVMGRHKPENIVIEMARENQTTQKGQKNSRERMKRIEEGIKELGSQILKEHPVENTQLQNEKLYLYYLQNGRDMYVDQELDINRLSDYDVDHIVPQSFLKDDSIDNKVLTRSDKARGKSDNVPSEEVVKKMKNYWRQLLNAKLITQRKFDNLTKAERGGLSELDKAGFIKRQLVETRQITKHVAQILDSRMNTKYDENDKLIREVKVITLKSKLVSDFRKDFQFYKVREINNYHHAHDAYLNAVVGTALIKKYPKLESEFVYGDYKVYDVRKMIAKSEQEIGKATAKYFFYSNIMNFFKTEITLANGEIRKRPLIETNGETGEIVWDKGRDFATVRKVLSMPQVNIVKKTEVQTGGFSKESILPKRNSDKLIARKKDWDPKKYGGFDSPTVAYSVLVVAKVEKGKSKKLKSVKELLGITIMERSSFEKNPIDFLEAKGYKEVKKDLIIKLPKYSLFELENGRKRMLASAGELQKGNELALPSKYVNFLYLASHYEKLKGSPEDNEQKQLFVEQHKHYLDEIIEQISEFSKRVILADANLDKVLSAYNKHRDKPIREQAENIIHLFTLTNLGAPAAFKYFDTTIDRKRYTSTKEVLDATLIHQSITGLYETRIDLSQLGGDGGGSAGSAAGSGEFGGTLNIEDEYRLHETSKGPDVPLGSTWLSDFPQAWAETGGMGLAVRQAPLIIPLKATSTPVSIKQYPMSQEARLGIKPHIQRLLDQGILVPCQSPWNTPLLPVKKPGTNDYRPVQDLREVNKRVEDIHPTVPNPYNLLSGLPPSHQWYTVLDLKDAFFCLRLHPTSQSLFAFEWRDPEMGISGQLTWTRLPQGFKNSPTLFNEALHRDLADFRIQHPDLILLQYVDDLLLAATSELDCQQGTRALLQTLGDLGYRASAKKAQICQKQVKYLGYLLKEGQRWLTEARKETVMGQPTPKTPRQLREFLGTAGFCRLWIPGFAEMAAPLYPLTKPGTLFEWGPDQQKAYQEIKQALLTAPALGLPDLTKPFELFVDEKQGYAKGVLTQKLGPWRRPVAYLSKKLDPVAAGWPPCLRMVAAIAVLTKDAGKLTMGQPLVILAPHAVEALVKQPPDRWLSNARMTHYQALLLDTDRVQFGPIVALNPATLLPLPEEGLQHDCLDILAEAHGTRPDLTDQPLPDADHTWYTDGSSFLQEGQRKAGAAVTTETEVVWAKALPAGTSAQRAELIALTQALKMAEGKKLNVYTDSRYAFATAHIHGEIYRRRGWLTSEGKEIKNKDEILALLKALFLPKRLSIIHCPGHQKGNRAEARGNRMADQAAREVATRETPETSTLLAGKRTADGSEFEKRTADGSEFESPKKKAKVE

SEQ ID NO: 2491 - protein, 2094 aa, synthetic construct
MPAAKRVKLDGGDKKYSIGLDIGTNSVGWAVITDEYKVPSKKFKVLGNTDRHSIKKNLIGALLFDSGETAEATRLKRTARRRYTRRKNRICYLQEIFSNEMAKVDDSFFHRLEESFLVEEDKKHERHPIFGNIVDEVAYHEKYPTIYHLRKKLVDSTDKADLRLIYLALAHMIKFRGHFLIEGDLNPDNSDVDKLFIQLVQTYNQLFEENPINASGVDAKAILSARLSKSRRLENLIAQLPGEKKNGLFGNLIALSLGLTPNFKSNFDLAEDAKLQLSKDTYDDDLDNLLAQIGDQYADLFLAAKNLSDAILLSDILRVNTEITKAPLSASMIKRYDEHHQDLTLLKALVRQQLPEKYKEIFFDQSKNGYAGYIDGGASQEEFYKFIKPILEKMDGTEELLVKLNREDLLRKQRTFDNGSIPHQIHLGELHAILRRQEDFYPFLKDNREKIEKILTFRIPYYVGPLARGNSRFAWMTRKSEETITPWNFEEVVDKGASAQSFIERMTNFDKNLPNEKVLPKHSLLYEYFTVYNELTKVKYVTEGMRKPAFLSGEQKKAIVDLLFKTNRKVTVKQLKEDYFKKIECFDSVEISGVEDRFNASLGTYHDLLKIIKDKDFLDNEENEDILEDIVLTLTLFEDREMIEERLKTYAHLFDDKVMKQLKRRRYTGWGRLSRKLINGIRDKQSGKTILDFLKSDGFANRNFMQLIHDDSLTFKEDIQKAQVSGQGDSLHEHIANLAGSPAIKKGILQTVKVVDELVKVMGRHKPENIVIEMARENQTTQKGQKNSRERMKRIEEGIKELGSQILKEHPVENTQLQNEKLYLYYLQNGRDMYVDQELDINRLSDYDVDHIVPQSFLKDDSIDNKVLTRSDKARGKSDNVPSEEVVKKMKNYWRQLLNAKLITQRKFDNLTKAERGGLSELDKAGFIKRQLVETRQITKHVAQILDSRMNTKYDENDKLIREVKVITLKSKLVSDFRKDFQFYKVREINNYHHAHDAYLNAVVGTALIKKYPKLESEFVYGDYKVYDVRKMIAKSEQEIGKATAKYFFYSNIMNFFKTEITLANGEIRKRPLIETNGETGEIVWDKGRDFATVRKVLSMPQVNIVKKTEVQTGGFSKESILPKRNSDKLIARKKDWDPKKYGGFDSPTVAYSVLVVAKVEKGKSKKLKSVKELLGITIMERSSFEKNPIDFLEAKGYKEVKKDLIIKLPKYSLFELENGRKRMLASAGELQKGNELALPSKYVNFLYLASHYEKLKGSPEDNEQKQLFVEQHKHYLDEIIEQISEFSKRVILADANLDKVLSAYNKHRDKPIREQAENIIHLFTLTNLGAPAAFKYFDTTIDRKRYTSTKEVLDATLIHQSITGLYETRIDLSQLGGDGGGSSGGSPAPGGTLNIEDEYRLHETSKGPDVPLGSTWLSDFPQAWAETGGMGLAVRQAPLIIPLKATSTPVSIKQYPMSQEARLGIKPHIQRLLDQGILVPCQSPWNTPLLPVKKPGTNDYRPVQDLREVNKRVEDIHPTVPNPYNLLSGLPPSHQWYTVLDLKDAFFCLRLHPTSQSLFAFEWRDPEMGISGQLTWTRLPQGFKNSPTLFNEALHRDLADFRIQHPDLILLQYVDDLLLAATSELDCQQGTRALLQTLGDLGYRASAKKAQICQKQVKYLGYLLKEGQRWLTEARKETVMGQPTPKTPRQLREFLGTAGFCRLWIPGFAEMAAPLYPLTKPGTLFEWGPDQQKAYQEIKQALLTAPALGLPDLTKPFELFVDEKQGYAKGVLTQKLGPWRRPVAYLSKKLDPVAAGWPPCLRMVAAIAVLTKDAGKLTMGQPLVILAPHAVEALVKQPPDRWLSNARMTHYQALLLDTDRVQFGPIVALNPATLLPLPEEGLQHDCLDILAEAHGTRPDLTDQPLPDADHTWYTDGSSFLQEGQRKAGAAVTTETEVVWAKALPAGTSAQRAELIALTQALKMAEGKKLNVYTDSRYAFATAHIHGEIYRRRGWLTSEGKEIKNKDEILALLKALFLPKRLSIIHCPGHQKGNRAEARGNRMADQAAREVATRETPETSTLLAGKRTADGSEFEKRTADGSEFESPKKKAKVE

SEQ ID NO: 2492 - protein, 2091 aa, synthetic construct
MPAAKRVKLDGGDKKYSIGLDIGTNSVGWAVITDEYKVPSKKFKVLGNTDRHSIKKNLIGALLFDSGETAEATRLKRTARRRYTRRKNRICYLQEIFSNEMAKVDDSFFHRLEESFLVEEDKKHERHPIFGNIVDEVAYHEKYPTIYHLRKKLVDSTDKADLRLIYLALAHMIKFRGHFLIEGDLNPDNSDVDKLFIQLVQTYNQLFEENPINASGVDAKAILSARLSKSRRLENLIAQLPGEKKNGLFGNLIALSLGLTPNFKSNFDLAEDAKLQLSKDTYDDDLDNLLAQIGDQYADLFLAAKNLSDAILLSDILRVNTEITKAPLSASMIKRYDEHHQDLTLLKALVRQQLPEKYKEIFFDQSKNGYAGYIDGGASQEEFYKFIKPILEKMDGTEELLVKLNREDLLRKQRTFDNGSIPHQIHLGELHAILRRQEDFYPFLKDNREKIEKILTFRIPYYVGPLARGNSRFAWMTRKSEETITPWNFEEVVDKGASAQSFIERMTNFDKNLPNEKVLPKHSLLYEYFTVYNELTKVKYVTEGMRKPAFLSGEQKKAIVDLLFKTNRKVTVKQLKEDYFKKIECFDSVEISGVEDRFNASLGTYHDLLKIIKDKDFLDNEENEDILEDIVLTLTLFEDREMIEERLKTYAHLFDDKVMKQLKRRRYTGWGRLSRKLINGIRDKQSGKTILDFLKSDGFANRNFMQLIHDDSLTFKEDIQKAQVSGQGDSLHEHIANLAGSPAIKKGILQTVKVVDELVKVMGRHKPENIVIEMARENQTTQKGQKNSRERMKRIEEGIKELGSQILKEHPVENTQLQNEKLYLYYLQNGRDMYVDQELDINRLSDYDVDHIVPQSFLKDDSIDNKVLTRSDKARGKSDNVPSEEVVKKMKNYWRQLLNAKLITQRKFDNLTKAERGGLSELDKAGFIKRQLVETRQITKHVAQILDSRMNTKYDENDKLIREVKVITLKSKLVSDFRKDFQFYKVREINNYHHAHDAYLNAVVGTALIKKYPKLESEFVYGDYKVYDVRKMIAKSEQEIGKATAKYFFYSNIMNFFKTEITLANGEIRKRPLIETNGETGEIVWDKGRDFATVRKVLSMPQVNIVKKTEVQTGGFSKESILPKRNSDKLIARKKDWDPKKYGGFDSPTVAYSVLVVAKVEKGKSKKLKSVKELLGITIMERSSFEKNPIDFLEAKGYKEVKKDLIIKLPKYSLFELENGRKRMLASAGELQKGNELALPSKYVNFLYLASHYEKLKGSPEDNEQKQLFVEQHKHYLDEIIEQISEFSKRVILADANLDKVLSAYNKHRDKPIREQAENIIHLFTLTNLGAPAAFKYFDTTIDRKRYTSTKEVLDATLIHQSITGLYETRIDLSQLGGDGGPAPGGGGGTLNIEDEYRLHETSKGPDVPLGSTWLSDFPQAWAETGGMGLAVRQAPLIIPLKATSTPVSIKQYPMSQEARLGIKPHIQRLLDQGILVPCQSPWNTPLLPVKKPGTNDYRPVQDLREVNKRVEDIHPTVPNPYNLLSGLPPSHQWYTVLDLKDAFFCLRLHPTSQSLFAFEWRDPEMGISGQLTWTRLPQGFKNSPTLFNEALHRDLADFRIQHPDLILLQYVDDLLLAATSELDCQQGTRALLQTLGDLGYRASAKKAQICQKQVKYLGYLLKEGQRWLTEARKETVMGQPTPKTPRQLREFLGTAGFCRLWIPGFAEMAAPLYPLTKPGTLFEWGPDQQKAYQEIKQALLTAPALGLPDLTKPFELFVDEKQGYAKGVLTQKLGPWRRPVAYLSKKLDPVAAGWPPCLRMVAAIAVLTKDAGKLTMGQPLVILAPHAVEALVKQPPDRWLSNARMTHYQALLLDTDRVQFGPIVALNPATLLPLPEEGLQHDCLDILAEAHGTRPDLTDQPLPDADHTWYTDGSSFLQEGQRKAGAAVTTETEVVWAKALPAGTSAQRAELIALTQALKMAEGKKLNVYTDSRYAFATAHIHGEIYRRRGWLTSEGKEIKNKDEILALLKALFLPKRLSIIHCPGHQKGNRAEARGNRMADQAAREVATRETPETSTLLAGKRTADGSEFEKRTADGSEFESPKKKAKVE

SEQ ID NO: 2493 - protein, 2094 aa, synthetic construct
MPAAKRVKLDGGDKKYSIGLDIGTNSVGWAVITDEYKVPSKKFKVLGNTDRHSIKKNLIGALLFDSGETAEATRLKRTARRRYTRRKNRICYLQEIFSNEMAKVDDSFFHRLEESFLVEEDKKHERHPIFGNIVDEVAYHEKYPTIYHLRKKLVDSTDKADLRLIYLALAHMIKFRGHFLIEGDLNPDNSDVDKLFIQLVQTYNQLFEENPINASGVDAKAILSARLSKSRRLENLIAQLPGEKKNGLFGNLIALSLGLTPNFKSNFDLAEDAKLQLSKDTYDDDLDNLLAQIGDQYADLFLAAKNLSDAILLSDILRVNTEITKAPLSASMIKRYDEHHQDLTLLKALVRQQLPEKYKEIFFDQSKNGYAGYIDGGASQEEFYKFIKPILEKMDGTEELLVKLNREDLLRKQRTFDNGSIPHQIHLGELHAILRRQEDFYPFLKDNREKIEKILTFRIPYYVGPLARGNSRFAWMTRKSEETITPWNFEEVVDKGASAQSFIERMTNFDKNLPNEKVLPKHSLLYEYFTVYNELTKVKYVTEGMRKPAFLSGEQKKAIVDLLFKTNRKVTVKQLKEDYFKKIECFDSVEISGVEDRFNASLGTYHDLLKIIKDKDFLDNEENEDILEDIVLTLTLFEDREMIEERLKTYAHLFDDKVMKQLKRRRYTGWGRLSRKLINGIRDKQSGKTILDFLKSDGFANRNFMQLIHDDSLTFKEDIQKAQVSGQGDSLHEHIANLAGSPAIKKGILQTVKVVDELVKVMGRHKPENIVIEMARENQTTQKGQKNSRERMKRIEEGIKELGSQILKEHPVENTQLQNEKLYLYYLQNGRDMYVDQELDINRLSDYDVDHIVPQSFLKDDSIDNKVLTRSDKARGKSDNVPSEEVVKKMKNYWRQLLNAKLITQRKFDNLTKAERGGLSELDKAGFIKRQLVETRQITKHVAQILDSRMNTKYDENDKLIREVKVITLKSKLVSDFRKDFQFYKVREINNYHHAHDAYLNAVVGTALIKKYPKLESEFVYGDYKVYDVRKMIAKSEQEIGKATAKYFFYSNIMNFFKTEITLANGEIRKRPLIETNGETGEIVWDKGRDFATVRKVLSMPQVNIVKKTEVQTGGFSKESILPKRNSDKLIARKKDWDPKKYGGFDSPTVAYSVLVVAKVEKGKSKKLKSVKELLGITIMERSSFEKNPIDFLEAKGYKEVKKDLIIKLPKYSLFELENGRKRMLASAGELQKGNELALPSKYVNFLYLASHYEKLKGSPEDNEQKQLFVEQHKHYLDEIIEQISEFSKRVILADANLDKVLSAYNKHRDKPIREQAENIIHLFTLTNLGAPAAFKYFDTTIDRKRYTSTKEVLDATLIHQSITGLYETRIDLSQLGGDGGPAPGGSGGGGGTLNIEDEYRLHETSKGPDVPLGSTWLSDFPQAWAETGGMGLAVRQAPLIIPLKATSTPVSIKQYPMSQEARLGIKPHIQRLLDQGILVPCQSPWNTPLLPVKKPGTNDYRPVQDLREVNKRVEDIHPTVPNPYNLLSGLPPSHQWYTVLDLKDAFFCLRLHPTSQSLFAFEWRDPEMGISGQLTWTRLPQGFKNSPTLFNEALHRDLADFRIQHPDLILLQYVDDLLLAATSELDCQQGTRALLQTLGDLGYRASAKKAQICQKQVKYLGYLLKEGQRWLTEARKETVMGQPTPKTPRQLREFLGTAGFCRLWIPGFAEMAAPLYPLTKPGTLFEWGPDQQKAYQEIKQALLTAPALGLPDLTKPFELFVDEKQGYAKGVLTQKLGPWRRPVAYLSKKLDPVAAGWPPCLRMVAAIAVLTKDAGKLTMGQPLVILAPHAVEALVKQPPDRWLSNARMTHYQALLLDTDRVQFGPIVALNPATLLPLPEEGLQHDCLDILAEAHGTRPDLTDQPLPDADHTWYTDGSSFLQEGQRKAGAAVTTETEVVWAKALPAGTSAQRAELIALTQALKMAEGKKLNVYTDSRYAFATAHIHGEIYRRRGWLTSEGKEIKNKDEILALLKALFLPKRLSIIHCPGHQKGNRAEARGNRMADQAAREVATRETPETSTLLAGKRTADGSEFEKRTADGSEFESPKKKAKVE

SEQ ID NO: 2494 - protein, 2096 aa, synthetic construct
MPAAKRVKLDGGDKKYSIGLDIGTNSVGWAVITDEYKVPSKKFKVLGNTDRHSIKKNLIGALLFDSGETAEATRLKRTARRRYTRRKNRICYLQEIFSNEMAKVDDSFFHRLEESFLVEEDKKHERHPIFGNIVDEVAYHEKYPTIYHLRKKLVDSTDKADLRLIYLALAHMIKFRGHFLIEGDLNPDNSDVDKLFIQLVQTYNQLFEENPINASGVDAKAILSARLSKSRRLENLIAQLPGEKKNGLFGNLIALSLGLTPNFKSNFDLAEDAKLQLSKDTYDDDLDNLLAQIGDQYADLFLAAKNLSDAILLSDILRVNTEITKAPLSASMIKRYDEHHQDLTLLKALVRQQLPEKYKEIFFDQSKNGYAGYIDGGASQEEFYKFIKPILEKMDGTEELLVKLNREDLLRKQRTFDNGSIPHQIHLGELHAILRRQEDFYPFLKDNREKIEKILTFRIPYYVGPLARGNSRFAWMTRKSEETITPWNFEEVVDKGASAQSFIERMTNFDKNLPNEKVLPKHSLLYEYFTVYNELTKVKYVTEGMRKPAFLSGEQKKAIVDLLFKTNRKVTVKQLKEDYFKKIECFDSVEISGVEDRFNASLGTYHDLLKIIKDKDFLDNEENEDILEDIVLTLTLFEDREMIEERLKTYAHLFDDKVMKQLKRRRYTGWGRLSRKLINGIRDKQSGKTILDFLKSDGFANRNFMQLIHDDSLTFKEDIQKAQVSGQGDSLHEHIANLAGSPAIKKGILQTVKVVDELVKVMGRHKPENIVIEMARENQTTQKGQKNSRERMKRIEEGIKELGSQILKEHPVENTQLQNEKLYLYYLQNGRDMYVDQELDINRLSDYDVDHIVPQSFLKDDSIDNKVLTRSDKARGKSDNVPSEEVVKKMKNYWRQLLNAKLITQRKFDNLTKAERGGLSELDKAGFIKRQLVETRQITKHVAQILDSRMNTKYDENDKLIREVKVITLKSKLVSDFRKDFQFYKVREINNYHHAHDAYLNAVVGTALIKKYPKLESEFVYGDYKVYDVRKMIAKSEQEIGKATAKYFFYSNIMNFFKTEITLANGEIRKRPLIETNGETGEIVWDKGRDFATVRKVLSMPQVNIVKKTEVQTGGFSKESILPKRNSDKLIARKKDWDPKKYGGFDSPTVAYSVLVVAKVEKGKSKKLKSVKELLGITIMERSSFEKNPIDFLEAKGYKEVKKDLIIKLPKYSLFELENGRKRMLASAGELQKGNELALPSKYVNFLYLASHYEKLKGSPEDNEQKQLFVEQHKHYLDEIIEQISEFSKRVILADANLDKVLSAYNKHRDKPIREQAENIIHLFTLTNLGAPAAFKYFDTTIDRKRYTSTKEVLDATLIHQSITGLYETRIDLSQLGGDGGPAPEAAAKGGGGGTLNIEDEYRLHETSKGPDVPLGSTWLSDFPQAWAETGGMGLAVRQAPLIIPLKATSTPVSIKQYPMSQEARLGIKPHIQRLLDQGILVPCQSPWNTPLLPVKKPGTNDYRPVQDLREVNKRVEDIHPTVPNPYNLLSGLPPSHQWYTVLDLKDAFFCLRLHPTSQSLFAFEWRDPEMGISGQLTWTRLPQGFKNSPTLFNEALHRDLADFRIQHPDLILLQYVDDLLLAATSELDCQQGTRALLQTLGDLGYRASAKKAQICQKQVKYLGYLLKEGQRWLTEARKETVMGQPTPKTPRQLREFLGTAGFCRLWIPGFAEMAAPLYPLTKPGTLFEWGPDQQKAYQEIKQALLTAPALGLPDLTKPFELFVDEKQGYAKGVLTQKLGPWRRPVAYLSKKLDPVAAGWPPCLRMVAAIAVLTKDAGKLTMGQPLVILAPHAVEALVKQPPDRWLSNARMTHYQALLLDTDRVQFGPIVALNPATLLPLPEEGLQHDCLDILAEAHGTRPDLTDQPLPDADHTWYTDGSSFLQEGQRKAGAAVTTETEVVWAKALPAGTSAQRAELIALTQALKMAEGKKLNVYTDSRYAFATAHIHGEIYRRRGWLTSEGKEIKNKDEILALLKALFLPKRLSIIHCPGHQKGNRAEARGNRMADQAAREVATRETPETSTLLAGKRTADGSEFEKRTADGSEFESPKKKAKVE

SEQ ID NO: 2495 - protein, 2096 aa, synthetic construct
MPAAKRVKLDGGDKKYSIGLDIGTNSVGWAVITDEYKVPSKKFKVLGNTDRHSIKKNLIGALLFDSGETAEATRLKRTARRRYTRRKNRICYLQEIFSNEMAKVDDSFFHRLEESFLVEEDKKHERHPIFGNIVDEVAYHEKYPTIYHLRKKLVDSTDKADLRLIYLALAHMIKFRGHFLIEGDLNPDNSDVDKLFIQLVQTYNQLFEENPINASGVDAKAILSARLSKSRRLENLIAQLPGEKKNGLFGNLIALSLGLTPNFKSNFDLAEDAKLQLSKDTYDDDLDNLLAQIGDQYADLFLAAKNLSDAILLSDILRVNTEITKAPLSASMIKRYDEHHQDLTLLKALVRQQLPEKYKEIFFDQSKNGYAGYIDGGASQEEFYKFIKPILEKMDGTEELLVKLNREDLLRKQRTFDNGSIPHQIHLGELHAILRRQEDFYPFLKDNREKIEKILTFRIPYYVGPLARGNSRFAWMTRKSEETITPWNFEEVVDKGASAQSFIERMTNFDKNLPNEKVLPKHSLLYEYFTVYNELTKVKYVTEGMRKPAFLSGEQKKAIVDLLFKTNRKVTVKQLKEDYFKKIECFDSVEISGVEDRFNASLGTYHDLLKIIKDKDFLDNEENEDILEDIVLTLTLFEDREMIEERLKTYAHLFDDKVMKQLKRRRYTGWGRLSRKLINGIRDKQSGKTILDFLKSDGFANRNFMQLIHDDSLTFKEDIQKAQVSGQGDSLHEHIANLAGSPAIKKGILQTVKVVDELVKVMGRHKPENIVIEMARENQTTQKGQKNSRERMKRIEEGIKELGSQILKEHPVENTQLQNEKLYLYYLQNGRDMYVDQELDINRLSDYDVDHIVPQSFLKDDSIDNKVLTRSDKARGKSDNVPSEEVVKKMKNYWRQLLNAKLITQRKFDNLTKAERGGLSELDKAGFIKRQLVETRQITKHVAQILDSRMNTKYDENDKLIREVKVITLKSKLVSDFRKDFQFYKVREINNYHHAHDAYLNAVVGTALIKKYPKLESEFVYGDYKVYDVRKMIAKSEQEIGKATAKYFFYSNIMNFFKTEITLANGEIRKRPLIETNGETGEIVWDKGRDFATVRKVLSMPQVNIVKKTEVQTGGFSKESILPKRNSDKLIARKKDWDPKKYGGFDSPTVAYSVLVVAKVEKGKSKKLKSVKELLGITIMERSSFEKNPIDFLEAKGYKEVKKDLIIKLPKYSLFELENGRKRMLASAGELQKGNELALPSKYVNFLYLASHYEKLKGSPEDNEQKQLFVEQHKHYLDEIIEQISEFSKRVILADANLDKVLSAYNKHRDKPIREQAENIIHLFTLTNLGAPAAFKYFDTTIDRKRYTSTKEVLDATLIHQSITGLYETRIDLSQLGGDGGEAAAKPAPGGSGGTLNIEDEYRLHETSKGPDVPLGSTWLSDFPQAWAETGGMGLAVRQAPLIIPLKATSTPVSIKQYPMSQEARLGIKPHIQRLLDQGILVPCQSPWNTPLLPVKKPGTNDYRPVQDLREVNKRVEDIHPTVPNPYNLLSGLPPSHQWYTVLDLKDAFFCLRLHPTSQSLFAFEWRDPEMGISGQLTWTRLPQGFKNSPTLFNEALHRDLADFRIQHPDLILLQYVDDLLLAATSELDCQQGTRALLQTLGDLGYRASAKKAQICQKQVKYLGYLLKEGQRWLTEARKETVMGQPTPKTPRQLREFLGTAGFCRLWIPGFAEMAAPLYPLTKPGTLFEWGPDQQKAYQEIKQALLTAPALGLPDLTKPFELFVDEKQGYAKGVLTQKLGPWRRPVAYLSKKLDPVAAGWPPCLRMVAAIAVLTKDAGKLTMGQPLVILAPHAVEALVKQPPDRWLSNARMTHYQALLLDTDRVQFGPIVALNPATLLPLPEEGLQHDCLDILAEAHGTRPDLTDQPLPDADHTWYTDGSSFLQEGQRKAGAAVTTETEVVWAKALPAGTSAQRAELIALTQALKMAEGKKLNVYTDSRYAFATAHIHGEIYRRRGWLTSEGKEIKNKDEILALLKALFLPKRLSIIHCPGHQKGNRAEARGNRMADQAAREVATRETPETSTLLAGKRTADGSEFEKRTADGSEFESPKKKAKVE

SEQ ID NO: 2496 - protein, 2094 aa, synthetic construct
MPAAKRVKLDGGDKKYSIGLDIGTNSVGWAVITDEYKVPSKKFKVLGNTDRHSIKKNLIGALLFDSGETAEATRLKRTARRRYTRRKNRICYLQEIFSNEMAKVDDSFFHRLEESFLVEEDKKHERHPIFGNIVDEVAYHEKYPTIYHLRKKLVDSTDKADLRLIYLALAHMIKFRGHFLIEGDLNPDNSDVDKLFIQLVQTYNQLFEENPINASGVDAKAILSARLSKSRRLENLIAQLPGEKKNGLFGNLIALSLGLTPNFKSNFDLAEDAKLQLSKDTYDDDLDNLLAQIGDQYADLFLAAKNLSDAILLSDILRVNTEITKAPLSASMIKRYDEHHQDLTLLKALVRQQLPEKYKEIFFDQSKNGYAGYIDGGASQEEFYKFIKPILEKMDGTEELLVKLNREDLLRKQRTFDNGSIPHQIHLGELHAILRRQEDFYPFLKDNREKIEKILTFRIPYYVGPLARGNSRFAWMTRKSEETITPWNFEEVVDKGASAQSFIERMTNFDKNLPNEKVLPKHSLLYEYFTVYNELTKVKYVTEGMRKPAFLSGEQKKAIVDLLFKTNRKVTVKQLKEDYFKKIECFDSVEISGVEDRFNASLGTYHDLLKIIKDKDFLDNEENEDILEDIVLTLTLFEDREMIEERLKTYAHLFDDKVMKQLKRRRYTGWGRLSRKLINGIRDKQSGKTILDFLKSDGFANRNFMQLIHDDSLTFKEDIQKAQVSGQGDSLHEHIANLAGSPAIKKGILQTVKVVDELVKVMGRHKPENIVIEMARENQTTQKGQKNSRERMKRIEEGIKELGSQILKEHPVENTQLQNEKLYLYYLQNGRDMYVDQELDINRLSDYDVDHIVPQSFLKDDSIDNKVLTRSDKARGKSDNVPSEEVVKKMKNYWRQLLNAKLITQRKFDNLTKAERGGLSELDKAGFIKRQLVETRQITKHVAQILDSRMNTKYDENDKLIREVKVITLKSKLVSDFRKDFQFYKVREINNYHHAHDAYLNAVVGTALIKKYPKLESEFVYGDYKVYDVRKMIAKSEQEIGKATAKYFFYSNIMNFFKTEITLANGEIRKRPLIETNGETGEIVWDKGRDFATVRKVLSMPQVNIVKKTEVQTGGFSKESILPKRNSDKLIARKKDWDPKKYGGFDSPTVAYSVLVVAKVEKGKSKKLKSVKELLGITIMERSSFEKNPIDFLEAKGYKEVKKDLIIKLPKYSLFELENGRKRMLASAGELQKGNELALPSKYVNFLYLASHYEKLKGSPEDNEQKQLFVEQHKHYLDEIIEQISEFSKRVILADANLDKVLSAYNKHRDKPIREQAENIIHLFTLTNLGAPAAFKYFDTTIDRKRYTSTKEVLDATLIHQSITGLYETRIDLSQLGGDGGGGGPAPGGSGGTLNIEDEYRLHETSKGPDVPLGSTWLSDFPQAWAETGGMGLAVRQAPLIIPLKATSTPVSIKQYPMSQEARLGIKPHIQRLLDQGILVPCQSPWNTPLLPVKKPGTNDYRPVQDLREVNKRVEDIHPTVPNPYNLLSGLPPSHQWYTVLDLKDAFFCLRLHPTSQSLFAFEWRDPEMGISGQLTWTRLPQGFKNSPTLFNEALHRDLADFRIQHPDLILLQYVDDLLLAATSELDCQQGTRALLQTLGDLGYRASAKKAQICQKQVKYLGYLLKEGQRWLTEARKETVMGQPTPKTPRQLREFLGTAGFCRLWIPGFAEMAAPLYPLTKPGTLFEWGPDQQKAYQEIKQALLTAPALGLPDLTKPFELFVDEKQGYAKGVLTQKLGPWRRPVAYLSKKLDPVAAGWPPCLRMVAAIAVLTKDAGKLTMGQPLVILAPHAVEALVKQPPDRWLSNARMTHYQALLLDTDRVQFGPIVALNPATLLPLPEEGLQHDCLDILAEAHGTRPDLTDQPLPDADHTWYTDGSSFLQEGQRKAGAAVTTETEVVWAKALPAGTSAQRAELIALTQALKMAEGKKLNVYTDSRYAFATAHIHGEIYRRRGWLTSEGKEIKNKDEILALLKALFLPKRLSIIHCPGHQKGNRAEARGNRMADQAAREVATRETPETSTLLAGKRTADGSEFEKRTADGSEFESPKKKAKVE

SEQ ID NO: 2497 - protein, 2091 aa, synthetic construct
MPAAKRVKLDGGDKKYSIGLDIGTNSVGWAVITDEYKVPSKKFKVLGNTDRHSIKKNLIGALLFDSGETAEATRLKRTARRRYTRRKNRICYLQEIFSNEMAKVDDSFFHRLEESFLVEEDKKHERHPIFGNIVDEVAYHEKYPTIYHLRKKLVDSTDKADLRLIYLALAHMIKFRGHFLIEGDLNPDNSDVDKLFIQLVQTYNQLFEENPINASGVDAKAILSARLSKSRRLENLIAQLPGEKKNGLFGNLIALSLGLTPNFKSNFDLAEDAKLQLSKDTYDDDLDNLLAQIGDQYADLFLAAKNLSDAILLSDILRVNTEITKAPLSASMIKRYDEHHQDLTLLKALVRQQLPEKYKEIFFDQSKNGYAGYIDGGASQEEFYKFIKPILEKMDGTEELLVKLNREDLLRKQRTFDNGSIPHQIHLGELHAILRRQEDFYPFLKDNREKIEKILTFRIPYYVGPLARGNSRFAWMTRKSEETITPWNFEEVVDKGASAQSFIERMTNFDKNLPNEKVLPKHSLLYEYFTVYNELTKVKYVTEGMRKPAFLSGEQKKAIVDLLFKTNRKVTVKQLKEDYFKKIECFDSVEISGVEDRFNASLGTYHDLLKIIKDKDFLDNEENEDILEDIVLTLTLFEDREMIEERLKTYAHLFDDKVMKQLKRRRYTGWGRLSRKLINGIRDKQSGKTILDFLKSDGFANRNFMQLIHDDSLTFKEDIQKAQVSGQGDSLHEHIANLAGSPAIKKGILQTVKVVDELVKVMGRHKPENIVIEMARENQTTQKGQKNSRERMKRIEEGIKELGSQILKEHPVENTQLQNEKLYLYYLQNGRDMYVDQELDINRLSDYDVDHIVPQSFLKDDSIDNKVLTRSDKARGKSDNVPSEEVVKKMKNYWRQLLNAKLITQRKFDNLTKAERGGLSELDKAGFIKRQLVETRQITKHVAQILDSRMNTKYDENDKLIREVKVITLKSKLVSDFRKDFQFYKVREINNYHHAHDAYLNAVVGTALIKKYPKLESEFVYGDYKVYDVRKMIAKSEQEIGKATAKYFFYSNIMNFFKTEITLANGEIRKRPLIETNGETGEIVWDKGRDFATVRKVLSMPQVNIVKKTEVQTGGFSKESILPKRNSDKLIARKKDWDPKKYGGFDSPTVAYSVLVVAKVEKGKSKKLKSVKELLGITIMERSSFEKNPIDFLEAKGYKEVKKDLIIKLPKYSLFELENGRKRMLASAGELQKGNELALPSKYVNFLYLASHYEKLKGSPEDNEQKQLFVEQHKHYLDEIIEQISEFSKRVILADANLDKVLSAYNKHRDKPIREQAENIIHLFTLTNLGAPAAFKYFDTTIDRKRYTSTKEVLDATLIHQSITGLYETRIDLSQLGGDGGPAPGGSGGTLNIEDEYRLHETSKGPDVPLGSTWLSDFPQAWAETGGMGLAVRQAPLIIPLKATSTPVSIKQYPMSQEARLGIKPHIQRLLDQGILVPCQSPWNTPLLPVKKPGTNDYRPVQDLREVNKRVEDIHPTVPNPYNLLSGLPPSHQWYTVLDLKDAFFCLRLHPTSQSLFAFEWRDPEMGISGQLTWTRLPQGFKNSPTLFNEALHRDLADFRIQHPDLILLQYVDDLLLAATSELDCQQGTRALLQTLGDLGYRASAKKAQICQKQVKYLGYLLKEGQRWLTEARKETVMGQPTPKTPRQLREFLGTAGFCRLWIPGFAEMAAPLYPLTKPGTLFEWGPDQQKAYQEIKQALLTAPALGLPDLTKPFELFVDEKQGYAKGVLTQKLGPWRRPVAYLSKKLDPVAAGWPPCLRMVAAIAVLTKDAGKLTMGQPLVILAPHAVEALVKQPPDRWLSNARMTHYQALLLDTDRVQFGPIVALNPATLLPLPEEGLQHDCLDILAEAHGTRPDLTDQPLPDADHTWYTDGSSFLQEGQRKAGAAVTTETEVVWAKALPAGTSAQRAELIALTQALKMAEGKKLNVYTDSRYAFATAHIHGEIYRRRGWLTSEGKEIKNKDEILALLKALFLPKRLSIIHCPGHQKGNRAEARGNRMADQAAREVATRETPETSTLLAGKRTADGSEFEKRTADGSEFESPKKKAKVE

SEQ ID NO: 2498 - protein, 2094 aa, synthetic construct
MPAAKRVKLDGGDKKYSIGLDIGTNSVGWAVITDEYKVPSKKFKVLGNTDRHSIKKNLIGALLFDSGETAEATRLKRTARRRYTRRKNRICYLQEIFSNEMAKVDDSFFHRLEESFLVEEDKKHERHPIFGNIVDEVAYHEKYPTIYHLRKKLVDSTDKADLRLIYLALAHMIKFRGHFLIEGDLNPDNSDVDKLFIQLVQTYNQLFEENPINASGVDAKAILSARLSKSRRLENLIAQLPGEKKNGLFGNLIALSLGLTPNFKSNFDLAEDAKLQLSKDTYDDDLDNLLAQIGDQYADLFLAAKNLSDAILLSDILRVNTEITKAPLSASMIKRYDEHHQDLTLLKALVRQQLPEKYKEIFFDQSKNGYAGYIDGGASQEEFYKFIKPILEKMDGTEELLVKLNREDLLRKQRTFDNGSIPHQIHLGELHAILRRQEDFYPFLKDNREKIEKILTFRIPYYVGPLARGNSRFAWMTRKSEETITPWNFEEVVDKGASAQSFIERMTNFDKNLPNEKVLPKHSLLYEYFTVYNELTKVKYVTEGMRKPAFLSGEQKKAIVDLLFKTNRKVTVKQLKEDYFKKIECFDSVEISGVEDRFNASLGTYHDLLKIIKDKDFLDNEENEDILEDIVLTLTLFEDREMIEERLKTYAHLFDDKVMKQLKRRRYTGWGRLSRKLINGIRDKQSGKTILDFLKSDGFANRNFMQLIHDDSLTFKEDIQKAQVSGQGDSLHEHIANLAGSPAIKKGILQTVKVVDELVKVMGRHKPENIVIEMARENQTTQKGQKNSRERMKRIEEGIKELGSQILKEHPVENTQLQNEKLYLYYLQNGRDMYVDQELDINRLSDYDVDHIVPQSFLKDDSIDNKVLTRSDKARGKSDNVPSEEVVKKMKNYWRQLLNAKLITQRKFDNLTKAERGGLSELDKAGFIKRQLVETRQITKHVAQILDSRMNTKYDENDKLIREVKVITLKSKLVSDFRKDFQFYKVREINNYHHAHDAYLNAVVGTALIKKYPKLESEFVYGDYKVYDVRKMIAKSEQEIGKATAKYFFYSNIMNFFKTEITLANGEIRKRPLIETNGETGEIVWDKGRDFATVRKVLSMPQVNIVKKTEVQTGGFSKESILPKRNSDKLIARKKDWDPKKYGGFDSPTVAYSVLVVAKVEKGKSKKLKSVKELLGITIMERSSFEKNPIDFLEAKGYKEVKKDLIIKLPKYSLFELENGRKRMLASAGELQKGNELALPSKYVNFLYLASHYEKLKGSPEDNEQKQLFVEQHKHYLDEIIEQISEFSKRVILADANLDKVLSAYNKHRDKPIREQAENIIHLFTLTNLGAPAAFKYFDTTIDRKRYTSTKEVLDATLIHQSITGLYETRIDLSQLGGDGGGGGGGSPAPGGTLNIEDEYRLHETSKGPDVPLGSTWLSDFPQAWAETGGMGLAVRQAPLIIPLKATSTPVSIKQYPMSQEARLGIKPHIQRLLDQGILVPCQSPWNTPLLPVKKPGTNDYRPVQDLREVNKRVEDIHPTVPNPYNLLSGLPPSHQWYTVLDLKDAFFCLRLHPTSQSLFAFEWRDPEMGISGQLTWTRLPQGFKNSPTLFNEALHRDLADFRIQHPDLILLQYVDDLLLAATSELDCQQGTRALLQTLGDLGYRASAKKAQICQKQVKYLGYLLKEGQRWLTEARKETVMGQPTPKTPRQLREFLGTAGFCRLWIPGFAEMAAPLYPLTKPGTLFEWGPDQQKAYQEIKQALLTAPALGLPDLTKPFELFVDEKQGYAKGVLTQKLGPWRRPVAYLSKKLDPVAAGWPPCLRMVAAIAVLTKDAGKLTMGQPLVILAPHAVEALVKQPPDRWLSNARMTHYQALLLDTDRVQFGPIVALNPATLLPLPEEGLQHDCLDILAEAHGTRPDLTDQPLPDADHTWYTDGSSFLQEGQRKAGAAVTTETEVVWAKALPAGTSAQRAELIALTQALKMAEGKKLNVYTDSRYAFATAHIHGEIYRRRGWLTSEGKEIKNKDEILALLKALFLPKRLSIIHCPGHQKGNRAEARGNRMADQAAREVATRETPETSTLLAGKRTADGSEFEKRTADGSEFESPKKKAKVE

SEQ ID NO: 2499 - protein, 2094 aa, synthetic construct
MPAAKRVKLDGGDKKYSIGLDIGTNSVGWAVITDEYKVPSKKFKVLGNTDRHSIKKNLIGALLFDSGETAEATRLKRTARRRYTRRKNRICYLQEIFSNEMAKVDDSFFHRLEESFLVEEDKKHERHPIFGNIVDEVAYHEKYPTIYHLRKKLVDSTDKADLRLIYLALAHMIKFRGHFLIEGDLNPDNSDVDKLFIQLVQTYNQLFEENPINASGVDAKAILSARLSKSRRLENLIAQLPGEKKNGLFGNLIALSLGLTPNFKSNFDLAEDAKLQLSKDTYDDDLDNLLAQIGDQYADLFLAAKNLSDAILLSDILRVNTEITKAPLSASMIKRYDEHHQDLTLLKALVRQQLPEKYKEIFFDQSKNGYAGYIDGGASQEEFYKFIKPILEKMDGTEELLVKLNREDLLRKQRTFDNGSIPHQIHLGELHAILRRQEDFYPFLKDNREKIEKILTFRIPYYVGPLARGNSRFAWMTRKSEETITPWNFEEVVDKGASAQSFIERMTNFDKNLPNEKVLPKHSLLYEYFTVYNELTKVKYVTEGMRKPAFLSGEQKKAIVDLLFKTNRKVTVKQLKEDYFKKIECFDSVEISGVEDRFNASLGTYHDLLKIIKDKDFLDNEENEDILEDIVLTLTLFEDREMIEERLKTYAHLFDDKVMKQLKRRRYTGWGRLSRKLINGIRDKQSGKTILDFLKSDGFANRNFMQLIHDDSLTFKEDIQKAQVSGQGDSLHEHIANLAGSPAIKKGILQTVKVVDELVKVMGRHKPENIVIEMARENQTTQKGQKNSRERMKRIEEGIKELGSQILKEHPVENTQLQNEKLYLYYLQNGRDMYVDQELDINRLSDYDVDHIVPQSFLKDDSIDNKVLTRSDKARGKSDNVPSEEVVKKMKNYWRQLLNAKLITQRKFDNLTKAERGGLSELDKAGFIKRQLVETRQITKHVAQILDSRMNTKYDENDKLIREVKVITLKSKLVSDFRKDFQFYKVREINNYHHAHDAYLNAVVGTALIKKYPKLESEFVYGDYKVYDVRKMIAKSEQEIGKATAKYFFYSNIMNFFKTEITLANGEIRKRPLIETNGETGEIVWDKGRDFATVRKVLSMPQVNIVKKTEVQTGGFSKESILPKRNSDKLIARKKDWDPKKYGGFDSPTVAYSVLVVAKVEKGKSKKLKSVKELLGITIMERSSFEKNPIDFLEAKGYKEVKKDLIIKLPKYSLFELENGRKRMLASAGELQKGNELALPSKYVNFLYLASHYEKLKGSPEDNEQKQLFVEQHKHYLDEIIEQISEFSKRVILADANLDKVLSAYNKHRDKPIREQAENIIHLFTLTNLGAPAAFKYFDTTIDRKRYTSTKEVLDATLIHQSITGLYETRIDLSQLGGDGGGGSGGSGGSGGTLNIEDEYRLHETSKGPDVPLGSTWLSDFPQAWAETGGMGLAVRQAPLIIPLKATSTPVSIKQYPMSQEARLGIKPHIQRLLDQGILVPCQSPWNTPLLPVKKPGTNDYRPVQDLREVNKRVEDIHPTVPNPYNLLSGLPPSHQWYTVLDLKDAFFCLRLHPTSQSLFAFEWRDPEMGISGQLTWTRLPQGFKNSPTLFNEALHRDLADFRIQHPDLILLQYVDDLLLAATSELDCQQGTRALLQTLGDLGYRASAKKAQICQKQVKYLGYLLKEGQRWLTEARKETVMGQPTPKTPRQLREFLGTAGFCRLWIPGFAEMAAPLYPLTKPGTLFEWGPDQQKAYQEIKQALLTAPALGLPDLTKPFELFVDEKQGYAKGVLTQKLGPWRRPVAYLSKKLDPVAAGWPPCLRMVAAIAVLTKDAGKLTMGQPLVILAPHAVEALVKQPPDRWLSNARMTHYQALLLDTDRVQFGPIVALNPATLLPLPEEGLQHDCLDILAEAHGTRPDLTDQPLPDADHTWYTDGSSFLQEGQRKAGAAVTTETEVVWAKALPAGTSAQRAELIALTQALKMAEGKKLNVYTDSRYAFATAHIHGEIYRRRGWLTSEGKEIKNKDEILALLKALFLPKRLSIIHCPGHQKGNRAEARGNRMADQAAREVATRETPETSTLLAGKRTADGSEFEKRTADGSEFESPKKKAKVE

SEQ ID NO: 2500 - protein, 2093 aa, synthetic construct
MPAAKRVKLDGGDKKYSIGLDIGTNSVGWAVITDEYKVPSKKFKVLGNTDRHSIKKNLIGALLFDSGETAEATRLKRTARRRYTRRKNRICYLQEIFSNEMAKVDDSFFHRLEESFLVEEDKKHERHPIFGNIVDEVAYHEKYPTIYHLRKKLVDSTDKADLRLIYLALAHMIKFRGHFLIEGDLNPDNSDVDKLFIQLVQTYNQLFEENPINASGVDAKAILSARLSKSRRLENLIAQLPGEKKNGLFGNLIALSLGLTPNFKSNFDLAEDAKLQLSKDTYDDDLDNLLAQIGDQYADLFLAAKNLSDAILLSDILRVNTEITKAPLSASMIKRYDEHHQDLTLLKALVRQQLPEKYKEIFFDQSKNGYAGYIDGGASQEEFYKFIKPILEKMDGTEELLVKLNREDLLRKQRTFDNGSIPHQIHLGELHAILRRQEDFYPFLKDNREKIEKILTFRIPYYVGPLARGNSRFAWMTRKSEETITPWNFEEVVDKGASAQSFIERMTNFDKNLPNEKVLPKHSLLYEYFTVYNELTKVKYVTEGMRKPAFLSGEQKKAIVDLLFKTNRKVTVKQLKEDYFKKIECFDSVEISGVEDRFNASLGTYHDLLKIIKDKDFLDNEENEDILEDIVLTLTLFEDREMIEERLKTYAHLFDDKVMKQLKRRRYTGWGRLSRKLINGIRDKQSGKTILDFLKSDGFANRNFMQLIHDDSLTFKEDIQKAQVSGQGDSLHEHIANLAGSPAIKKGILQTVKVVDELVKVMGRHKPENIVIEMARENQTTQKGQKNSRERMKRIEEGIKELGSQILKEHPVENTQLQNEKLYLYYLQNGRDMYVDQELDINRLSDYDVDHIVPQSFLKDDSIDNKVLTRSDKARGKSDNVPSEEVVKKMKNYWRQLLNAKLITQRKFDNLTKAERGGLSELDKAGFIKRQLVETRQITKHVAQILDSRMNTKYDENDKLIREVKVITLKSKLVSDFRKDFQFYKVREINNYHHAHDAYLNAVVGTALIKKYPKLESEFVYGDYKVYDVRKMIAKSEQEIGKATAKYFFYSNIMNFFKTEITLANGEIRKRPLIETNGETGEIVWDKGRDFATVRKVLSMPQVNIVKKTEVQTGGFSKESILPKRNSDKLIARKKDWDPKKYGGFDSPTVAYSVLVVAKVEKGKSKKLKSVKELLGITIMERSSFEKNPIDFLEAKGYKEVKKDLIIKLPKYSLFELENGRKRMLASAGELQKGNELALPSKYVNFLYLASHYEKLKGSPEDNEQKQLFVEQHKHYLDEIIEQISEFSKRVILADANLDKVLSAYNKHRDKPIREQAENIIHLFTLTNLGAPAAFKYFDTTIDRKRYTSTKEVLDATLIHQSITGLYETRIDLSQLGGDGGGGGGGGGGGGTLNIEDEYRLHETSKGPDVPLGSTWLSDFPQAWAETGGMGLAVRQAPLIIPLKATSTPVSIKQYPMSQEARLGIKPHIQRLLDQGILVPCQSPWNTPLLPVKKPGTNDYRPVQDLREVNKRVEDIHPTVPNPYNLLSGLPPSHQWYTVLDLKDAFFCLRLHPTSQSLFAFEWRDPEMGISGQLTWTRLPQGFKNSPTLFNEALHRDLADFRIQHPDLILLQYVDDLLLAATSELDCQQGTRALLQTLGDLGYRASAKKAQICQKQVKYLGYLLKEGQRWLTEARKETVMGQPTPKTPRQLREFLGTAGFCRLWIPGFAEMAAPLYPLTKPGTLFEWGPDQQKAYQEIKQALLTAPALGLPDLTKPFELFVDEKQGYAKGVLTQKLGPWRRPVAYLSKKLDPVAAGWPPCLRMVAAIAVLTKDAGKLTMGQPLVILAPHAVEALVKQPPDRWLSNARMTHYQALLLDTDRVQFGPIVALNPATLLPLPEEGLQHDCLDILAEAHGTRPDLTDQPLPDADHTWYTDGSSFLQEGQRKAGAAVTTETEVVWAKALPAGTSAQRAELIALTQALKMAEGKKLNVYTDSRYAFATAHIHGEIYRRRGWLTSEGKEIKNKDEILALLKALFLPKRLSIIHCPGHQKGNRAEARGNRMADQAAREVATRETPETSTLLAGKRTADGSEFEKRTADGSEFESPKKKAKVE

SEQ ID NO: 2501 - protein, 2094 aa, synthetic construct
MPAAKRVKLDGGDKKYSIGLDIGTNSVGWAVITDEYKVPSKKFKVLGNTDRHSIKKNLIGALLFDSGETAEATRLKRTARRRYTRRKNRICYLQEIFSNEMAKVDDSFFHRLEESFLVEEDKKHERHPIFGNIVDEVAYHEKYPTIYHLRKKLVDSTDKADLRLIYLALAHMIKFRGHFLIEGDLNPDNSDVDKLFIQLVQTYNQLFEENPINASGVDAKAILSARLSKSRRLENLIAQLPGEKKNGLFGNLIALSLGLTPNFKSNFDLAEDAKLQLSKDTYDDDLDNLLAQIGDQYADLFLAAKNLSDAILLSDILRVNTEITKAPLSASMIKRYDEHHQDLTLLKALVRQQLPEKYKEIFFDQSKNGYAGYIDGGASQEEFYKFIKPILEKMDGTEELLVKLNREDLLRKQRTFDNGSIPHQIHLGELHAILRRQEDFYPFLKDNREKIEKILTFRIPYYVGPLARGNSRFAWMTRKSEETITPWNFEEVVDKGASAQSFIERMTNFDKNLPNEKVLPKHSLLYEYFTVYNELTKVKYVTEGMRKPAFLSGEQKKAIVDLLFKTNRKVTVKQLKEDYFKKIECFDSVEISGVEDRFNASLGTYHDLLKIIKDKDFLDNEENEDILEDIVLTLTLFEDREMIEERLKTYAHLFDDKVMKQLKRRRYTGWGRLSRKLINGIRDKQSGKTILDFLKSDGFANRNFMQLIHDDSLTFKEDIQKAQVSGQGDSLHEHIANLAGSPAIKKGILQTVKVVDELVKVMGRHKPENIVIEMARENQTTQKGQKNSRERMKRIEEGIKELGSQILKEHPVENTQLQNEKLYLYYLQNGRDMYVDQELDINRLSDYDVDHIVPQSFLKDDSIDNKVLTRSDKARGKSDNVPSEEVVKKMKNYWRQLLNAKLITQRKFDNLTKAERGGLSELDKAGFIKRQLVETRQITKHVAQILDSRMNTKYDENDKLIREVKVITLKSKLVSDFRKDFQFYKVREINNYHHAHDAYLNAVVGTALIKKYPKLESEFVYGDYKVYDVRKMIAKSEQEIGKATAKYFFYSNIMNFFKTEITLANGEIRKRPLIETNGETGEIVWDKGRDFATVRKVLSMPQVNIVKKTEVQTGGFSKESILPKRNSDKLIARKKDWDPKKYGGFDSPTVAYSVLVVAKVEKGKSKKLKSVKELLGITIMERSSFEKNPIDFLEAKGYKEVKKDLIIKLPKYSLFELENGRKRMLASAGELQKGNELALPSKYVNFLYLASHYEKLKGSPEDNEQKQLFVEQHKHYLDEIIEQISEFSKRVILADANLDKVLSAYNKHRDKPIREQAENIIHLFTLTNLGAPAAFKYFDTTIDRKRYTSTKEVLDATLIHQSITGLYETRIDLSQLGGDGGGSSPAPGGSGGTLNIEDEYRLHETSKGPDVPLGSTWLSDFPQAWAETGGMGLAVRQAPLIIPLKATSTPVSIKQYPMSQEARLGIKPHIQRLLDQGILVPCQSPWNTPLLPVKKPGTNDYRPVQDLREVNKRVEDIHPTVPNPYNLLSGLPPSHQWYTVLDLKDAFFCLRLHPTSQSLFAFEWRDPEMGISGQLTWTRLPQGFKNSPTLFNEALHRDLADFRIQHPDLILLQYVDDLLLAATSELDCQQGTRALLQTLGDLGYRASAKKAQICQKQVKYLGYLLKEGQRWLTEARKETVMGQPTPKTPRQLREFLGTAGFCRLWIPGFAEMAAPLYPLTKPGTLFEWGPDQQKAYQEIKQALLTAPALGLPDLTKPFELFVDEKQGYAKGVLTQKLGPWRRPVAYLSKKLDPVAAGWPPCLRMVAAIAVLTKDAGKLTMGQPLVILAPHAVEALVKQPPDRWLSNARMTHYQALLLDTDRVQFGPIVALNPATLLPLPEEGLQHDCLDILAEAHGTRPDLTDQPLPDADHTWYTDGSSFLQEGQRKAGAAVTTETEVVWAKALPAGTSAQRAELIALTQALKMAEGKKLNVYTDSRYAFATAHIHGEIYRRRGWLTSEGKEIKNKDEILALLKALFLPKRLSIIHCPGHQKGNRAEARGNRMADQAAREVATRETPETSTLLAGKRTADGSEFEKRTADGSEFESPKKKAKVE

SEQ ID NO: 2502 - protein, 2094 aa, synthetic construct
MPAAKRVKLDGGDKKYSIGLDIGTNSVGWAVITDEYKVPSKKFKVLGNTDRHSIKKNLIGALLFDSGETAEATRLKRTARRRYTRRKNRICYLQEIFSNEMAKVDDSFFHRLEESFLVEEDKKHERHPIFGNIVDEVAYHEKYPTIYHLRKKLVDSTDKADLRLIYLALAHMIKFRGHFLIEGDLNPDNSDVDKLFIQLVQTYNQLFEENPINASGVDAKAILSARLSKSRRLENLIAQLPGEKKNGLFGNLIALSLGLTPNFKSNFDLAEDAKLQLSKDTYDDDLDNLLAQIGDQYADLFLAAKNLSDAILLSDILRVNTEITKAPLSASMIKRYDEHHQDLTLLKALVRQQLPEKYKEIFFDQSKNGYAGYIDGGASQEEFYKFIKPILEKMDGTEELLVKLNREDLLRKQRTFDNGSIPHQIHLGELHAILRRQEDFYPFLKDNREKIEKILTFRIPYYVGPLARGNSRFAWMTRKSEETITPWNFEEVVDKGASAQSFIERMTNFDKNLPNEKVLPKHSLLYEYFTVYNELTKVKYVTEGMRKPAFLSGEQKKAIVDLLFKTNRKVTVKQLKEDYFKKIECFDSVEISGVEDRFNASLGTYHDLLKIIKDKDFLDNEENEDILEDIVLTLTLFEDREMIEERLKTYAHLFDDKVMKQLKRRRYTGWGRLSRKLINGIRDKQSGKTILDFLKSDGFANRNFMQLIHDDSLTFKEDIQKAQVSGQGDSLHEHIANLAGSPAIKKGILQTVKVVDELVKVMGRHKPENIVIEMARENQTTQKGQKNSRERMKRIEEGIKELGSQILKEHPVENTQLQNEKLYLYYLQNGRDMYVDQELDINRLSDYDVDHIVPQSFLKDDSIDNKVLTRSDKARGKSDNVPSEEVVKKMKNYWRQLLNAKLITQRKFDNLTKAERGGLSELDKAGFIKRQLVETRQITKHVAQILDSRMNTKYDENDKLIREVKVITLKSKLVSDFRKDFQFYKVREINNYHHAHDAYLNAVVGTALIKKYPKLESEFVYGDYKVYDVRKMIAKSEQEIGKATAKYFFYSNIMNFFKTEITLANGEIRKRPLIETNGETGEIVWDKGRDFATVRKVLSMPQVNIVKKTEVQTGGFSKESILPKRNSDKLIARKKDWDPKKYGGFDSPTVAYSVLVVAKVEKGKSKKLKSVKELLGITIMERSSFEKNPIDFLEAKGYKEVKKDLIIKLPKYSLFELENGRKRMLASAGELQKGNELALPSKYVNFLYLASHYEKLKGSPEDNEQKQLFVEQHKHYLDEIIEQISEFSKRVILADANLDKVLSAYNKHRDKPIREQAENIIHLFTLTNLGAPAAFKYFDTTIDRKRYTSTKEVLDATLIHQSITGLYETRIDLSQLGGDGGPAPGGGGGSGGTLNIEDEYRLHETSKGPDVPLGSTWLSDFPQAWAETGGMGLAVRQAPLIIPLKATSTPVSIKQYPMSQEARLGIKPHIQRLLDQGILVPCQSPWNTPLLPVKKPGTNDYRPVQDLREVNKRVEDIHPTVPNPYNLLSGLPPSHQWYTVLDLKDAFFCLRLHPTSQSLFAFEWRDPEMGISGQLTWTRLPQGFKNSPTLFNEALHRDLADFRIQHPDLILLQYVDDLLLAATSELDCQQGTRALLQTLGDLGYRASAKKAQICQKQVKYLGYLLKEGQRWLTEARKETVMGQPTPKTPRQLREFLGTAGFCRLWIPGFAEMAAPLYPLTKPGTLFEWGPDQQKAYQEIKQALLTAPALGLPDLTKPFELFVDEKQGYAKGVLTQKLGPWRRPVAYLSKKLDPVAAGWPPCLRMVAAIAVLTKDAGKLTMGQPLVILAPHAVEALVKQPPDRWLSNARMTHYQALLLDTDRVQFGPIVALNPATLLPLPEEGLQHDCLDILAEAHGTRPDLTDQPLPDADHTWYTDGSSFLQEGQRKAGAAVTTETEVVWAKALPAGTSAQRAELIALTQALKMAEGKKLNVYTDSRYAFATAHIHGEIYRRRGWLTSEGKEIKNKDEILALLKALFLPKRLSIIHCPGHQKGNRAEARGNRMADQAAREVATRETPETSTLLAGKRTADGSEFEKRTADGSEFESPKKKAKVE

SEQ ID NO: 2503 - protein, 2093 aa, synthetic construct
MPAAKRVKLDGGDKKYSIGLDIGTNSVGWAVITDEYKVPSKKFKVLGNTDRHSIKKNLIGALLFDSGETAEATRLKRTARRRYTRRKNRICYLQEIFSNEMAKVDDSFFHRLEESFLVEEDKKHERHPIFGNIVDEVAYHEKYPTIYHLRKKLVDSTDKADLRLIYLALAHMIKFRGHFLIEGDLNPDNSDVDKLFIQLVQTYNQLFEENPINASGVDAKAILSARLSKSRRLENLIAQLPGEKKNGLFGNLIALSLGLTPNFKSNFDLAEDAKLQLSKDTYDDDLDNLLAQIGDQYADLFLAAKNLSDAILLSDILRVNTEITKAPLSASMIKRYDEHHQDLTLLKALVRQQLPEKYKEIFFDQSKNGYAGYIDGGASQEEFYKFIKPILEKMDGTEELLVKLNREDLLRKQRTFDNGSIPHQIHLGELHAILRRQEDFYPFLKDNREKIEKILTFRIPYYVGPLARGNSRFAWMTRKSEETITPWNFEEVVDKGASAQSFIERMTNFDKNLPNEKVLPKHSLLYEYFTVYNELTKVKYVTEGMRKPAFLSGEQKKAIVDLLFKTNRKVTVKQLKEDYFKKIECFDSVEISGVEDRFNASLGTYHDLLKIIKDKDFLDNEENEDILEDIVLTLTLFEDREMIEERLKTYAHLFDDKVMKQLKRRRYTGWGRLSRKLINGIRDKQSGKTILDFLKSDGFANRNFMQLIHDDSLTFKEDIQKAQVSGQGDSLHEHIANLAGSPAIKKGILQTVKVVDELVKVMGRHKPENIVIEMARENQTTQKGQKNSRERMKRIEEGIKELGSQILKEHPVENTQLQNEKLYLYYLQNGRDMYVDQELDINRLSDYDVDHIVPQSFLKDDSIDNKVLTRSDKARGKSDNVPSEEVVKKMKNYWRQLLNAKLITQRKFDNLTKAERGGLSELDKAGFIKRQLVETRQITKHVAQILDSRMNTKYDENDKLIREVKVITLKSKLVSDFRKDFQFYKVREINNYHHAHDAYLNAVVGTALIKKYPKLESEFVYGDYKVYDVRKMIAKSEQEIGKATAKYFFYSNIMNFFKTEITLANGEIRKRPLIETNGETGEIVWDKGRDFATVRKVLSMPQVNIVKKTEVQTGGFSKESILPKRNSDKLIARKKDWDPKKYGGFDSPTVAYSVLVVAKVEKGKSKKLKSVKELLGITIMERSSFEKNPIDFLEAKGYKEVKKDLIIKLPKYSLFELENGRKRMLASAGELQKGNELALPSKYVNFLYLASHYEKLKGSPEDNEQKQLFVEQHKHYLDEIIEQISEFSKRVILADANLDKVLSAYNKHRDKPIREQAENIIHLFTLTNLGAPAAFKYFDTTIDRKRYTSTKEVLDATLIHQSITGLYETRIDLSQLGGDGGGSSEAAAKGGTLNIEDEYRLHETSKGPDVPLGSTWLSDFPQAWAETGGMGLAVRQAPLIIPLKATSTPVSIKQYPMSQEARLGIKPHIQRLLDQGILVPCQSPWNTPLLPVKKPGTNDYRPVQDLREVNKRVEDIHPTVPNPYNLLSGLPPSHQWYTVLDLKDAFFCLRLHPTSQSLFAFEWRDPEMGISGQLTWTRLPQGFKNSPTLFNEALHRDLADFRIQHPDLILLQYVDDLLLAATSELDCQQGTRALLQTLGDLGYRASAKKAQICQKQVKYLGYLLKEGQRWLTEARKETVMGQPTPKTPRQLREFLGKAGFCRLFIPGFAEMAAPLYPLTKPGTLFEWGPDQQKAYQEIKQALLTAPALGLPDLTKPFELFVDEKQGYAKGVLTQKLGPWRRPVAYLSKKLDPVAAGWPPCLRMVAAIAVLTKDAGKLTMGQPLVILAPHAVEALVKQPPDRWLSNARMTHYQALLLDTDRVQFGPIVALNPATLLPLPEEGLQHDCLDILAEAHGTRPDLTDQPLPDADHTWYTDGSSFLQEGQRKAGAAVTTETEVVWAKALPAGTSAQRAELIALTQALKMAEGKKLNVYTDSRYAFATAHIHGEIYRRRGWLTSEGKEIKNKDEILALLKALFLPKRLSIIHCPGHQKGNRAEARGNRMADQAAREVATRETPETSTLLAGKRTADGSEFEKRTADGSEFESPKKKAKVE

SEQ ID NO: 2504 - protein, 2090 aa, synthetic construct
MPAAKRVKLDGGDKKYSIGLDIGTNSVGWAVITDEYKVPSKKFKVLGNTDRHSIKKNLIGALLFDSGETAEATRLKRTARRRYTRRKNRICYLQEIFSNEMAKVDDSFFHRLEESFLVEEDKKHERHPIFGNIVDEVAYHEKYPTIYHLRKKLVDSTDKADLRLIYLALAHMIKFRGHFLIEGDLNPDNSDVDKLFIQLVQTYNQLFEENPINASGVDAKAILSARLSKSRRLENLIAQLPGEKKNGLFGNLIALSLGLTPNFKSNFDLAEDAKLQLSKDTYDDDLDNLLAQIGDQYADLFLAAKNLSDAILLSDILRVNTEITKAPLSASMIKRYDEHHQDLTLLKALVRQQLPEKYKEIFFDQSKNGYAGYIDGGASQEEFYKFIKPILEKMDGTEELLVKLNREDLLRKQRTFDNGSIPHQIHLGELHAILRRQEDFYPFLKDNREKIEKILTFRIPYYVGPLARGNSRFAWMTRKSEETITPWNFEEVVDKGASAQSFIERMTNFDKNLPNEKVLPKHSLLYEYFTVYNELTKVKYVTEGMRKPAFLSGEQKKAIVDLLFKTNRKVTVKQLKEDYFKKIECFDSVEISGVEDRFNASLGTYHDLLKIIKDKDFLDNEENEDILEDIVLTLTLFEDREMIEERLKTYAHLFDDKVMKQLKRRRYTGWGRLSRKLINGIRDKQSGKTILDFLKSDGFANRNFMQLIHDDSLTFKEDIQKAQVSGQGDSLHEHIANLAGSPAIKKGILQTVKVVDELVKVMGRHKPENIVIEMARENQTTQKGQKNSRERMKRIEEGIKELGSQILKEHPVENTQLQNEKLYLYYLQNGRDMYVDQELDINRLSDYDVDHIVPQSFLKDDSIDNKVLTRSDKARGKSDNVPSEEVVKKMKNYWRQLLNAKLITQRKFDNLTKAERGGLSELDKAGFIKRQLVETRQITKHVAQILDSRMNTKYDENDKLIREVKVITLKSKLVSDFRKDFQFYKVREINNYHHAHDAYLNAVVGTALIKKYPKLESEFVYGDYKVYDVRKMIAKSEQEIGKATAKYFFYSNIMNFFKTEITLANGEIRKRPLIETNGETGEIVWDKGRDFATVRKVLSMPQVNIVKKTEVQTGGFSKESILPKRNSDKLIARKKDWDPKKYGGFDSPTVAYSVLVVAKVEKGKSKKLKSVKELLGITIMERSSFEKNPIDFLEAKGYKEVKKDLIIKLPKYSLFELENGRKRMLASAGELQKGNELALPSKYVNFLYLASHYEKLKGSPEDNEQKQLFVEQHKHYLDEIIEQISEFSKRVILADANLDKVLSAYNKHRDKPIREQAENIIHLFTLTNLGAPAAFKYFDTTIDRKRYTSTKEVLDATLIHQSITGLYETRIDLSQLGGDGGGGGGSGGTLNIEDEYRLHETSKGPDVPLGSTWLSDFPQAWAETGGMGLAVRQAPLIIPLKATSTPVSIKQYPMSQEARLGIKPHIQRLLDQGILVPCQSPWNTPLLPVKKPGTNDYRPVQDLREVNKRVEDIHPTVPNPYNLLSGLPPSHQWYTVLDLKDAFFCLRLHPTSQSLFAFEWRDPEMGISGQLTWTRLPQGFKNSPTLFNEALHRDLADFRIQHPDLILLQYVDDLLLAATSELDCQQGTRALLQTLGDLGYRASAKKAQICQKQVKYLGYLLKEGQRWLTEARKETVMGQPTPKTPRQLREFLGKAGFCRLFIPGFAEMAAPLYPLTKPGTLFEWGPDQQKAYQEIKQALLTAPALGLPDLTKPFELFVDEKQGYAKGVLTQKLGPWRRPVAYLSKKLDPVAAGWPPCLRMVAAIAVLTKDAGKLTMGQPLVILAPHAVEALVKQPPDRWLSNARMTHYQALLLDTDRVQFGPIVALNPATLLPLPEEGLQHDCLDILAEAHGTRPDLTDQPLPDADHTWYTDGSSFLQEGQRKAGAAVTTETEVVWAKALPAGTSAQRAELIALTQALKMAEGKKLNVYTDSRYAFATAHIHGEIYRRRGWLTSEGKEIKNKDEILALLKALFLPKRLSIIHCPGHQKGNRAEARGNRMADQAAREVATRETPETSTLLAGKRTADGSEFEKRTADGSEFESPKKKAKVE

SEQ ID NO: 2505 - protein, 2093 aa, synthetic construct
MPAAKRVKLDGGDKKYSIGLDIGTNSVGWAVITDEYKVPSKKFKVLGNTDRHSIKKNLIGALLFDSGETAEATRLKRTARRRYTRRKNRICYLQEIFSNEMAKVDDSFFHRLEESFLVEEDKKHERHPIFGNIVDEVAYHEKYPTIYHLRKKLVDSTDKADLRLIYLALAHMIKFRGHFLIEGDLNPDNSDVDKLFIQLVQTYNQLFEENPINASGVDAKAILSARLSKSRRLENLIAQLPGEKKNGLFGNLIALSLGLTPNFKSNFDLAEDAKLQLSKDTYDDDLDNLLAQIGDQYADLFLAAKNLSDAILLSDILRVNTEITKAPLSASMIKRYDEHHQDLTLLKALVRQQLPEKYKEIFFDQSKNGYAGYIDGGASQEEFYKFIKPILEKMDGTEELLVKLNREDLLRKQRTFDNGSIPHQIHLGELHAILRRQEDFYPFLKDNREKIEKILTFRIPYYVGPLARGNSRFAWMTRKSEETITPWNFEEVVDKGASAQSFIERMTNFDKNLPNEKVLPKHSLLYEYFTVYNELTKVKYVTEGMRKPAFLSGEQKKAIVDLLFKTNRKVTVKQLKEDYFKKIECFDSVEISGVEDRFNASLGTYHDLLKIIKDKDFLDNEENEDILEDIVLTLTLFEDREMIEERLKTYAHLFDDKVMKQLKRRRYTGWGRLSRKLINGIRDKQSGKTILDFLKSDGFANRNFMQLIHDDSLTFKEDIQKAQVSGQGDSLHEHIANLAGSPAIKKGILQTVKVVDELVKVMGRHKPENIVIEMARENQTTQKGQKNSRERMKRIEEGIKELGSQILKEHPVENTQLQNEKLYLYYLQNGRDMYVDQELDINRLSDYDVDHIVPQSFLKDDSIDNKVLTRSDKARGKSDNVPSEEVVKKMKNYWRQLLNAKLITQRKFDNLTKAERGGLSELDKAGFIKRQLVETRQITKHVAQILDSRMNTKYDENDKLIREVKVITLKSKLVSDFRKDFQFYKVREINNYHHAHDAYLNAVVGTALIKKYPKLESEFVYGDYKVYDVRKMIAKSEQEIGKATAKYFFYSNIMNFFKTEITLANGEIRKRPLIETNGETGEIVWDKGRDFATVRKVLSMPQVNIVKKTEVQTGGFSKESILPKRNSDKLIARKKDWDPKKYGGFDSPTVAYSVLVVAKVEKGKSKKLKSVKELLGITIMERSSFEKNPIDFLEAKGYKEVKKDLIIKLPKYSLFELENGRKRMLASAGELQKGNELALPSKYVNFLYLASHYEKLKGSPEDNEQKQLFVEQHKHYLDEIIEQISEFSKRVILADANLDKVLSAYNKHRDKPIREQAENIIHLFTLTNLGAPAAFKYFDTTIDRKRYTSTKEVLDATLIHQSITGLYETRIDLSQLGGDGGPAPEAAAKGGTLNIEDEYRLHETSKGPDVPLGSTWLSDFPQAWAETGGMGLAVRQAPLIIPLKATSTPVSIKQYPMSQEARLGIKPHIQRLLDQGILVPCQSPWNTPLLPVKKPGTNDYRPVQDLREVNKRVEDIHPTVPNPYNLLSGLPPSHQWYTVLDLKDAFFCLRLHPTSQSLFAFEWRDPEMGISGQLTWTRLPQGFKNSPTLFNEALHRDLADFRIQHPDLILLQYVDDLLLAATSELDCQQGTRALLQTLGDLGYRASAKKAQICQKQVKYLGYLLKEGQRWLTEARKETVMGQPTPKTPRQLREFLGKAGFCRLFIPGFAEMAAPLYPLTKPGTLFEWGPDQQKAYQEIKQALLTAPALGLPDLTKPFELFVDEKQGYAKGVLTQKLGPWRRPVAYLSKKLDPVAAGWPPCLRMVAAIAVLTKDAGKLTMGQPLVILAPHAVEALVKQPPDRWLSNARMTHYQALLLDTDRVQFGPIVALNPATLLPLPEEGLQHDCLDILAEAHGTRPDLTDQPLPDADHTWYTDGSSFLQEGQRKAGAAVTTETEVVWAKALPAGTSAQRAELIALTQALKMAEGKKLNVYTDSRYAFATAHIHGEIYRRRGWLTSEGKEIKNKDEILALLKALFLPKRLSIIHCPGHQKGNRAEARGNRMADQAAREVATRETPETSTLLAGKRTADGSEFEKRTADGSEFESPKKKAKVE

SEQ ID NO: 2506 - protein, 2096 aa, synthetic construct
MPAAKRVKLDGGDKKYSIGLDIGTNSVGWAVITDEYKVPSKKFKVLGNTDRHSIKKNLIGALLFDSGETAEATRLKRTARRRYTRRKNRICYLQEIFSNEMAKVDDSFFHRLEESFLVEEDKKHERHPIFGNIVDEVAYHEKYPTIYHLRKKLVDSTDKADLRLIYLALAHMIKFRGHFLIEGDLNPDNSDVDKLFIQLVQTYNQLFEENPINASGVDAKAILSARLSKSRRLENLIAQLPGEKKNGLFGNLIALSLGLTPNFKSNFDLAEDAKLQLSKDTYDDDLDNLLAQIGDQYADLFLAAKNLSDAILLSDILRVNTEITKAPLSASMIKRYDEHHQDLTLLKALVRQQLPEKYKEIFFDQSKNGYAGYIDGGASQEEFYKFIKPILEKMDGTEELLVKLNREDLLRKQRTFDNGSIPHQIHLGELHAILRRQEDFYPFLKDNREKIEKILTFRIPYYVGPLARGNSRFAWMTRKSEETITPWNFEEVVDKGASAQSFIERMTNFDKNLPNEKVLPKHSLLYEYFTVYNELTKVKYVTEGMRKPAFLSGEQKKAIVDLLFKTNRKVTVKQLKEDYFKKIECFDSVEISGVEDRFNASLGTYHDLLKIIKDKDFLDNEENEDILEDIVLTLTLFEDREMIEERLKTYAHLFDDKVMKQLKRRRYTGWGRLSRKLINGIRDKQSGKTILDFLKSDGFANRNFMQLIHDDSLTFKEDIQKAQVSGQGDSLHEHIANLAGSPAIKKGILQTVKVVDELVKVMGRHKPENIVIEMARENQTTQKGQKNSRERMKRIEEGIKELGSQILKEHPVENTQLQNEKLYLYYLQNGRDMYVDQELDINRLSDYDVDHIVPQSFLKDDSIDNKVLTRSDKARGKSDNVPSEEVVKKMKNYWRQLLNAKLITQRKFDNLTKAERGGLSELDKAGFIKRQLVETRQITKHVAQILDSRMNTKYDENDKLIREVKVITLKSKLVSDFRKDFQFYKVREINNYHHAHDAYLNAVVGTALIKKYPKLESEFVYGDYKVYDVRKMIAKSEQEIGKATAKYFFYSNIMNFFKTEITLANGEIRKRPLIETNGETGEIVWDKGRDFATVRKVLSMPQVNIVKKTEVQTGGFSKESILPKRNSDKLIARKKDWDPKKYGGFDSPTVAYSVLVVAKVEKGKSKKLKSVKELLGITIMERSSFEKNPIDFLEAKGYKEVKKDLIIKLPKYSLFELENGRKRMLASAGELQKGNELALPSKYVNFLYLASHYEKLKGSPEDNEQKQLFVEQHKHYLDEIIEQISEFSKRVILADANLDKVLSAYNKHRDKPIREQAENIIHLFTLTNLGAPAAFKYFDTTIDRKRYTSTKEVLDATLIHQSITGLYETRIDLSQLGGDGGEAAAKPAPGGGGGTLNIEDEYRLHETSKGPDVPLGSTWLSDFPQAWAETGGMGLAVRQAPLIIPLKATSTPVSIKQYPMSQEARLGIKPHIQRLLDQGILVPCQSPWNTPLLPVKKPGTNDYRPVQDLREVNKRVEDIHPTVPNPYNLLSGLPPSHQWYTVLDLKDAFFCLRLHPTSQSLFAFEWRDPEMGISGQLTWTRLPQGFKNSPTLFNEALHRDLADFRIQHPDLILLQYVDDLLLAATSELDCQQGTRALLQTLGDLGYRASAKKAQICQKQVKYLGYLLKEGQRWLTEARKETVMGQPTPKTPRQLREFLGKAGFCRLFIPGFAEMAAPLYPLTKPGTLFEWGPDQQKAYQEIKQALLTAPALGLPDLTKPFELFVDEKQGYAKGVLTQKLGPWRRPVAYLSKKLDPVAAGWPPCLRMVAAIAVLTKDAGKLTMGQPLVILAPHAVEALVKQPPDRWLSNARMTHYQALLLDTDRVQFGPIVALNPATLLPLPEEGLQHDCLDILAEAHGTRPDLTDQPLPDADHTWYTDGSSFLQEGQRKAGAAVTTETEVVWAKALPAGTSAQRAELIALTQALKMAEGKKLNVYTDSRYAFATAHIHGEIYRRRGWLTSEGKEIKNKDEILALLKALFLPKRLSIIHCPGHQKGNRAEARGNRMADQAAREVATRETPETSTLLAGKRTADGSEFEKRTADGSEFESPKKKAKVE

SEQ ID NO: 2507 - protein, 2100 aa, synthetic construct
MPAAKRVKLDGGDKKYSIGLDIGTNSVGWAVITDEYKVPSKKFKVLGNTDRHSIKKNLIGALLFDSGETAEATRLKRTARRRYTRRKNRICYLQEIFSNEMAKVDDSFFHRLEESFLVEEDKKHERHPIFGNIVDEVAYHEKYPTIYHLRKKLVDSTDKADLRLIYLALAHMIKFRGHFLIEGDLNPDNSDVDKLFIQLVQTYNQLFEENPINASGVDAKAILSARLSKSRRLENLIAQLPGEKKNGLFGNLIALSLGLTPNFKSNFDLAEDAKLQLSKDTYDDDLDNLLAQIGDQYADLFLAAKNLSDAILLSDILRVNTEITKAPLSASMIKRYDEHHQDLTLLKALVRQQLPEKYKEIFFDQSKNGYAGYIDGGASQEEFYKFIKPILEKMDGTEELLVKLNREDLLRKQRTFDNGSIPHQIHLGELHAILRRQEDFYPFLKDNREKIEKILTFRIPYYVGPLARGNSRFAWMTRKSEETITPWNFEEVVDKGASAQSFIERMTNFDKNLPNEKVLPKHSLLYEYFTVYNELTKVKYVTEGMRKPAFLSGEQKKAIVDLLFKTNRKVTVKQLKEDYFKKIECFDSVEISGVEDRFNASLGTYHDLLKIIKDKDFLDNEENEDILEDIVLTLTLFEDREMIEERLKTYAHLFDDKVMKQLKRRRYTGWGRLSRKLINGIRDKQSGKTILDFLKSDGFANRNFMQLIHDDSLTFKEDIQKAQVSGQGDSLHEHIANLAGSPAIKKGILQTVKVVDELVKVMGRHKPENIVIEMARENQTTQKGQKNSRERMKRIEEGIKELGSQILKEHPVENTQLQNEKLYLYYLQNGRDMYVDQELDINRLSDYDVDHIVPQSFLKDDSIDNKVLTRSDKARGKSDNVPSEEVVKKMKNYWRQLLNAKLITQRKFDNLTKAERGGLSELDKAGFIKRQLVETRQITKHVAQILDSRMNTKYDENDKLIREVKVITLKSKLVSDFRKDFQFYKVREINNYHHAHDAYLNAVVGTALIKKYPKLESEFVYGDYKVYDVRKMIAKSEQEIGKATAKYFFYSNIMNFFKTEITLANGEIRKRPLIETNGETGEIVWDKGRDFATVRKVLSMPQVNIVKKTEVQTGGFSKESILPKRNSDKLIARKKDWDPKKYGGFDSPTVAYSVLVVAKVEKGKSKKLKSVKELLGITIMERSSFEKNPIDFLEAKGYKEVKKDLIIKLPKYSLFELENGRKRMLASAGELQKGNELALPSKYVNFLYLASHYEKLKGSPEDNEQKQLFVEQHKHYLDEIIEQISEFSKRVILADANLDKVLSAYNKHRDKPIREQAENIIHLFTLTNLGAPAAFKYFDTTIDRKRYTSTKEVLDATLIHQSITGLYETRIDLSQLGGDGGEAAAKEAAAKEAAAKGGTLNIEDEYRLHETSKGPDVPLGSTWLSDFPQAWAETGGMGLAVRQAPLIIPLKATSTPVSIKQYPMSQEARLGIKPHIQRLLDQGILVPCQSPWNTPLLPVKKPGTNDYRPVQDLREVNKRVEDIHPTVPNPYNLLSGLPPSHQWYTVLDLKDAFFCLRLHPTSQSLFAFEWRDPEMGISGQLTWTRLPQGFKNSPTLFNEALHRDLADFRIQHPDLILLQYVDDLLLAATSELDCQQGTRALLQTLGDLGYRASAKKAQICQKQVKYLGYLLKEGQRWLTEARKETVMGQPTPKTPRQLREFLGKAGFCRLFIPGFAEMAAPLYPLTKPGTLFEWGPDQQKAYQEIKQALLTAPALGLPDLTKPFELFVDEKQGYAKGVLTQKLGPWRRPVAYLSKKLDPVAAGWPPCLRMVAAIAVLTKDAGKLTMGQPLVILAPHAVEALVKQPPDRWLSNARMTHYQALLLDTDRVQFGPIVALNPATLLPLPEEGLQHDCLDILAEAHGTRPDLTDQPLPDADHTWYTDGSSFLQEGQRKAGAAVTTETEVVWAKALPAGTSAQRAELIALTQALKMAEGKKLNVYTDSRYAFATAHIHGEIYRRRGWLTSEGKEIKNKDEILALLKALFLPKRLSIIHCPGHQKGNRAEARGNRMADQAAREVATRETPETSTLLAGKRTADGSEFEKRTADGSEFESPKKKAKVE

SEQ ID NO: 2508 - protein, 2088 aa, synthetic construct
MPAAKRVKLDGGDKKYSIGLDIGTNSVGWAVITDEYKVPSKKFKVLGNTDRHSIKKNLIGALLFDSGETAEATRLKRTARRRYTRRKNRICYLQEIFSNEMAKVDDSFFHRLEESFLVEEDKKHERHPIFGNIVDEVAYHEKYPTIYHLRKKLVDSTDKADLRLIYLALAHMIKFRGHFLIEGDLNPDNSDVDKLFIQLVQTYNQLFEENPINASGVDAKAILSARLSKSRRLENLIAQLPGEKKNGLFGNLIALSLGLTPNFKSNFDLAEDAKLQLSKDTYDDDLDNLLAQIGDQYADLFLAAKNLSDAILLSDILRVNTEITKAPLSASMIKRYDEHHQDLTLLKALVRQQLPEKYKEIFFDQSKNGYAGYIDGGASQEEFYKFIKPILEKMDGTEELLVKLNREDLLRKQRTFDNGSIPHQIHLGELHAILRRQEDFYPFLKDNREKIEKILTFRIPYYVGPLARGNSRFAWMTRKSEETITPWNFEEVVDKGASAQSFIERMTNFDKNLPNEKVLPKHSLLYEYFTVYNELTKVKYVTEGMRKPAFLSGEQKKAIVDLLFKTNRKVTVKQLKEDYFKKIECFDSVEISGVEDRFNASLGTYHDLLKIIKDKDFLDNEENEDILEDIVLTLTLFEDREMIEERLKTYAHLFDDKVMKQLKRRRYTGWGRLSRKLINGIRDKQSGKTILDFLKSDGFANRNFMQLIHDDSLTFKEDIQKAQVSGQGDSLHEHIANLAGSPAIKKGILQTVKVVDELVKVMGRHKPENIVIEMARENQTTQKGQKNSRERMKRIEEGIKELGSQILKEHPVENTQLQNEKLYLYYLQNGRDMYVDQELDINRLSDYDVDHIVPQSFLKDDSIDNKVLTRSDKARGKSDNVPSEEVVKKMKNYWRQLLNAKLITQRKFDNLTKAERGGLSELDKAGFIKRQLVETRQITKHVAQILDSRMNTKYDENDKLIREVKVITLKSKLVSDFRKDFQFYKVREINNYHHAHDAYLNAVVGTALIKKYPKLESEFVYGDYKVYDVRKMIAKSEQEIGKATAKYFFYSNIMNFFKTEITLANGEIRKRPLIETNGETGEIVWDKGRDFATVRKVLSMPQVNIVKKTEVQTGGFSKESILPKRNSDKLIARKKDWDPKKYGGFDSPTVAYSVLVVAKVEKGKSKKLKSVKELLGITIMERSSFEKNPIDFLEAKGYKEVKKDLIIKLPKYSLFELENGRKRMLASAGELQKGNELALPSKYVNFLYLASHYEKLKGSPEDNEQKQLFVEQHKHYLDEIIEQISEFSKRVILADANLDKVLSAYNKHRDKPIREQAENIIHLFTLTNLGAPAAFKYFDTTIDRKRYTSTKEVLDATLIHQSITGLYETRIDLSQLGGDGGGSSGGTLNIEDEYRLHETSKGPDVPLGSTWLSDFPQAWAETGGMGLAVRQAPLIIPLKATSTPVSIKQYPMSQEARLGIKPHIQRLLDQGILVPCQSPWNTPLLPVKKPGTNDYRPVQDLREVNKRVEDIHPTVPNPYNLLSGLPPSHQWYTVLDLKDAFFCLRLHPTSQSLFAFEWRDPEMGISGQLTWTRLPQGFKNSPTLFNEALHRDLADFRIQHPDLILLQYVDDLLLAATSELDCQQGTRALLQTLGDLGYRASAKKAQICQKQVKYLGYLLKEGQRWLTEARKETVMGQPTPKTPRQLREFLGKAGFCRLFIPGFAEMAAPLYPLTKPGTLFEWGPDQQKAYQEIKQALLTAPALGLPDLTKPFELFVDEKQGYAKGVLTQKLGPWRRPVAYLSKKLDPVAAGWPPCLRMVAAIAVLTKDAGKLTMGQPLVILAPHAVEALVKQPPDRWLSNARMTHYQALLLDTDRVQFGPIVALNPATLLPLPEEGLQHDCLDILAEAHGTRPDLTDQPLPDADHTWYTDGSSFLQEGQRKAGAAVTTETEVVWAKALPAGTSAQRAELIALTQALKMAEGKKLNVYTDSRYAFATAHIHGEIYRRRGWLTSEGKEIKNKDEILALLKALFLPKRLSIIHCPGHQKGNRAEARGNRMADQAAREVATRETPETSTLLAGKRTADGSEFEKRTADGSEFESPKKKAKVE

SEQ ID NO: 2509 - protein, 2096 aa, synthetic construct
MPAAKRVKLDGGDKKYSIGLDIGTNSVGWAVITDEYKVPSKKFKVLGNTDRHSIKKNLIGALLFDSGETAEATRLKRTARRRYTRRKNRICYLQEIFSNEMAKVDDSFFHRLEESFLVEEDKKHERHPIFGNIVDEVAYHEKYPTIYHLRKKLVDSTDKADLRLIYLALAHMIKFRGHFLIEGDLNPDNSDVDKLFIQLVQTYNQLFEENPINASGVDAKAILSARLSKSRRLENLIAQLPGEKKNGLFGNLIALSLGLTPNFKSNFDLAEDAKLQLSKDTYDDDLDNLLAQIGDQYADLFLAAKNLSDAILLSDILRVNTEITKAPLSASMIKRYDEHHQDLTLLKALVRQQLPEKYKEIFFDQSKNGYAGYIDGGASQEEFYKFIKPILEKMDGTEELLVKLNREDLLRKQRTFDNGSIPHQIHLGELHAILRRQEDFYPFLKDNREKIEKILTFRIPYYVGPLARGNSRFAWMTRKSEETITPWNFEEVVDKGASAQSFIERMTNFDKNLPNEKVLPKHSLLYEYFTVYNELTKVKYVTEGMRKPAFLSGEQKKAIVDLLFKTNRKVTVKQLKEDYFKKIECFDSVEISGVEDRFNASLGTYHDLLKIIKDKDFLDNEENEDILEDIVLTLTLFEDREMIEERLKTYAHLFDDKVMKQLKRRRYTGWGRLSRKLINGIRDKQSGKTILDFLKSDGFANRNFMQLIHDDSLTFKEDIQKAQVSGQGDSLHEHIANLAGSPAIKKGILQTVKVVDELVKVMGRHKPENIVIEMARENQTTQKGQKNSRERMKRIEEGIKELGSQILKEHPVENTQLQNEKLYLYYLQNGRDMYVDQELDINRLSDYDVDHIVPQSFLKDDSIDNKVLTRSDKARGKSDNVPSEEVVKKMKNYWRQLLNAKLITQRKFDNLTKAERGGLSELDKAGFIKRQLVETRQITKHVAQILDSRMNTKYDENDKLIREVKVITLKSKLVSDFRKDFQFYKVREINNYHHAHDAYLNAVVGTALIKKYPKLESEFVYGDYKVYDVRKMIAKSEQEIGKATAKYFFYSNIMNFFKTEITLANGEIRKRPLIETNGETGEIVWDKGRDFATVRKVLSMPQVNIVKKTEVQTGGFSKESILPKRNSDKLIARKKDWDPKKYGGFDSPTVAYSVLVVAKVEKGKSKKLKSVKELLGITIMERSSFEKNPIDFLEAKGYKEVKKDLIIKLPKYSLFELENGRKRMLASAGELQKGNELALPSKYVNFLYLASHYEKLKGSPEDNEQKQLFVEQHKHYLDEIIEQISEFSKRVILADANLDKVLSAYNKHRDKPIREQAENIIHLFTLTNLGAPAAFKYFDTTIDRKRYTSTKEVLDATLIHQSITGLYETRIDLSQLGGDGGEAAAKGSSPAPGGTLNIEDEYRLHETSKGPDVPLGSTWLSDFPQAWAETGGMGLAVRQAPLIIPLKATSTPVSIKQYPMSQEARLGIKPHIQRLLDQGILVPCQSPWNTPLLPVKKPGTNDYRPVQDLREVNKRVEDIHPTVPNPYNLLSGLPPSHQWYTVLDLKDAFFCLRLHPTSQSLFAFEWRDPEMGISGQLTWTRLPQGFKNSPTLFNEALHRDLADFRIQHPDLILLQYVDDLLLAATSELDCQQGTRALLQTLGDLGYRASAKKAQICQKQVKYLGYLLKEGQRWLTEARKETVMGQPTPKTPRQLREFLGKAGFCRLFIPGFAEMAAPLYPLTKPGTLFEWGPDQQKAYQEIKQALLTAPALGLPDLTKPFELFVDEKQGYAKGVLTQKLGPWRRPVAYLSKKLDPVAAGWPPCLRMVAAIAVLTKDAGKLTMGQPLVILAPHAVEALVKQPPDRWLSNARMTHYQALLLDTDRVQFGPIVALNPATLLPLPEEGLQHDCLDILAEAHGTRPDLTDQPLPDADHTWYTDGSSFLQEGQRKAGAAVTTETEVVWAKALPAGTSAQRAELIALTQALKMAEGKKLNVYTDSRYAFATAHIHGEIYRRRGWLTSEGKEIKNKDEILALLKALFLPKRLSIIHCPGHQKGNRAEARGNRMADQAAREVATRETPETSTLLAGKRTADGSEFEKRTADGSEFESPKKKAKVE

SEQ ID NO: 2510 - protein, 2096 aa, synthetic construct
MPAAKRVKLDGGDKKYSIGLDIGTNSVGWAVITDEYKVPSKKFKVLGNTDRHSIKKNLIGALLFDSGETAEATRLKRTARRRYTRRKNRICYLQEIFSNEMAKVDDSFFHRLEESFLVEEDKKHERHPIFGNIVDEVAYHEKYPTIYHLRKKLVDSTDKADLRLIYLALAHMIKFRGHFLIEGDLNPDNSDVDKLFIQLVQTYNQLFEENPINASGVDAKAILSARLSKSRRLENLIAQLPGEKKNGLFGNLIALSLGLTPNFKSNFDLAEDAKLQLSKDTYDDDLDNLLAQIGDQYADLFLAAKNLSDAILLSDILRVNTEITKAPLSASMIKRYDEHHQDLTLLKALVRQQLPEKYKEIFFDQSKNGYAGYIDGGASQEEFYKFIKPILEKMDGTEELLVKLNREDLLRKQRTFDNGSIPHQIHLGELHAILRRQEDFYPFLKDNREKIEKILTFRIPYYVGPLARGNSRFAWMTRKSEETITPWNFEEVVDKGASAQSFIERMTNFDKNLPNEKVLPKHSLLYEYFTVYNELTKVKYVTEGMRKPAFLSGEQKKAIVDLLFKTNRKVTVKQLKEDYFKKIECFDSVEISGVEDRFNASLGTYHDLLKIIKDKDFLDNEENEDILEDIVLTLTLFEDREMIEERLKTYAHLFDDKVMKQLKRRRYTGWGRLSRKLINGIRDKQSGKTILDFLKSDGFANRNFMQLIHDDSLTFKEDIQKAQVSGQGDSLHEHIANLAGSPAIKKGILQTVKVVDELVKVMGRHKPENIVIEMARENQTTQKGQKNSRERMKRIEEGIKELGSQILKEHPVENTQLQNEKLYLYYLQNGRDMYVDQELDINRLSDYDVDHIVPQSFLKDDSIDNKVLTRSDKARGKSDNVPSEEVVKKMKNYWRQLLNAKLITQRKFDNLTKAERGGLSELDKAGFIKRQLVETRQITKHVAQILDSRMNTKYDENDKLIREVKVITLKSKLVSDFRKDFQFYKVREINNYHHAHDAYLNAVVGTALIKKYPKLESEFVYGDYKVYDVRKMIAKSEQEIGKATAKYFFYSNIMNFFKTEITLANGEIRKRPLIETNGETGEIVWDKGRDFATVRKVLSMPQVNIVKKTEVQTGGFSKESILPKRNSDKLIARKKDWDPKKYGGFDSPTVAYSVLVVAKVEKGKSKKLKSVKELLGITIMERSSFEKNPIDFLEAKGYKEVKKDLIIKLPKYSLFELENGRKRMLASAGELQKGNELALPSKYVNFLYLASHYEKLKGSPEDNEQKQLFVEQHKHYLDEIIEQISEFSKRVILADANLDKVLSAYNKHRDKPIREQAENIIHLFTLTNLGAPAAFKYFDTTIDRKRYTSTKEVLDATLIHQSITGLYETRIDLSQLGGDGGPAPAPAPAPAPGGTLNIEDEYRLHETSKGPDVPLGSTWLSDFPQAWAETGGMGLAVRQAPLIIPLKATSTPVSIKQYPMSQEARLGIKPHIQRLLDQGILVPCQSPWNTPLLPVKKPGTNDYRPVQDLREVNKRVEDIHPTVPNPYNLLSGLPPSHQWYTVLDLKDAFFCLRLHPTSQSLFAFEWRDPEMGISGQLTWTRLPQGFKNSPTLFNEALHRDLADFRIQHPDLILLQYVDDLLLAATSELDCQQGTRALLQTLGDLGYRASAKKAQICQKQVKYLGYLLKEGQRWLTEARKETVMGQPTPKTPRQLREFLGKAGFCRLFIPGFAEMAAPLYPLTKPGTLFEWGPDQQKAYQEIKQALLTAPALGLPDLTKPFELFVDEKQGYAKGVLTQKLGPWRRPVAYLSKKLDPVAAGWPPCLRMVAAIAVLTKDAGKLTMGQPLVILAPHAVEALVKQPPDRWLSNARMTHYQALLLDTDRVQFGPIVALNPATLLPLPEEGLQHDCLDILAEAHGTRPDLTDQPLPDADHTWYTDGSSFLQEGQRKAGAAVTTETEVVWAKALPAGTSAQRAELIALTQALKMAEGKKLNVYTDSRYAFATAHIHGEIYRRRGWLTSEGKEIKNKDEILALLKALFLPKRLSIIHCPGHQKGNRAEARGNRMADQAAREVATRETPETSTLLAGKRTADGSEFEKRTADGSEFESPKKKAKVE

SEQ ID NO: 2511 - protein, 2095 aa, synthetic construct
MPAAKRVKLDGGDKKYSIGLDIGTNSVGWAVITDEYKVPSKKFKVLGNTDRHSIKKNLIGALLFDSGETAEATRLKRTARRRYTRRKNRICYLQEIFSNEMAKVDDSFFHRLEESFLVEEDKKHERHPIFGNIVDEVAYHEKYPTIYHLRKKLVDSTDKADLRLIYLALAHMIKFRGHFLIEGDLNPDNSDVDKLFIQLVQTYNQLFEENPINASGVDAKAILSARLSKSRRLENLIAQLPGEKKNGLFGNLIALSLGLTPNFKSNFDLAEDAKLQLSKDTYDDDLDNLLAQIGDQYADLFLAAKNLSDAILLSDILRVNTEITKAPLSASMIKRYDEHHQDLTLLKALVRQQLPEKYKEIFFDQSKNGYAGYIDGGASQEEFYKFIKPILEKMDGTEELLVKLNREDLLRKQRTFDNGSIPHQIHLGELHAILRRQEDFYPFLKDNREKIEKILTFRIPYYVGPLARGNSRFAWMTRKSEETITPWNFEEVVDKGASAQSFIERMTNFDKNLPNEKVLPKHSLLYEYFTVYNELTKVKYVTEGMRKPAFLSGEQKKAIVDLLFKTNRKVTVKQLKEDYFKKIECFDSVEISGVEDRFNASLGTYHDLLKIIKDKDFLDNEENEDILEDIVLTLTLFEDREMIEERLKTYAHLFDDKVMKQLKRRRYTGWGRLSRKLINGIRDKQSGKTILDFLKSDGFANRNFMQLIHDDSLTFKEDIQKAQVSGQGDSLHEHIANLAGSPAIKKGILQTVKVVDELVKVMGRHKPENIVIEMARENQTTQKGQKNSRERMKRIEEGIKELGSQILKEHPVENTQLQNEKLYLYYLQNGRDMYVDQELDINRLSDYDVDHIVPQSFLKDDSIDNKVLTRSDKARGKSDNVPSEEVVKKMKNYWRQLLNAKLITQRKFDNLTKAERGGLSELDKAGFIKRQLVETRQITKHVAQILDSRMNTKYDENDKLIREVKVITLKSKLVSDFRKDFQFYKVREINNYHHAHDAYLNAVVGTALIKKYPKLESEFVYGDYKVYDVRKMIAKSEQEIGKATAKYFFYSNIMNFFKTEITLANGEIRKRPLIETNGETGEIVWDKGRDFATVRKVLSMPQVNIVKKTEVQTGGFSKESILPKRNSDKLIARKKDWDPKKYGGFDSPTVAYSVLVVAKVEKGKSKKLKSVKELLGITIMERSSFEKNPIDFLEAKGYKEVKKDLIIKLPKYSLFELENGRKRMLASAGELQKGNELALPSKYVNFLYLASHYEKLKGSPEDNEQKQLFVEQHKHYLDEIIEQISEFSKRVILADANLDKVLSAYNKHRDKPIREQAENIIHLFTLTNLGAPAAFKYFDTTIDRKRYTSTKEVLDATLIHQSITGLYETRIDLSQLGGDGGGGGGSGGGGSGGTLNIEDEYRLHETSKGPDVPLGSTWLSDFPQAWAETGGMGLAVRQAPLIIPLKATSTPVSIKQYPMSQEARLGIKPHIQRLLDQGILVPCQSPWNTPLLPVKKPGTNDYRPVQDLREVNKRVEDIHPTVPNPYNLLSGLPPSHQWYTVLDLKDAFFCLRLHPTSQSLFAFEWRDPEMGISGQLTWTRLPQGFKNSPTLFNEALHRDLADFRIQHPDLILLQYVDDLLLAATSELDCQQGTRALLQTLGDLGYRASAKKAQICQKQVKYLGYLLKEGQRWLTEARKETVMGQPTPKTPRQLREFLGKAGFCRLFIPGFAEMAAPLYPLTKPGTLFEWGPDQQKAYQEIKQALLTAPALGLPDLTKPFELFVDEKQGYAKGVLTQKLGPWRRPVAYLSKKLDPVAAGWPPCLRMVAAIAVLTKDAGKLTMGQPLVILAPHAVEALVKQPPDRWLSNARMTHYQALLLDTDRVQFGPIVALNPATLLPLPEEGLQHDCLDILAEAHGTRPDLTDQPLPDADHTWYTDGSSFLQEGQRKAGAAVTTETEVVWAKALPAGTSAQRAELIALTQALKMAEGKKLNVYTDSRYAFATAHIHGEIYRRRGWLTSEGKEIKNKDEILALLKALFLPKRLSIIHCPGHQKGNRAEARGNRMADQAAREVATRETPETSTLLAGKRTADGSEFEKRTADGSEFESPKKKAKVE

SEQ ID NO: 2512 - protein, 2096 aa, synthetic construct
MPAAKRVKLDGGDKKYSIGLDIGTNSVGWAVITDEYKVPSKKFKVLGNTDRHSIKKNLIGALLFDSGETAEATRLKRTARRRYTRRKNRICYLQEIFSNEMAKVDDSFFHRLEESFLVEEDKKHERHPIFGNIVDEVAYHEKYPTIYHLRKKLVDSTDKADLRLIYLALAHMIKFRGHFLIEGDLNPDNSDVDKLFIQLVQTYNQLFEENPINASGVDAKAILSARLSKSRRLENLIAQLPGEKKNGLFGNLIALSLGLTPNFKSNFDLAEDAKLQLSKDTYDDDLDNLLAQIGDQYADLFLAAKNLSDAILLSDILRVNTEITKAPLSASMIKRYDEHHQDLTLLKALVRQQLPEKYKEIFFDQSKNGYAGYIDGGASQEEFYKFIKPILEKMDGTEELLVKLNREDLLRKQRTFDNGSIPHQIHLGELHAILRRQEDFYPFLKDNREKIEKILTFRIPYYVGPLARGNSRFAWMTRKSEETITPWNFEEVVDKGASAQSFIERMTNFDKNLPNEKVLPKHSLLYEYFTVYNELTKVKYVTEGMRKPAFLSGEQKKAIVDLLFKTNRKVTVKQLKEDYFKKIECFDSVEISGVEDRFNASLGTYHDLLKIIKDKDFLDNEENEDILEDIVLTLTLFEDREMIEERLKTYAHLFDDKVMKQLKRRRYTGWGRLSRKLINGIRDKQSGKTILDFLKSDGFANRNFMQLIHDDSLTFKEDIQKAQVSGQGDSLHEHIANLAGSPAIKKGILQTVKVVDELVKVMGRHKPENIVIEMARENQTTQKGQKNSRERMKRIEEGIKELGSQILKEHPVENTQLQNEKLYLYYLQNGRDMYVDQELDINRLSDYDVDHIVPQSFLKDDSIDNKVLTRSDKARGKSDNVPSEEVVKKMKNYWRQLLNAKLITQRKFDNLTKAERGGLSELDKAGFIKRQLVETRQITKHVAQILDSRMNTKYDENDKLIREVKVITLKSKLVSDFRKDFQFYKVREINNYHHAHDAYLNAVVGTALIKKYPKLESEFVYGDYKVYDVRKMIAKSEQEIGKATAKYFFYSNIMNFFKTEITLANGEIRKRPLIETNGETGEIVWDKGRDFATVRKVLSMPQVNIVKKTEVQTGGFSKESILPKRNSDKLIARKKDWDPKKYGGFDSPTVAYSVLVVAKVEKGKSKKLKSVKELLGITIMERSSFEKNPIDFLEAKGYKEVKKDLIIKLPKYSLFELENGRKRMLASAGELQKGNELALPSKYVNFLYLASHYEKLKGSPEDNEQKQLFVEQHKHYLDEIIEQISEFSKRVILADANLDKVLSAYNKHRDKPIREQAENIIHLFTLTNLGAPAAFKYFDTTIDRKRYTSTKEVLDATLIHQSITGLYETRIDLSQLGGDGGEAAAKPAPGGSGGTLNIEDEYRLHETSKGPDVPLGSTWLSDFPQAWAETGGMGLAVRQAPLIIPLKATSTPVSIKQYPMSQEARLGIKPHIQRLLDQGILVPCQSPWNTPLLPVKKPGTNDYRPVQDLREVNKRVEDIHPTVPNPYNLLSGLPPSHQWYTVLDLKDAFFCLRLHPTSQSLFAFEWRDPEMGISGQLTWTRLPQGFKNSPTLFNEALHRDLADFRIQHPDLILLQYVDDLLLAATSELDCQQGTRALLQTLGDLGYRASAKKAQICQKQVKYLGYLLKEGQRWLTEARKETVMGQPTPKTPRQLREFLGKAGFCRLFIPGFAEMAAPLYPLTKPGTLFEWGPDQQKAYQEIKQALLTAPALGLPDLTKPFELFVDEKQGYAKGVLTQKLGPWRRPVAYLSKKLDPVAAGWPPCLRMVAAIAVLTKDAGKLTMGQPLVILAPHAVEALVKQPPDRWLSNARMTHYQALLLDTDRVQFGPIVALNPATLLPLPEEGLQHDCLDILAEAHGTRPDLTDQPLPDADHTWYTDGSSFLQEGQRKAGAAVTTETEVVWAKALPAGTSAQRAELIALTQALKMAEGKKLNVYTDSRYAFATAHIHGEIYRRRGWLTSEGKEIKNKDEILALLKALFLPKRLSIIHCPGHQKGNRAEARGNRMADQAAREVATRETPETSTLLAGKRTADGSEFEKRTADGSEFESPKKKAKVE

SEQ ID NO: 2513 - protein, 2103 aa, synthetic construct
MPAAKRVKLDGGDKKYSIGLDIGTNSVGWAVITDEYKVPSKKFKVLGNTDRHSIKKNLIGALLFDSGETAEATRLKRTARRRYTRRKNRICYLQEIFSNEMAKVDDSFFHRLEESFLVEEDKKHERHPIFGNIVDEVAYHEKYPTIYHLRKKLVDSTDKADLRLIYLALAHMIKFRGHFLIEGDLNPDNSDVDKLFIQLVQTYNQLFEENPINASGVDAKAILSARLSKSRRLENLIAQLPGEKKNGLFGNLIALSLGLTPNFKSNFDLAEDAKLQLSKDTYDDDLDNLLAQIGDQYADLFLAAKNLSDAILLSDILRVNTEITKAPLSASMIKRYDEHHQDLTLLKALVRQQLPEKYKEIFFDQSKNGYAGYIDGGASQEEFYKFIKPILEKMDGTEELLVKLNREDLLRKQRTFDNGSIPHQIHLGELHAILRRQEDFYPFLKDNREKIEKILTFRIPYYVGPLARGNSRFAWMTRKSEETITPWNFEEVVDKGASAQSFIERMTNFDKNLPNEKVLPKHSLLYEYFTVYNELTKVKYVTEGMRKPAFLSGEQKKAIVDLLFKTNRKVTVKQLKEDYFKKIECFDSVEISGVEDRFNASLGTYHDLLKIIKDKDFLDNEENEDILEDIVLTLTLFEDREMIEERLKTYAHLFDDKVMKQLKRRRYTGWGRLSRKLINGIRDKQSGKTILDFLKSDGFANRNFMQLIHDDSLTFKEDIQKAQVSGQGDSLHEHIANLAGSPAIKKGILQTVKVVDELVKVMGRHKPENIVIEMARENQTTQKGQKNSRERMKRIEEGIKELGSQILKEHPVENTQLQNEKLYLYYLQNGRDMYVDQELDINRLSDYDVDHIVPQSFLKDDSIDNKVLTRSDKARGKSDNVPSEEVVKKMKNYWRQLLNAKLITQRKFDNLTKAERGGLSELDKAGFIKRQLVETRQITKHVAQILDSRMNTKYDENDKLIREVKVITLKSKLVSDFRKDFQFYKVREINNYHHAHDAYLNAVVGTALIKKYPKLESEFVYGDYKVYDVRKMIAKSEQEIGKATAKYFFYSNIMNFFKTEITLANGEIRKRPLIETNGETGEIVWDKGRDFATVRKVLSMPQVNIVKKTEVQTGGFSKESILPKRNSDKLIARKKDWDPKKYGGFDSPTVAYSVLVVAKVEKGKSKKLKSVKELLGITIMERSSFEKNPIDFLEAKGYKEVKKDLIIKLPKYSLFELENGRKRMLASAGELQKGNELALPSKYVNFLYLASHYEKLKGSPEDNEQKQLFVEQHKHYLDEIIEQISEFSKRVILADANLDKVLSAYNKHRDKPIREQAENIIHLFTLTNLGAPAAFKYFDTTIDRKRYTSTKEVLDATLIHQSITGLYETRIDLSQLGGDGGGGSGGSGGSGGSGGSGGSGGTLNIEDEYRLHETSKGPDVPLGSTWLSDFPQAWAETGGMGLAVRQAPLIIPLKATSTPVSIKQYPMSQEARLGIKPHIQRLLDQGILVPCQSPWNTPLLPVKKPGTNDYRPVQDLREVNKRVEDIHPTVPNPYNLLSGLPPSHQWYTVLDLKDAFFCLRLHPTSQSLFAFEWRDPEMGISGQLTWTRLPQGFKNSPTLFNEALHRDLADFRIQHPDLILLQYVDDLLLAATSELDCQQGTRALLQTLGDLGYRASAKKAQICQKQVKYLGYLLKEGQRWLTEARKETVMGQPTPKTPRQLREFLGKAGFCRLFIPGFAEMAAPLYPLTKPGTLFEWGPDQQKAYQEIKQALLTAPALGLPDLTKPFELFVDEKQGYAKGVLTQKLGPWRRPVAYLSKKLDPVAAGWPPCLRMVAAIAVLTKDAGKLTMGQPLVILAPHAVEALVKQPPDRWLSNARMTHYQALLLDTDRVQFGPIVALNPATLLPLPEEGLQHDCLDILAEAHGTRPDLTDQPLPDADHTWYTDGSSFLQEGQRKAGAAVTTETEVVWAKALPAGTSAQRAELIALTQALKMAEGKKLNVYTDSRYAFATAHIHGEIYRRRGWLTSEGKEIKNKDEILALLKALFLPKRLSIIHCPGHQKGNRAEARGNRMADQAAREVATRETPETSTLLAGKRTADGSEFEKRTADGSEFESPKKKAKVE

SEQ ID NO: 2514 - protein, 2096 aa, synthetic construct
MPAAKRVKLDGGDKKYSIGLDIGTNSVGWAVITDEYKVPSKKFKVLGNTDRHSIKKNLIGALLFDSGETAEATRLKRTARRRYTRRKNRICYLQEIFSNEMAKVDDSFFHRLEESFLVEEDKKHERHPIFGNIVDEVAYHEKYPTIYHLRKKLVDSTDKADLRLIYLALAHMIKFRGHFLIEGDLNPDNSDVDKLFIQLVQTYNQLFEENPINASGVDAKAILSARLSKSRRLENLIAQLPGEKKNGLFGNLIALSLGLTPNFKSNFDLAEDAKLQLSKDTYDDDLDNLLAQIGDQYADLFLAAKNLSDAILLSDILRVNTEITKAPLSASMIKRYDEHHQDLTLLKALVRQQLPEKYKEIFFDQSKNGYAGYIDGGASQEEFYKFIKPILEKMDGTEELLVKLNREDLLRKQRTFDNGSIPHQIHLGELHAILRRQEDFYPFLKDNREKIEKILTFRIPYYVGPLARGNSRFAWMTRKSEETITPWNFEEVVDKGASAQSFIERMTNFDKNLPNEKVLPKHSLLYEYFTVYNELTKVKYVTEGMRKPAFLSGEQKKAIVDLLFKTNRKVTVKQLKEDYFKKIECFDSVEISGVEDRFNASLGTYHDLLKIIKDKDFLDNEENEDILEDIVLTLTLFEDREMIEERLKTYAHLFDDKVMKQLKRRRYTGWGRLSRKLINGIRDKQSGKTILDFLKSDGFANRNFMQLIHDDSLTFKEDIQKAQVSGQGDSLHEHIANLAGSPAIKKGILQTVKVVDELVKVMGRHKPENIVIEMARENQTTQKGQKNSRERMKRIEEGIKELGSQILKEHPVENTQLQNEKLYLYYLQNGRDMYVDQELDINRLSDYDVDHIVPQSFLKDDSIDNKVLTRSDKARGKSDNVPSEEVVKKMKNYWRQLLNAKLITQRKFDNLTKAERGGLSELDKAGFIKRQLVETRQITKHVAQILDSRMNTKYDENDKLIREVKVITLKSKLVSDFRKDFQFYKVREINNYHHAHDAYLNAVVGTALIKKYPKLESEFVYGDYKVYDVRKMIAKSEQEIGKATAKYFFYSNIMNFFKTEITLANGEIRKRPLIETNGETGEIVWDKGRDFATVRKVLSMPQVNIVKKTEVQTGGFSKESILPKRNSDKLIARKKDWDPKKYGGFDSPTVAYSVLVVAKVEKGKSKKLKSVKELLGITIMERSSFEKNPIDFLEAKGYKEVKKDLIIKLPKYSLFELENGRKRMLASAGELQKGNELALPSKYVNFLYLASHYEKLKGSPEDNEQKQLFVEQHKHYLDEIIEQISEFSKRVILADANLDKVLSAYNKHRDKPIREQAENIIHLFTLTNLGAPAAFKYFDTTIDRKRYTSTKEVLDATLIHQSITGLYETRIDLSQLGGDGGPAPEAAAKGSSGGTLNIEDEYRLHETSKGPDVPLGSTWLSDFPQAWAETGGMGLAVRQAPLIIPLKATSTPVSIKQYPMSQEARLGIKPHIQRLLDQGILVPCQSPWNTPLLPVKKPGTNDYRPVQDLREVNKRVEDIHPTVPNPYNLLSGLPPSHQWYTVLDLKDAFFCLRLHPTSQSLFAFEWRDPEMGISGQLTWTRLPQGFKNSPTLFNEALHRDLADFRIQHPDLILLQYVDDLLLAATSELDCQQGTRALLQTLGDLGYRASAKKAQICQKQVKYLGYLLKEGQRWLTEARKETVMGQPTPKTPRQLREFLGKAGFCRLFIPGFAEMAAPLYPLTKPGTLFEWGPDQQKAYQEIKQALLTAPALGLPDLTKPFELFVDEKQGYAKGVLTQKLGPWRRPVAYLSKKLDPVAAGWPPCLRMVAAIAVLTKDAGKLTMGQPLVILAPHAVEALVKQPPDRWLSNARMTHYQALLLDTDRVQFGPIVALNPATLLPLPEEGLQHDCLDILAEAHGTRPDLTDQPLPDADHTWYTDGSSFLQEGQRKAGAAVTTETEVVWAKALPAGTSAQRAELIALTQALKMAEGKKLNVYTDSRYAFATAHIHGEIYRRRGWLTSEGKEIKNKDEILALLKALFLPKRLSIIHCPGHQKGNRAEARGNRMADQAAREVATRETPETSTLLAGKRTADGSEFEKRTADGSEFESPKKKAKVE

SEQ ID NO: 2515 - protein, 2096 aa, synthetic construct
MPAAKRVKLDGGDKKYSIGLDIGTNSVGWAVITDEYKVPSKKFKVLGNTDRHSIKKNLIGALLFDSGETAEATRLKRTARRRYTRRKNRICYLQEIFSNEMAKVDDSFFHRLEESFLVEEDKKHERHPIFGNIVDEVAYHEKYPTIYHLRKKLVDSTDKADLRLIYLALAHMIKFRGHFLIEGDLNPDNSDVDKLFIQLVQTYNQLFEENPINASGVDAKAILSARLSKSRRLENLIAQLPGEKKNGLFGNLIALSLGLTPNFKSNFDLAEDAKLQLSKDTYDDDLDNLLAQIGDQYADLFLAAKNLSDAILLSDILRVNTEITKAPLSASMIKRYDEHHQDLTLLKALVRQQLPEKYKEIFFDQSKNGYAGYIDGGASQEEFYKFIKPILEKMDGTEELLVKLNREDLLRKQRTFDNGSIPHQIHLGELHAILRRQEDFYPFLKDNREKIEKILTFRIPYYVGPLARGNSRFAWMTRKSEETITPWNFEEVVDKGASAQSFIERMTNFDKNLPNEKVLPKHSLLYEYFTVYNELTKVKYVTEGMRKPAFLSGEQKKAIVDLLFKTNRKVTVKQLKEDYFKKIECFDSVEISGVEDRFNASLGTYHDLLKIIKDKDFLDNEENEDILEDIVLTLTLFEDREMIEERLKTYAHLFDDKVMKQLKRRRYTGWGRLSRKLINGIRDKQSGKTILDFLKSDGFANRNFMQLIHDDSLTFKEDIQKAQVSGQGDSLHEHIANLAGSPAIKKGILQTVKVVDELVKVMGRHKPENIVIEMARENQTTQKGQKNSRERMKRIEEGIKELGSQILKEHPVENTQLQNEKLYLYYLQNGRDMYVDQELDINRLSDYDVDHIVPQSFLKDDSIDNKVLTRSDKARGKSDNVPSEEVVKKMKNYWRQLLNAKLITQRKFDNLTKAERGGLSELDKAGFIKRQLVETRQITKHVAQILDSRMNTKYDENDKLIREVKVITLKSKLVSDFRKDFQFYKVREINNYHHAHDAYLNAVVGTALIKKYPKLESEFVYGDYKVYDVRKMIAKSEQEIGKATAKYFFYSNIMNFFKTEITLANGEIRKRPLIETNGETGEIVWDKGRDFATVRKVLSMPQVNIVKKTEVQTGGFSKESILPKRNSDKLIARKKDWDPKKYGGFDSPTVAYSVLVVAKVEKGKSKKLKSVKELLGITIMERSSFEKNPIDFLEAKGYKEVKKDLIIKLPKYSLFELENGRKRMLASAGELQKGNELALPSKYVNFLYLASHYEKLKGSPEDNEQKQLFVEQHKHYLDEIIEQISEFSKRVILADANLDKVLSAYNKHRDKPIREQAENIIHLFTLTNLGAPAAFKYFDTTIDRKRYTSTKEVLDATLIHQSITGLYETRIDLSQLGGDGGGSSGGGEAAAKGGTLNIEDEYRLHETSKGPDVPLGSTWLSDFPQAWAETGGMGLAVRQAPLIIPLKATSTPVSIKQYPMSQEARLGIKPHIQRLLDQGILVPCQSPWNTPLLPVKKPGTNDYRPVQDLREVNKRVEDIHPTVPNPYNLLSGLPPSHQWYTVLDLKDAFFCLRLHPTSQSLFAFEWRDPEMGISGQLTWTRLPQGFKNSPTLFNEALHRDLADFRIQHPDLILLQYVDDLLLAATSELDCQQGTRALLQTLGDLGYRASAKKAQICQKQVKYLGYLLKEGQRWLTEARKETVMGQPTPKTPRQLREFLGKAGFCRLFIPGFAEMAAPLYPLTKPGTLFEWGPDQQKAYQEIKQALLTAPALGLPDLTKPFELFVDEKQGYAKGVLTQKLGPWRRPVAYLSKKLDPVAAGWPPCLRMVAAIAVLTKDAGKLTMGQPLVILAPHAVEALVKQPPDRWLSNARMTHYQALLLDTDRVQFGPIVALNPATLLPLPEEGLQHDCLDILAEAHGTRPDLTDQPLPDADHTWYTDGSSFLQEGQRKAGAAVTTETEVVWAKALPAGTSAQRAELIALTQALKMAEGKKLNVYTDSRYAFATAHIHGEIYRRRGWLTSEGKEIKNKDEILALLKALFLPKRLSIIHCPGHQKGNRAEARGNRMADQAAREVATRETPETSTLLAGKRTADGSEFEKRTADGSEFESPKKKAKVE

SEQ ID NO: 2516 - protein, 2100 aa, synthetic construct
MPAAKRVKLDGGDKKYSIGLDIGTNSVGWAVITDEYKVPSKKFKVLGNTDRHSIKKNLIGALLFDSGETAEATRLKRTARRRYTRRKNRICYLQEIFSNEMAKVDDSFFHRLEESFLVEEDKKHERHPIFGNIVDEVAYHEKYPTIYHLRKKLVDSTDKADLRLIYLALAHMIKFRGHFLIEGDLNPDNSDVDKLFIQLVQTYNQLFEENPINASGVDAKAILSARLSKSRRLENLIAQLPGEKKNGLFGNLIALSLGLTPNFKSNFDLAEDAKLQLSKDTYDDDLDNLLAQIGDQYADLFLAAKNLSDAILLSDILRVNTEITKAPLSASMIKRYDEHHQDLTLLKALVRQQLPEKYKEIFFDQSKNGYAGYIDGGASQEEFYKFIKPILEKMDGTEELLVKLNREDLLRKQRTFDNGSIPHQIHLGELHAILRRQEDFYPFLKDNREKIEKILTFRIPYYVGPLARGNSRFAWMTRKSEETITPWNFEEVVDKGASAQSFIERMTNFDKNLPNEKVLPKHSLLYEYFTVYNELTKVKYVTEGMRKPAFLSGEQKKAIVDLLFKTNRKVTVKQLKEDYFKKIECFDSVEISGVEDRFNASLGTYHDLLKIIKDKDFLDNEENEDILEDIVLTLTLFEDREMIEERLKTYAHLFDDKVMKQLKRRRYTGWGRLSRKLINGIRDKQSGKTILDFLKSDGFANRNFMQLIHDDSLTFKEDIQKAQVSGQGDSLHEHIANLAGSPAIKKGILQTVKVVDELVKVMGRHKPENIVIEMARENQTTQKGQKNSRERMKRIEEGIKELGSQILKEHPVENTQLQNEKLYLYYLQNGRDMYVDQELDINRLSDYDVDHIVPQSFLKDDSIDNKVLTRSDKARGKSDNVPSEEVVKKMKNYWRQLLNAKLITQRKFDNLTKAERGGLSELDKAGFIKRQLVETRQITKHVAQILDSRMNTKYDENDKLIREVKVITLKSKLVSDFRKDFQFYKVREINNYHHAHDAYLNAVVGTALIKKYPKLESEFVYGDYKVYDVRKMIAKSEQEIGKATAKYFFYSNIMNFFKTEITLANGEIRKRPLIETNGETGEIVWDKGRDFATVRKVLSMPQVNIVKKTEVQTGGFSKESILPKRNSDKLIARKKDWDPKKYGGFDSPTVAYSVLVVAKVEKGKSKKLKSVKELLGITIMERSSFEKNPIDFLEAKGYKEVKKDLIIKLPKYSLFELENGRKRMLASAGELQKGNELALPSKYVNFLYLASHYEKLKGSPEDNEQKQLFVEQHKHYLDEIIEQISEFSKRVILADANLDKVLSAYNKHRDKPIREQAENIIHLFTLTNLGAPAAFKYFDTTIDRKRYTSTKEVLDATLIHQSITGLYETRIDLSQLGGDGGGGGGSGGGGSGGGGSGGTLNIEDEYRLHETSKGPDVPLGSTWLSDFPQAWAETGGMGLAVRQAPLIIPLKATSTPVSIKQYPMSQEARLGIKPHIQRLLDQGILVPCQSPWNTPLLPVKKPGTNDYRPVQDLREVNKRVEDIHPTVPNPYNLLSGLPPSHQWYTVLDLKDAFFCLRLHPTSQSLFAFEWRDPEMGISGQLTWTRLPQGFKNSPTLFNEALHRDLADFRIQHPDLILLQYVDDLLLAATSELDCQQGTRALLQTLGDLGYRASAKKAQICQKQVKYLGYLLKEGQRWLTEARKETVMGQPTPKTPRQLREFLGKAGFCRLFIPGFAEMAAPLYPLTKPGTLFEWGPDQQKAYQEIKQALLTAPALGLPDLTKPFELFVDEKQGYAKGVLTQKLGPWRRPVAYLSKKLDPVAAGWPPCLRMVAAIAVLTKDAGKLTMGQPLVILAPHAVEALVKQPPDRWLSNARMTHYQALLLDTDRVQFGPIVALNPATLLPLPEEGLQHDCLDILAEAHGTRPDLTDQPLPDADHTWYTDGSSFLQEGQRKAGAAVTTETEVVWAKALPAGTSAQRAELIALTQALKMAEGKKLNVYTDSRYAFATAHIHGEIYRRRGWLTSEGKEIKNKDEILALLKALFLPKRLSIIHCPGHQKGNRAEARGNRMADQAAREVATRETPETSTLLAGKRTADGSEFEKRTADGSEFESPKKKAKVE

SEQ ID NO: 2517 - protein, 2093 aa, synthetic construct
MPAAKRVKLDGGDKKYSIGLDIGTNSVGWAVITDEYKVPSKKFKVLGNTDRHSIKKNLIGALLFDSGETAEATRLKRTARRRYTRRKNRICYLQEIFSNEMAKVDDSFFHRLEESFLVEEDKKHERHPIFGNIVDEVAYHEKYPTIYHLRKKLVDSTDKADLRLIYLALAHMIKFRGHFLIEGDLNPDNSDVDKLFIQLVQTYNQLFEENPINASGVDAKAILSARLSKSRRLENLIAQLPGEKKNGLFGNLIALSLGLTPNFKSNFDLAEDAKLQLSKDTYDDDLDNLLAQIGDQYADLFLAAKNLSDAILLSDILRVNTEITKAPLSASMIKRYDEHHQDLTLLKALVRQQLPEKYKEIFFDQSKNGYAGYIDGGASQEEFYKFIKPILEKMDGTEELLVKLNREDLLRKQRTFDNGSIPHQIHLGELHAILRRQEDFYPFLKDNREKIEKILTFRIPYYVGPLARGNSRFAWMTRKSEETITPWNFEEVVDKGASAQSFIERMTNFDKNLPNEKVLPKHSLLYEYFTVYNELTKVKYVTEGMRKPAFLSGEQKKAIVDLLFKTNRKVTVKQLKEDYFKKIECFDSVEISGVEDRFNASLGTYHDLLKIIKDKDFLDNEENEDILEDIVLTLTLFEDREMIEERLKTYAHLFDDKVMKQLKRRRYTGWGRLSRKLINGIRDKQSGKTILDFLKSDGFANRNFMQLIHDDSLTFKEDIQKAQVSGQGDSLHEHIANLAGSPAIKKGILQTVKVVDELVKVMGRHKPENIVIEMARENQTTQKGQKNSRERMKRIEEGIKELGSQILKEHPVENTQLQNEKLYLYYLQNGRDMYVDQELDINRLSDYDVDHIVPQSFLKDDSIDNKVLTRSDKARGKSDNVPSEEVVKKMKNYWRQLLNAKLITQRKFDNLTKAERGGLSELDKAGFIKRQLVETRQITKHVAQILDSRMNTKYDENDKLIREVKVITLKSKLVSDFRKDFQFYKVREINNYHHAHDAYLNAVVGTALIKKYPKLESEFVYGDYKVYDVRKMIAKSEQEIGKATAKYFFYSNIMNFFKTEITLANGEIRKRPLIETNGETGEIVWDKGRDFATVRKVLSMPQVNIVKKTEVQTGGFSKESILPKRNSDKLIARKKDWDPKKYGGFDSPTVAYSVLVVAKVEKGKSKKLKSVKELLGITIMERSSFEKNPIDFLEAKGYKEVKKDLIIKLPKYSLFELENGRKRMLASAGELQKGNELALPSKYVNFLYLASHYEKLKGSPEDNEQKQLFVEQHKHYLDEIIEQISEFSKRVILADANLDKVLSAYNKHRDKPIREQAENIIHLFTLTNLGAPAAFKYFDTTIDRKRYTSTKEVLDATLIHQSITGLYETRIDLSQLGGDGGEAAAKGGGGGTLNIEDEYRLHETSKGPDVPLGSTWLSDFPQAWAETGGMGLAVRQAPLIIPLKATSTPVSIKQYPMSQEARLGIKPHIQRLLDQGILVPCQSPWNTPLLPVKKPGTNDYRPVQDLREVNKRVEDIHPTVPNPYNLLSGLPPSHQWYTVLDLKDAFFCLRLHPTSQSLFAFEWRDPEMGISGQLTWTRLPQGFKNSPTLFNEALHRDLADFRIQHPDLILLQYVDDLLLAATSELDCQQGTRALLQTLGDLGYRASAKKAQICQKQVKYLGYLLKEGQRWLTEARKETVMGQPTPKTPRQLREFLGKAGFCRLFIPGFAEMAAPLYPLTKPGTLFEWGPDQQKAYQEIKQALLTAPALGLPDLTKPFELFVDEKQGYAKGVLTQKLGPWRRPVAYLSKKLDPVAAGWPPCLRMVAAIAVLTKDAGKLTMGQPLVILAPHAVEALVKQPPDRWLSNARMTHYQALLLDTDRVQFGPIVALNPATLLPLPEEGLQHDCLDILAEAHGTRPDLTDQPLPDADHTWYTDGSSFLQEGQRKAGAAVTTETEVVWAKALPAGTSAQRAELIALTQALKMAEGKKLNVYTDSRYAFATAHIHGEIYRRRGWLTSEGKEIKNKDEILALLKALFLPKRLSIIHCPGHQKGNRAEARGNRMADQAAREVATRETPETSTLLAGKRTADGSEFEKRTADGSEFESPKKKAKVE

SEQ ID NO: 2518 - protein, 2101 aa, synthetic construct
MPAAKRVKLDGGDKKYSIGLDIGTNSVGWAVITDEYKVPSKKFKVLGNTDRHSIKKNLIGALLFDSGETAEATRLKRTARRRYTRRKNRICYLQEIFSNEMAKVDDSFFHRLEESFLVEEDKKHERHPIFGNIVDEVAYHEKYPTIYHLRKKLVDSTDKADLRLIYLALAHMIKFRGHFLIEGDLNPDNSDVDKLFIQLVQTYNQLFEENPINASGVDAKAILSARLSKSRRLENLIAQLPGEKKNGLFGNLIALSLGLTPNFKSNFDLAEDAKLQLSKDTYDDDLDNLLAQIGDQYADLFLAAKNLSDAILLSDILRVNTEITKAPLSASMIKRYDEHHQDLTLLKALVRQQLPEKYKEIFFDQSKNGYAGYIDGGASQEEFYKFIKPILEKMDGTEELLVKLNREDLLRKQRTFDNGSIPHQIHLGELHAILRRQEDFYPFLKDNREKIEKILTFRIPYYVGPLARGNSRFAWMTRKSEETITPWNFEEVVDKGASAQSFIERMTNFDKNLPNEKVLPKHSLLYEYFTVYNELTKVKYVTEGMRKPAFLSGEQKKAIVDLLFKTNRKVTVKQLKEDYFKKIECFDSVEISGVEDRFNASLGTYHDLLKIIKDKDFLDNEENEDILEDIVLTLTLFEDREMIEERLKTYAHLFDDKVMKQLKRRRYTGWGRLSRKLINGIRDKQSGKTILDFLKSDGFANRNFMQLIHDDSLTFKEDIQKAQVSGQGDSLHEHIANLAGSPAIKKGILQTVKVVDELVKVMGRHKPENIVIEMARENQTTQKGQKNSRERMKRIEEGIKELGSQILKEHPVENTQLQNEKLYLYYLQNGRDMYVDQELDINRLSDYDVDHIVPQSFLKDDSIDNKVLTRSDKARGKSDNVPSEEVVKKMKNYWRQLLNAKLITQRKFDNLTKAERGGLSELDKAGFIKRQLVETRQITKHVAQILDSRMNTKYDENDKLIREVKVITLKSKLVSDFRKDFQFYKVREINNYHHAHDAYLNAVVGTALIKKYPKLESEFVYGDYKVYDVRKMIAKSEQEIGKATAKYFFYSNIMNFFKTEITLANGEIRKRPLIETNGETGEIVWDKGRDFATVRKVLSMPQVNIVKKTEVQTGGFSKESILPKRNSDKLIARKKDWDPKKYGGFDSPTVAYSVLVVAKVEKGKSKKLKSVKELLGITIMERSSFEKNPIDFLEAKGYKEVKKDLIIKLPKYSLFELENGRKRMLASAGELQKGNELALPSKYVNFLYLASHYEKLKGSPEDNEQKQLFVEQHKHYLDEIIEQISEFSKRVILADANLDKVLSAYNKHRDKPIREQAENIIHLFTLTNLGAPAAFKYFDTTIDRKRYTSTKEVLDATLIHQSITGLYETRIDLSQLGGDGGSGSETPGTSESATPESGGTLNIEDEYRLHETSKGPDVPLGSTWLSDFPQAWAETGGMGLAVRQAPLIIPLKATSTPVSIKQYPMSQEARLGIKPHIQRLLDQGILVPCQSPWNTPLLPVKKPGTNDYRPVQDLREVNKRVEDIHPTVPNPYNLLSGLPPSHQWYTVLDLKDAFFCLRLHPTSQSLFAFEWRDPEMGISGQLTWTRLPQGFKNSPTLFNEALHRDLADFRIQHPDLILLQYVDDLLLAATSELDCQQGTRALLQTLGDLGYRASAKKAQICQKQVKYLGYLLKEGQRWLTEARKETVMGQPTPKTPRQLREFLGKAGFCRLFIPGFAEMAAPLYPLTKPGTLFEWGPDQQKAYQEIKQALLTAPALGLPDLTKPFELFVDEKQGYAKGVLTQKLGPWRRPVAYLSKKLDPVAAGWPPCLRMVAAIAVLTKDAGKLTMGQPLVILAPHAVEALVKQPPDRWLSNARMTHYQALLLDTDRVQFGPIVALNPATLLPLPEEGLQHDCLDILAEAHGTRPDLTDQPLPDADHTWYTDGSSFLQEGQRKAGAAVTTETEVVWAKALPAGTSAQRAELIALTQALKMAEGKKLNVYTDSRYAFATAHIHGEIYRRRGWLTSEGKEIKNKDEILALLKALFLPKRLSIIHCPGHQKGNRAEARGNRMADQAAREVATRETPETSTLLAGKRTADGSEFEKRTADGSEFESPKKKAKVE

SEQ ID NO: 2519 - protein, 2096 aa, synthetic construct
MPAAKRVKLDGGDKKYSIGLDIGTNSVGWAVITDEYKVPSKKFKVLGNTDRHSIKKNLIGALLFDSGETAEATRLKRTARRRYTRRKNRICYLQEIFSNEMAKVDDSFFHRLEESFLVEEDKKHERHPIFGNIVDEVAYHEKYPTIYHLRKKLVDSTDKADLRLIYLALAHMIKFRGHFLIEGDLNPDNSDVDKLFIQLVQTYNQLFEENPINASGVDAKAILSARLSKSRRLENLIAQLPGEKKNGLFGNLIALSLGLTPNFKSNFDLAEDAKLQLSKDTYDDDLDNLLAQIGDQYADLFLAAKNLSDAILLSDILRVNTEITKAPLSASMIKRYDEHHQDLTLLKALVRQQLPEKYKEIFFDQSKNGYAGYIDGGASQEEFYKFIKPILEKMDGTEELLVKLNREDLLRKQRTFDNGSIPHQIHLGELHAILRRQEDFYPFLKDNREKIEKILTFRIPYYVGPLARGNSRFAWMTRKSEETITPWNFEEVVDKGASAQSFIERMTNFDKNLPNEKVLPKHSLLYEYFTVYNELTKVKYVTEGMRKPAFLSGEQKKAIVDLLFKTNRKVTVKQLKEDYFKKIECFDSVEISGVEDRFNASLGTYHDLLKIIKDKDFLDNEENEDILEDIVLTLTLFEDREMIEERLKTYAHLFDDKVMKQLKRRRYTGWGRLSRKLINGIRDKQSGKTILDFLKSDGFANRNFMQLIHDDSLTFKEDIQKAQVSGQGDSLHEHIANLAGSPAIKKGILQTVKVVDELVKVMGRHKPENIVIEMARENQTTQKGQKNSRERMKRIEEGIKELGSQILKEHPVENTQLQNEKLYLYYLQNGRDMYVDQELDINRLSDYDVDHIVPQSFLKDDSIDNKVLTRSDKARGKSDNVPSEEVVKKMKNYWRQLLNAKLITQRKFDNLTKAERGGLSELDKAGFIKRQLVETRQITKHVAQILDSRMNTKYDENDKLIREVKVITLKSKLVSDFRKDFQFYKVREINNYHHAHDAYLNAVVGTALIKKYPKLESEFVYGDYKVYDVRKMIAKSEQEIGKATAKYFFYSNIMNFFKTEITLANGEIRKRPLIETNGETGEIVWDKGRDFATVRKVLSMPQVNIVKKTEVQTGGFSKESILPKRNSDKLIARKKDWDPKKYGGFDSPTVAYSVLVVAKVEKGKSKKLKSVKELLGITIMERSSFEKNPIDFLEAKGYKEVKKDLIIKLPKYSLFELENGRKRMLASAGELQKGNELALPSKYVNFLYLASHYEKLKGSPEDNEQKQLFVEQHKHYLDEIIEQISEFSKRVILADANLDKVLSAYNKHRDKPIREQAENIIHLFTLTNLGAPAAFKYFDTTIDRKRYTSTKEVLDATLIHQSITGLYETRIDLSQLGGDGGEAAAKPAPGSSGGTLNIEDEYRLHETSKGPDVPLGSTWLSDFPQAWAETGGMGLAVRQAPLIIPLKATSTPVSIKQYPMSQEARLGIKPHIQRLLDQGILVPCQSPWNTPLLPVKKPGTNDYRPVQDLREVNKRVEDIHPTVPNPYNLLSGLPPSHQWYTVLDLKDAFFCLRLHPTSQSLFAFEWRDPEMGISGQLTWTRLPQGFKNSPTLFNEALHRDLADFRIQHPDLILLQYVDDLLLAATSELDCQQGTRALLQTLGDLGYRASAKKAQICQKQVKYLGYLLKEGQRWLTEARKETVMGQPTPKTPRQLREFLGKAGFCRLFIPGFAEMAAPLYPLTKPGTLFEWGPDQQKAYQEIKQALLTAPALGLPDLTKPFELFVDEKQGYAKGVLTQKLGPWRRPVAYLSKKLDPVAAGWPPCLRMVAAIAVLTKDAGKLTMGQPLVILAPHAVEALVKQPPDRWLSNARMTHYQALLLDTDRVQFGPIVALNPATLLPLPEEGLQHDCLDILAEAHGTRPDLTDQPLPDADHTWYTDGSSFLQEGQRKAGAAVTTETEVVWAKALPAGTSAQRAELIALTQALKMAEGKKLNVYTDSRYAFATAHIHGEIYRRRGWLTSEGKEIKNKDEILALLKALFLPKRLSIIHCPGHQKGNRAEARGNRMADQAAREVATRETPETSTLLAGKRTADGSEFEKRTADGSEFESPKKKAKVE

SEQ ID NO: 2520 - protein, 2091 aa, synthetic construct
MPAAKRVKLDGGDKKYSIGLDIGTNSVGWAVITDEYKVPSKKFKVLGNTDRHSIKKNLIGALLFDSGETAEATRLKRTARRRYTRRKNRICYLQEIFSNEMAKVDDSFFHRLEESFLVEEDKKHERHPIFGNIVDEVAYHEKYPTIYHLRKKLVDSTDKADLRLIYLALAHMIKFRGHFLIEGDLNPDNSDVDKLFIQLVQTYNQLFEENPINASGVDAKAILSARLSKSRRLENLIAQLPGEKKNGLFGNLIALSLGLTPNFKSNFDLAEDAKLQLSKDTYDDDLDNLLAQIGDQYADLFLAAKNLSDAILLSDILRVNTEITKAPLSASMIKRYDEHHQDLTLLKALVRQQLPEKYKEIFFDQSKNGYAGYIDGGASQEEFYKFIKPILEKMDGTEELLVKLNREDLLRKQRTFDNGSIPHQIHLGELHAILRRQEDFYPFLKDNREKIEKILTFRIPYYVGPLARGNSRFAWMTRKSEETITPWNFEEVVDKGASAQSFIERMTNFDKNLPNEKVLPKHSLLYEYFTVYNELTKVKYVTEGMRKPAFLSGEQKKAIVDLLFKTNRKVTVKQLKEDYFKKIECFDSVEISGVEDRFNASLGTYHDLLKIIKDKDFLDNEENEDILEDIVLTLTLFEDREMIEERLKTYAHLFDDKVMKQLKRRRYTGWGRLSRKLINGIRDKQSGKTILDFLKSDGFANRNFMQLIHDDSLTFKEDIQKAQVSGQGDSLHEHIANLAGSPAIKKGILQTVKVVDELVKVMGRHKPENIVIEMARENQTTQKGQKNSRERMKRIEEGIKELGSQILKEHPVENTQLQNEKLYLYYLQNGRDMYVDQELDINRLSDYDVDHIVPQSFLKDDSIDNKVLTRSDKARGKSDNVPSEEVVKKMKNYWRQLLNAKLITQRKFDNLTKAERGGLSELDKAGFIKRQLVETRQITKHVAQILDSRMNTKYDENDKLIREVKVITLKSKLVSDFRKDFQFYKVREINNYHHAHDAYLNAVVGTALIKKYPKLESEFVYGDYKVYDVRKMIAKSEQEIGKATAKYFFYSNIMNFFKTEITLANGEIRKRPLIETNGETGEIVWDKGRDFATVRKVLSMPQVNIVKKTEVQTGGFSKESILPKRNSDKLIARKKDWDPKKYGGFDSPTVAYSVLVVAKVEKGKSKKLKSVKELLGITIMERSSFEKNPIDFLEAKGYKEVKKDLIIKLPKYSLFELENGRKRMLASAGELQKGNELALPSKYVNFLYLASHYEKLKGSPEDNEQKQLFVEQHKHYLDEIIEQISEFSKRVILADANLDKVLSAYNKHRDKPIREQAENIIHLFTLTNLGAPAAFKYFDTTIDRKRYTSTKEVLDATLIHQSITGLYETRIDLSQLGGDGGGSSGSSGGTLNIEDEYRLHETSKGPDVPLGSTWLSDFPQAWAETGGMGLAVRQAPLIIPLKATSTPVSIKQYPMSQEARLGIKPHIQRLLDQGILVPCQSPWNTPLLPVKKPGTNDYRPVQDLREVNKRVEDIHPTVPNPYNLLSGLPPSHQWYTVLDLKDAFFCLRLHPTSQSLFAFEWRDPEMGISGQLTWTRLPQGFKNSPTLFNEALHRDLADFRIQHPDLILLQYVDDLLLAATSELDCQQGTRALLQTLGDLGYRASAKKAQICQKQVKYLGYLLKEGQRWLTEARKETVMGQPTPKTPRQLREFLGKAGFCRLFIPGFAEMAAPLYPLTKPGTLFEWGPDQQKAYQEIKQALLTAPALGLPDLTKPFELFVDEKQGYAKGVLTQKLGPWRRPVAYLSKKLDPVAAGWPPCLRMVAAIAVLTKDAGKLTMGQPLVILAPHAVEALVKQPPDRWLSNARMTHYQALLLDTDRVQFGPIVALNPATLLPLPEEGLQHDCLDILAEAHGTRPDLTDQPLPDADHTWYTDGSSFLQEGQRKAGAAVTTETEVVWAKALPAGTSAQRAELIALTQALKMAEGKKLNVYTDSRYAFATAHIHGEIYRRRGWLTSEGKEIKNKDEILALLKALFLPKRLSIIHCPGHQKGNRAEARGNRMADQAAREVATRETPETSTLLAGKRTADGSEFEKRTADGSEFESPKKKAKVE

SEQ ID NO: 2521 - protein, 2096 aa, synthetic construct
MPAAKRVKLDGGDKKYSIGLDIGTNSVGWAVITDEYKVPSKKFKVLGNTDRHSIKKNLIGALLFDSGETAEATRLKRTARRRYTRRKNRICYLQEIFSNEMAKVDDSFFHRLEESFLVEEDKKHERHPIFGNIVDEVAYHEKYPTIYHLRKKLVDSTDKADLRLIYLALAHMIKFRGHFLIEGDLNPDNSDVDKLFIQLVQTYNQLFEENPINASGVDAKAILSARLSKSRRLENLIAQLPGEKKNGLFGNLIALSLGLTPNFKSNFDLAEDAKLQLSKDTYDDDLDNLLAQIGDQYADLFLAAKNLSDAILLSDILRVNTEITKAPLSASMIKRYDEHHQDLTLLKALVRQQLPEKYKEIFFDQSKNGYAGYIDGGASQEEFYKFIKPILEKMDGTEELLVKLNREDLLRKQRTFDNGSIPHQIHLGELHAILRRQEDFYPFLKDNREKIEKILTFRIPYYVGPLARGNSRFAWMTRKSEETITPWNFEEVVDKGASAQSFIERMTNFDKNLPNEKVLPKHSLLYEYFTVYNELTKVKYVTEGMRKPAFLSGEQKKAIVDLLFKTNRKVTVKQLKEDYFKKIECFDSVEISGVEDRFNASLGTYHDLLKIIKDKDFLDNEENEDILEDIVLTLTLFEDREMIEERLKTYAHLFDDKVMKQLKRRRYTGWGRLSRKLINGIRDKQSGKTILDFLKSDGFANRNFMQLIHDDSLTFKEDIQKAQVSGQGDSLHEHIANLAGSPAIKKGILQTVKVVDELVKVMGRHKPENIVIEMARENQTTQKGQKNSRERMKRIEEGIKELGSQILKEHPVENTQLQNEKLYLYYLQNGRDMYVDQELDINRLSDYDVDHIVPQSFLKDDSIDNKVLTRSDKARGKSDNVPSEEVVKKMKNYWRQLLNAKLITQRKFDNLTKAERGGLSELDKAGFIKRQLVETRQITKHVAQILDSRMNTKYDENDKLIREVKVITLKSKLVSDFRKDFQFYKVREINNYHHAHDAYLNAVVGTALIKKYPKLESEFVYGDYKVYDVRKMIAKSEQEIGKATAKYFFYSNIMNFFKTEITLANGEIRKRPLIETNGETGEIVWDKGRDFATVRKVLSMPQVNIVKKTEVQTGGFSKESILPKRNSDKLIARKKDWDPKKYGGFDSPTVAYSVLVVAKVEKGKSKKLKSVKELLGITIMERSSFEKNPIDFLEAKGYKEVKKDLIIKLPKYSLFELENGRKRMLASAGELQKGNELALPSKYVNFLYLASHYEKLKGSPEDNEQKQLFVEQHKHYLDEIIEQISEFSKRVILADANLDKVLSAYNKHRDKPIREQAENIIHLFTLTNLGAPAAFKYFDTTIDRKRYTSTKEVLDATLIHQSITGLYETRIDLSQLGGDGGGGGEAAAKGGSGGTLNIEDEYRLHETSKGPDVPLGSTWLSDFPQAWAETGGMGLAVRQAPLIIPLKATSTPVSIKQYPMSQEARLGIKPHIQRLLDQGILVPCQSPWNTPLLPVKKPGTNDYRPVQDLREVNKRVEDIHPTVPNPYNLLSGLPPSHQWYTVLDLKDAFFCLRLHPTSQSLFAFEWRDPEMGISGQLTWTRLPQGFKNSPTLFNEALHRDLADFRIQHPDLILLQYVDDLLLAATSELDCQQGTRALLQTLGDLGYRASAKKAQICQKQVKYLGYLLKEGQRWLTEARKETVMGQPTPKTPRQLREFLGKAGFCRLFIPGFAEMAAPLYPLTKPGTLFEWGPDQQKAYQEIKQALLTAPALGLPDLTKPFELFVDEKQGYAKGVLTQKLGPWRRPVAYLSKKLDPVAAGWPPCLRMVAAIAVLTKDAGKLTMGQPLVILAPHAVEALVKQPPDRWLSNARMTHYQALLLDTDRVQFGPIVALNPATLLPLPEEGLQHDCLDILAEAHGTRPDLTDQPLPDADHTWYTDGSSFLQEGQRKAGAAVTTETEVVWAKALPAGTSAQRAELIALTQALKMAEGKKLNVYTDSRYAFATAHIHGEIYRRRGWLTSEGKEIKNKDEILALLKALFLPKRLSIIHCPGHQKGNRAEARGNRMADQAAREVATRETPETSTLLAGKRTADGSEFEKRTADGSEFESPKKKAKVE

SEQ ID NO: 2522 - protein, 2105 aa, synthetic construct
MPAAKRVKLDGGDKKYSIGLDIGTNSVGWAVITDEYKVPSKKFKVLGNTDRHSIKKNLIGALLFDSGETAEATRLKRTARRRYTRRKNRICYLQEIFSNEMAKVDDSFFHRLEESFLVEEDKKHERHPIFGNIVDEVAYHEKYPTIYHLRKKLVDSTDKADLRLIYLALAHMIKFRGHFLIEGDLNPDNSDVDKLFIQLVQTYNQLFEENPINASGVDAKAILSARLSKSRRLENLIAQLPGEKKNGLFGNLIALSLGLTPNFKSNFDLAEDAKLQLSKDTYDDDLDNLLAQIGDQYADLFLAAKNLSDAILLSDILRVNTEITKAPLSASMIKRYDEHHQDLTLLKALVRQQLPEKYKEIFFDQSKNGYAGYIDGGASQEEFYKFIKPILEKMDGTEELLVKLNREDLLRKQRTFDNGSIPHQIHLGELHAILRRQEDFYPFLKDNREKIEKILTFRIPYYVGPLARGNSRFAWMTRKSEETITPWNFEEVVDKGASAQSFIERMTNFDKNLPNEKVLPKHSLLYEYFTVYNELTKVKYVTEGMRKPAFLSGEQKKAIVDLLFKTNRKVTVKQLKEDYFKKIECFDSVEISGVEDRFNASLGTYHDLLKIIKDKDFLDNEENEDILEDIVLTLTLFEDREMIEERLKTYAHLFDDKVMKQLKRRRYTGWGRLSRKLINGIRDKQSGKTILDFLKSDGFANRNFMQLIHDDSLTFKEDIQKAQVSGQGDSLHEHIANLAGSPAIKKGILQTVKVVDELVKVMGRHKPENIVIEMARENQTTQKGQKNSRERMKRIEEGIKELGSQILKEHPVENTQLQNEKLYLYYLQNGRDMYVDQELDINRLSDYDVDHIVPQSFLKDDSIDNKVLTRSDKARGKSDNVPSEEVVKKMKNYWRQLLNAKLITQRKFDNLTKAERGGLSELDKAGFIKRQLVETRQITKHVAQILDSRMNTKYDENDKLIREVKVITLKSKLVSDFRKDFQFYKVREINNYHHAHDAYLNAVVGTALIKKYPKLESEFVYGDYKVYDVRKMIAKSEQEIGKATAKYFFYSNIMNFFKTEITLANGEIRKRPLIETNGETGEIVWDKGRDFATVRKVLSMPQVNIVKKTEVQTGGFSKESILPKRNSDKLIARKKDWDPKKYGGFDSPTVAYSVLVVAKVEKGKSKKLKSVKELLGITIMERSSFEKNPIDFLEAKGYKEVKKDLIIKLPKYSLFELENGRKRMLASAGELQKGNELALPSKYVNFLYLASHYEKLKGSPEDNEQKQLFVEQHKHYLDEIIEQISEFSKRVILADANLDKVLSAYNKHRDKPIREQAENIIHLFTLTNLGAPAAFKYFDTTIDRKRYTSTKEVLDATLIHQSITGLYETRIDLSQLGGDGGEAAAKEAAAKEAAAKEAAAKGGTLNIEDEYRLHETSKGPDVPLGSTWLSDFPQAWAETGGMGLAVRQAPLIIPLKATSTPVSIKQYPMSQEARLGIKPHIQRLLDQGILVPCQSPWNTPLLPVKKPGTNDYRPVQDLREVNKRVEDIHPTVPNPYNLLSGLPPSHQWYTVLDLKDAFFCLRLHPTSQSLFAFEWRDPEMGISGQLTWTRLPQGFKNSPTLFNEALHRDLADFRIQHPDLILLQYVDDLLLAATSELDCQQGTRALLQTLGDLGYRASAKKAQICQKQVKYLGYLLKEGQRWLTEARKETVMGQPTPKTPRQLREFLGKAGFCRLFIPGFAEMAAPLYPLTKPGTLFEWGPDQQKAYQEIKQALLTAPALGLPDLTKPFELFVDEKQGYAKGVLTQKLGPWRRPVAYLSKKLDPVAAGWPPCLRMVAAIAVLTKDAGKLTMGQPLVILAPHAVEALVKQPPDRWLSNARMTHYQALLLDTDRVQFGPIVALNPATLLPLPEEGLQHDCLDILAEAHGTRPDLTDQPLPDADHTWYTDGSSFLQEGQRKAGAAVTTETEVVWAKALPAGTSAQRAELIALTQALKMAEGKKLNVYTDSRYAFATAHIHGEIYRRRGWLTSEGKEIKNKDEILALLKALFLPKRLSIIHCPGHQKGNRAEARGNRMADQAAREVATRETPETSTLLAGKRTADGSEFEKRTADGSEFESPKKKAKVE

SEQ ID NO: 2523 - protein, 2094 aa, synthetic construct
MPAAKRVKLDGGDKKYSIGLDIGTNSVGWAVITDEYKVPSKKFKVLGNTDRHSIKKNLIGALLFDSGETAEATRLKRTARRRYTRRKNRICYLQEIFSNEMAKVDDSFFHRLEESFLVEEDKKHERHPIFGNIVDEVAYHEKYPTIYHLRKKLVDSTDKADLRLIYLALAHMIKFRGHFLIEGDLNPDNSDVDKLFIQLVQTYNQLFEENPINASGVDAKAILSARLSKSRRLENLIAQLPGEKKNGLFGNLIALSLGLTPNFKSNFDLAEDAKLQLSKDTYDDDLDNLLAQIGDQYADLFLAAKNLSDAILLSDILRVNTEITKAPLSASMIKRYDEHHQDLTLLKALVRQQLPEKYKEIFFDQSKNGYAGYIDGGASQEEFYKFIKPILEKMDGTEELLVKLNREDLLRKQRTFDNGSIPHQIHLGELHAILRRQEDFYPFLKDNREKIEKILTFRIPYYVGPLARGNSRFAWMTRKSEETITPWNFEEVVDKGASAQSFIERMTNFDKNLPNEKVLPKHSLLYEYFTVYNELTKVKYVTEGMRKPAFLSGEQKKAIVDLLFKTNRKVTVKQLKEDYFKKIECFDSVEISGVEDRFNASLGTYHDLLKIIKDKDFLDNEENEDILEDIVLTLTLFEDREMIEERLKTYAHLFDDKVMKQLKRRRYTGWGRLSRKLINGIRDKQSGKTILDFLKSDGFANRNFMQLIHDDSLTFKEDIQKAQVSGQGDSLHEHIANLAGSPAIKKGILQTVKVVDELVKVMGRHKPENIVIEMARENQTTQKGQKNSRERMKRIEEGIKELGSQILKEHPVENTQLQNEKLYLYYLQNGRDMYVDQELDINRLSDYDVDHIVPQSFLKDDSIDNKVLTRSDKARGKSDNVPSEEVVKKMKNYWRQLLNAKLITQRKFDNLTKAERGGLSELDKAGFIKRQLVETRQITKHVAQILDSRMNTKYDENDKLIREVKVITLKSKLVSDFRKDFQFYKVREINNYHHAHDAYLNAVVGTALIKKYPKLESEFVYGDYKVYDVRKMIAKSEQEIGKATAKYFFYSNIMNFFKTEITLANGEIRKRPLIETNGETGEIVWDKGRDFATVRKVLSMPQVNIVKKTEVQTGGFSKESILPKRNSDKLIARKKDWDPKKYGGFDSPTVAYSVLVVAKVEKGKSKKLKSVKELLGITIMERSSFEKNPIDFLEAKGYKEVKKDLIIKLPKYSLFELENGRKRMLASAGELQKGNELALPSKYVNFLYLASHYEKLKGSPEDNEQKQLFVEQHKHYLDEIIEQISEFSKRVILADANLDKVLSAYNKHRDKPIREQAENIIHLFTLTNLGAPAAFKYFDTTIDRKRYTSTKEVLDATLIHQSITGLYETRIDLSQLGGDGGGGSGGSGGSGGTLNIEDEYRLHETSKGPDVPLGSTWLSDFPQAWAETGGMGLAVRQAPLIIPLKATSTPVSIKQYPMSQEARLGIKPHIQRLLDQGILVPCQSPWNTPLLPVKKPGTNDYRPVQDLREVNKRVEDIHPTVPNPYNLLSGLPPSHQWYTVLDLKDAFFCLRLHPTSQSLFAFEWRDPEMGISGQLTWTRLPQGFKNSPTLFNEALHRDLADFRIQHPDLILLQYVDDLLLAATSELDCQQGTRALLQTLGDLGYRASAKKAQICQKQVKYLGYLLKEGQRWLTEARKETVMGQPTPKTPRQLREFLGKAGFCRLFIPGFAEMAAPLYPLTKPGTLFEWGPDQQKAYQEIKQALLTAPALGLPDLTKPFELFVDEKQGYAKGVLTQKLGPWRRPVAYLSKKLDPVAAGWPPCLRMVAAIAVLTKDAGKLTMGQPLVILAPHAVEALVKQPPDRWLSNARMTHYQALLLDTDRVQFGPIVALNPATLLPLPEEGLQHDCLDILAEAHGTRPDLTDQPLPDADHTWYTDGSSFLQEGQRKAGAAVTTETEVVWAKALPAGTSAQRAELIALTQALKMAEGKKLNVYTDSRYAFATAHIHGEIYRRRGWLTSEGKEIKNKDEILALLKALFLPKRLSIIHCPGHQKGNRAEARGNRMADQAAREVATRETPETSTLLAGKRTADGSEFEKRTADGSEFESPKKKAKVE

SEQ ID NO: 2524 - protein, 2088 aa, synthetic construct
MPAAKRVKLDGGDKKYSIGLDIGTNSVGWAVITDEYKVPSKKFKVLGNTDRHSIKKNLIGALLFDSGETAEATRLKRTARRRYTRRKNRICYLQEIFSNEMAKVDDSFFHRLEESFLVEEDKKHERHPIFGNIVDEVAYHEKYPTIYHLRKKLVDSTDKADLRLIYLALAHMIKFRGHFLIEGDLNPDNSDVDKLFIQLVQTYNQLFEENPINASGVDAKAILSARLSKSRRLENLIAQLPGEKKNGLFGNLIALSLGLTPNFKSNFDLAEDAKLQLSKDTYDDDLDNLLAQIGDQYADLFLAAKNLSDAILLSDILRVNTEITKAPLSASMIKRYDEHHQDLTLLKALVRQQLPEKYKEIFFDQSKNGYAGYIDGGASQEEFYKFIKPILEKMDGTEELLVKLNREDLLRKQRTFDNGSIPHQIHLGELHAILRRQEDFYPFLKDNREKIEKILTFRIPYYVGPLARGNSRFAWMTRKSEETITPWNFEEVVDKGASAQSFIERMTNFDKNLPNEKVLPKHSLLYEYFTVYNELTKVKYVTEGMRKPAFLSGEQKKAIVDLLFKTNRKVTVKQLKEDYFKKIECFDSVEISGVEDRFNASLGTYHDLLKIIKDKDFLDNEENEDILEDIVLTLTLFEDREMIEERLKTYAHLFDDKVMKQLKRRRYTGWGRLSRKLINGIRDKQSGKTILDFLKSDGFANRNFMQLIHDDSLTFKEDIQKAQVSGQGDSLHEHIANLAGSPAIKKGILQTVKVVDELVKVMGRHKPENIVIEMARENQTTQKGQKNSRERMKRIEEGIKELGSQILKEHPVENTQLQNEKLYLYYLQNGRDMYVDQELDINRLSDYDVDHIVPQSFLKDDSIDNKVLTRSDKARGKSDNVPSEEVVKKMKNYWRQLLNAKLITQRKFDNLTKAERGGLSELDKAGFIKRQLVETRQITKHVAQILDSRMNTKYDENDKLIREVKVITLKSKLVSDFRKDFQFYKVREINNYHHAHDAYLNAVVGTALIKKYPKLESEFVYGDYKVYDVRKMIAKSEQEIGKATAKYFFYSNIMNFFKTEITLANGEIRKRPLIETNGETGEIVWDKGRDFATVRKVLSMPQVNIVKKTEVQTGGFSKESILPKRNSDKLIARKKDWDPKKYGGFDSPTVAYSVLVVAKVEKGKSKKLKSVKELLGITIMERSSFEKNPIDFLEAKGYKEVKKDLIIKLPKYSLFELENGRKRMLASAGELQKGNELALPSKYVNFLYLASHYEKLKGSPEDNEQKQLFVEQHKHYLDEIIEQISEFSKRVILADANLDKVLSAYNKHRDKPIREQAENIIHLFTLTNLGAPAAFKYFDTTIDRKRYTSTKEVLDATLIHQSITGLYETRIDLSQLGGDGGPAPGGTLNIEDEYRLHETSKGPDVPLGSTWLSDFPQAWAETGGMGLAVRQAPLIIPLKATSTPVSIKQYPMSQEARLGIKPHIQRLLDQGILVPCQSPWNTPLLPVKKPGTNDYRPVQDLREVNKRVEDIHPTVPNPYNLLSGLPPSHQWYTVLDLKDAFFCLRLHPTSQSLFAFEWRDPEMGISGQLTWTRLPQGFKNSPTLFNEALHRDLADFRIQHPDLILLQYVDDLLLAATSELDCQQGTRALLQTLGDLGYRASAKKAQICQKQVKYLGYLLKEGQRWLTEARKETVMGQPTPKTPRQLREFLGKAGFCRLFIPGFAEMAAPLYPLTKPGTLFEWGPDQQKAYQEIKQALLTAPALGLPDLTKPFELFVDEKQGYAKGVLTQKLGPWRRPVAYLSKKLDPVAAGWPPCLRMVAAIAVLTKDAGKLTMGQPLVILAPHAVEALVKQPPDRWLSNARMTHYQALLLDTDRVQFGPIVALNPATLLPLPEEGLQHDCLDILAEAHGTRPDLTDQPLPDADHTWYTDGSSFLQEGQRKAGAAVTTETEVVWAKALPAGTSAQRAELIALTQALKMAEGKKLNVYTDSRYAFATAHIHGEIYRRRGWLTSEGKEIKNKDEILALLKALFLPKRLSIIHCPGHQKGNRAEARGNRMADQAAREVATRETPETSTLLAGKRTADGSEFEKRTADGSEFESPKKKAKVE

SEQ ID NO: 2525 - protein, 2094 aa, synthetic construct
MPAAKRVKLDGGDKKYSIGLDIGTNSVGWAVITDEYKVPSKKFKVLGNTDRHSIKKNLIGALLFDSGETAEATRLKRTARRRYTRRKNRICYLQEIFSNEMAKVDDSFFHRLEESFLVEEDKKHERHPIFGNIVDEVAYHEKYPTIYHLRKKLVDSTDKADLRLIYLALAHMIKFRGHFLIEGDLNPDNSDVDKLFIQLVQTYNQLFEENPINASGVDAKAILSARLSKSRRLENLIAQLPGEKKNGLFGNLIALSLGLTPNFKSNFDLAEDAKLQLSKDTYDDDLDNLLAQIGDQYADLFLAAKNLSDAILLSDILRVNTEITKAPLSASMIKRYDEHHQDLTLLKALVRQQLPEKYKEIFFDQSKNGYAGYIDGGASQEEFYKFIKPILEKMDGTEELLVKLNREDLLRKQRTFDNGSIPHQIHLGELHAILRRQEDFYPFLKDNREKIEKILTFRIPYYVGPLARGNSRFAWMTRKSEETITPWNFEEVVDKGASAQSFIERMTNFDKNLPNEKVLPKHSLLYEYFTVYNELTKVKYVTEGMRKPAFLSGEQKKAIVDLLFKTNRKVTVKQLKEDYFKKIECFDSVEISGVEDRFNASLGTYHDLLKIIKDKDFLDNEENEDILEDIVLTLTLFEDREMIEERLKTYAHLFDDKVMKQLKRRRYTGWGRLSRKLINGIRDKQSGKTILDFLKSDGFANRNFMQLIHDDSLTFKEDIQKAQVSGQGDSLHEHIANLAGSPAIKKGILQTVKVVDELVKVMGRHKPENIVIEMARENQTTQKGQKNSRERMKRIEEGIKELGSQILKEHPVENTQLQNEKLYLYYLQNGRDMYVDQELDINRLSDYDVDHIVPQSFLKDDSIDNKVLTRSDKARGKSDNVPSEEVVKKMKNYWRQLLNAKLITQRKFDNLTKAERGGLSELDKAGFIKRQLVETRQITKHVAQILDSRMNTKYDENDKLIREVKVITLKSKLVSDFRKDFQFYKVREINNYHHAHDAYLNAVVGTALIKKYPKLESEFVYGDYKVYDVRKMIAKSEQEIGKATAKYFFYSNIMNFFKTEITLANGEIRKRPLIETNGETGEIVWDKGRDFATVRKVLSMPQVNIVKKTEVQTGGFSKESILPKRNSDKLIARKKDWDPKKYGGFDSPTVAYSVLVVAKVEKGKSKKLKSVKELLGITIMERSSFEKNPIDFLEAKGYKEVKKDLIIKLPKYSLFELENGRKRMLASAGELQKGNELALPSKYVNFLYLASHYEKLKGSPEDNEQKQLFVEQHKHYLDEIIEQISEFSKRVILADANLDKVLSAYNKHRDKPIREQAENIIHLFTLTNLGAPAAFKYFDTTIDRKRYTSTKEVLDATLIHQSITGLYETRIDLSQLGGDGGPAPAPAPAPGGTLNIEDEYRLHETSKGPDVPLGSTWLSDFPQAWAETGGMGLAVRQAPLIIPLKATSTPVSIKQYPMSQEARLGIKPHIQRLLDQGILVPCQSPWNTPLLPVKKPGTNDYRPVQDLREVNKRVEDIHPTVPNPYNLLSGLPPSHQWYTVLDLKDAFFCLRLHPTSQSLFAFEWRDPEMGISGQLTWTRLPQGFKNSPTLFNEALHRDLADFRIQHPDLILLQYVDDLLLAATSELDCQQGTRALLQTLGDLGYRASAKKAQICQKQVKYLGYLLKEGQRWLTEARKETVMGQPTPKTPRQLREFLGKAGFCRLFIPGFAEMAAPLYPLTKPGTLFEWGPDQQKAYQEIKQALLTAPALGLPDLTKPFELFVDEKQGYAKGVLTQKLGPWRRPVAYLSKKLDPVAAGWPPCLRMVAAIAVLTKDAGKLTMGQPLVILAPHAVEALVKQPPDRWLSNARMTHYQALLLDTDRVQFGPIVALNPATLLPLPEEGLQHDCLDILAEAHGTRPDLTDQPLPDADHTWYTDGSSFLQEGQRKAGAAVTTETEVVWAKALPAGTSAQRAELIALTQALKMAEGKKLNVYTDSRYAFATAHIHGEIYRRRGWLTSEGKEIKNKDEILALLKALFLPKRLSIIHCPGHQKGNRAEARGNRMADQAAREVATRETPETSTLLAGKRTADGSEFEKRTADGSEFESPKKKAKVE

SEQ ID NO: 2526 - protein, 2096 aa, synthetic construct
MPAAKRVKLDGGDKKYSIGLDIGTNSVGWAVITDEYKVPSKKFKVLGNTDRHSIKKNLIGALLFDSGETAEATRLKRTARRRYTRRKNRICYLQEIFSNEMAKVDDSFFHRLEESFLVEEDKKHERHPIFGNIVDEVAYHEKYPTIYHLRKKLVDSTDKADLRLIYLALAHMIKFRGHFLIEGDLNPDNSDVDKLFIQLVQTYNQLFEENPINASGVDAKAILSARLSKSRRLENLIAQLPGEKKNGLFGNLIALSLGLTPNFKSNFDLAEDAKLQLSKDTYDDDLDNLLAQIGDQYADLFLAAKNLSDAILLSDILRVNTEITKAPLSASMIKRYDEHHQDLTLLKALVRQQLPEKYKEIFFDQSKNGYAGYIDGGASQEEFYKFIKPILEKMDGTEELLVKLNREDLLRKQRTFDNGSIPHQIHLGELHAILRRQEDFYPFLKDNREKIEKILTFRIPYYVGPLARGNSRFAWMTRKSEETITPWNFEEVVDKGASAQSFIERMTNFDKNLPNEKVLPKHSLLYEYFTVYNELTKVKYVTEGMRKPAFLSGEQKKAIVDLLFKTNRKVTVKQLKEDYFKKIECFDSVEISGVEDRFNASLGTYHDLLKIIKDKDFLDNEENEDILEDIVLTLTLFEDREMIEERLKTYAHLFDDKVMKQLKRRRYTGWGRLSRKLINGIRDKQSGKTILDFLKSDGFANRNFMQLIHDDSLTFKEDIQKAQVSGQGDSLHEHIANLAGSPAIKKGILQTVKVVDELVKVMGRHKPENIVIEMARENQTTQKGQKNSRERMKRIEEGIKELGSQILKEHPVENTQLQNEKLYLYYLQNGRDMYVDQELDINRLSDYDVDHIVPQSFLKDDSIDNKVLTRSDKARGKSDNVPSEEVVKKMKNYWRQLLNAKLITQRKFDNLTKAERGGLSELDKAGFIKRQLVETRQITKHVAQILDSRMNTKYDENDKLIREVKVITLKSKLVSDFRKDFQFYKVREINNYHHAHDAYLNAVVGTALIKKYPKLESEFVYGDYKVYDVRKMIAKSEQEIGKATAKYFFYSNIMNFFKTEITLANGEIRKRPLIETNGETGEIVWDKGRDFATVRKVLSMPQVNIVKKTEVQTGGFSKESILPKRNSDKLIARKKDWDPKKYGGFDSPTVAYSVLVVAKVEKGKSKKLKSVKELLGITIMERSSFEKNPIDFLEAKGYKEVKKDLIIKLPKYSLFELENGRKRMLASAGELQKGNELALPSKYVNFLYLASHYEKLKGSPEDNEQKQLFVEQHKHYLDEIIEQISEFSKRVILADANLDKVLSAYNKHRDKPIREQAENIIHLFTLTNLGAPAAFKYFDTTIDRKRYTSTKEVLDATLIHQSITGLYETRIDLSQLGGDGGGGGEAAAKPAPGGTLNIEDEYRLHETSKGPDVPLGSTWLSDFPQAWAETGGMGLAVRQAPLIIPLKATSTPVSIKQYPMSQEARLGIKPHIQRLLDQGILVPCQSPWNTPLLPVKKPGTNDYRPVQDLREVNKRVEDIHPTVPNPYNLLSGLPPSHQWYTVLDLKDAFFCLRLHPTSQSLFAFEWRDPEMGISGQLTWTRLPQGFKNSPTLFNEALHRDLADFRIQHPDLILLQYVDDLLLAATSELDCQQGTRALLQTLGDLGYRASAKKAQICQKQVKYLGYLLKEGQRWLTEARKETVMGQPTPKTPRQLREFLGKAGFCRLFIPGFAEMAAPLYPLTKPGTLFEWGPDQQKAYQEIKQALLTAPALGLPDLTKPFELFVDEKQGYAKGVLTQKLGPWRRPVAYLSKKLDPVAAGWPPCLRMVAAIAVLTKDAGKLTMGQPLVILAPHAVEALVKQPPDRWLSNARMTHYQALLLDTDRVQFGPIVALNPATLLPLPEEGLQHDCLDILAEAHGTRPDLTDQPLPDADHTWYTDGSSFLQEGQRKAGAAVTTETEVVWAKALPAGTSAQRAELIALTQALKMAEGKKLNVYTDSRYAFATAHIHGEIYRRRGWLTSEGKEIKNKDEILALLKALFLPKRLSIIHCPGHQKGNRAEARGNRMADQAAREVATRETPETSTLLAGKRTADGSEFEKRTADGSEFESPKKKAKVE

SEQ ID NO: 2527 - protein, 2096 aa, synthetic construct
MPAAKRVKLDGGDKKYSIGLDIGTNSVGWAVITDEYKVPSKKFKVLGNTDRHSIKKNLIGALLFDSGETAEATRLKRTARRRYTRRKNRICYLQEIFSNEMAKVDDSFFHRLEESFLVEEDKKHERHPIFGNIVDEVAYHEKYPTIYHLRKKLVDSTDKADLRLIYLALAHMIKFRGHFLIEGDLNPDNSDVDKLFIQLVQTYNQLFEENPINASGVDAKAILSARLSKSRRLENLIAQLPGEKKNGLFGNLIALSLGLTPNFKSNFDLAEDAKLQLSKDTYDDDLDNLLAQIGDQYADLFLAAKNLSDAILLSDILRVNTEITKAPLSASMIKRYDEHHQDLTLLKALVRQQLPEKYKEIFFDQSKNGYAGYIDGGASQEEFYKFIKPILEKMDGTEELLVKLNREDLLRKQRTFDNGSIPHQIHLGELHAILRRQEDFYPFLKDNREKIEKILTFRIPYYVGPLARGNSRFAWMTRKSEETITPWNFEEVVDKGASAQSFIERMTNFDKNLPNEKVLPKHSLLYEYFTVYNELTKVKYVTEGMRKPAFLSGEQKKAIVDLLFKTNRKVTVKQLKEDYFKKIECFDSVEISGVEDRFNASLGTYHDLLKIIKDKDFLDNEENEDILEDIVLTLTLFEDREMIEERLKTYAHLFDDKVMKQLKRRRYTGWGRLSRKLINGIRDKQSGKTILDFLKSDGFANRNFMQLIHDDSLTFKEDIQKAQVSGQGDSLHEHIANLAGSPAIKKGILQTVKVVDELVKVMGRHKPENIVIEMARENQTTQKGQKNSRERMKRIEEGIKELGSQILKEHPVENTQLQNEKLYLYYLQNGRDMYVDQELDINRLSDYDVDHIVPQSFLKDDSIDNKVLTRSDKARGKSDNVPSEEVVKKMKNYWRQLLNAKLITQRKFDNLTKAERGGLSELDKAGFIKRQLVETRQITKHVAQILDSRMNTKYDENDKLIREVKVITLKSKLVSDFRKDFQFYKVREINNYHHAHDAYLNAVVGTALIKKYPKLESEFVYGDYKVYDVRKMIAKSEQEIGKATAKYFFYSNIMNFFKTEITLANGEIRKRPLIETNGETGEIVWDKGRDFATVRKVLSMPQVNIVKKTEVQTGGFSKESILPKRNSDKLIARKKDWDPKKYGGFDSPTVAYSVLVVAKVEKGKSKKLKSVKELLGITIMERSSFEKNPIDFLEAKGYKEVKKDLIIKLPKYSLFELENGRKRMLASAGELQKGNELALPSKYVNFLYLASHYEKLKGSPEDNEQKQLFVEQHKHYLDEIIEQISEFSKRVILADANLDKVLSAYNKHRDKPIREQAENIIHLFTLTNLGAPAAFKYFDTTIDRKRYTSTKEVLDATLIHQSITGLYETRIDLSQLGGDGGGGSPAPEAAAKGGTLNIEDEYRLHETSKGPDVPLGSTWLSDFPQAWAETGGMGLAVRQAPLIIPLKATSTPVSIKQYPMSQEARLGIKPHIQRLLDQGILVPCQSPWNTPLLPVKKPGTNDYRPVQDLREVNKRVEDIHPTVPNPYNLLSGLPPSHQWYTVLDLKDAFFCLRLHPTSQSLFAFEWRDPEMGISGQLTWTRLPQGFKNSPTLFNEALHRDLADFRIQHPDLILLQYVDDLLLAATSELDCQQGTRALLQTLGDLGYRASAKKAQICQKQVKYLGYLLKEGQRWLTEARKETVMGQPTPKTPRQLREFLGKAGFCRLFIPGFAEMAAPLYPLTKPGTLFEWGPDQQKAYQEIKQALLTAPALGLPDLTKPFELFVDEKQGYAKGVLTQKLGPWRRPVAYLSKKLDPVAAGWPPCLRMVAAIAVLTKDAGKLTMGQPLVILAPHAVEALVKQPPDRWLSNARMTHYQALLLDTDRVQFGPIVALNPATLLPLPEEGLQHDCLDILAEAHGTRPDLTDQPLPDADHTWYTDGSSFLQEGQRKAGAAVTTETEVVWAKALPAGTSAQRAELIALTQALKMAEGKKLNVYTDSRYAFATAHIHGEIYRRRGWLTSEGKEIKNKDEILALLKALFLPKRLSIIHCPGHQKGNRAEARGNRMADQAAREVATRETPETSTLLAGKRTADGSEFEKRTADGSEFESPKKKAKVE

SEQ ID NO: 2528 - protein, 2100 aa, synthetic construct
MPAAKRVKLDGGDKKYSIGLDIGTNSVGWAVITDEYKVPSKKFKVLGNTDRHSIKKNLIGALLFDSGETAEATRLKRTARRRYTRRKNRICYLQEIFSNEMAKVDDSFFHRLEESFLVEEDKKHERHPIFGNIVDEVAYHEKYPTIYHLRKKLVDSTDKADLRLIYLALAHMIKFRGHFLIEGDLNPDNSDVDKLFIQLVQTYNQLFEENPINASGVDAKAILSARLSKSRRLENLIAQLPGEKKNGLFGNLIALSLGLTPNFKSNFDLAEDAKLQLSKDTYDDDLDNLLAQIGDQYADLFLAAKNLSDAILLSDILRVNTEITKAPLSASMIKRYDEHHQDLTLLKALVRQQLPEKYKEIFFDQSKNGYAGYIDGGASQEEFYKFIKPILEKMDGTEELLVKLNREDLLRKQRTFDNGSIPHQIHLGELHAILRRQEDFYPFLKDNREKIEKILTFRIPYYVGPLARGNSRFAWMTRKSEETITPWNFEEVVDKGASAQSFIERMTNFDKNLPNEKVLPKHSLLYEYFTVYNELTKVKYVTEGMRKPAFLSGEQKKAIVDLLFKTNRKVTVKQLKEDYFKKIECFDSVEISGVEDRFNASLGTYHDLLKIIKDKDFLDNEENEDILEDIVLTLTLFEDREMIEERLKTYAHLFDDKVMKQLKRRRYTGWGRLSRKLINGIRDKQSGKTILDFLKSDGFANRNFMQLIHDDSLTFKEDIQKAQVSGQGDSLHEHIANLAGSPAIKKGILQTVKVVDELVKVMGRHKPENIVIEMARENQTTQKGQKNSRERMKRIEEGIKELGSQILKEHPVENTQLQNEKLYLYYLQNGRDMYVDQELDINRLSDYDVDHIVPQSFLKDDSIDNKVLTRSDKARGKSDNVPSEEVVKKMKNYWRQLLNAKLITQRKFDNLTKAERGGLSELDKAGFIKRQLVETRQITKHVAQILDSRMNTKYDENDKLIREVKVITLKSKLVSDFRKDFQFYKVREINNYHHAHDAYLNAVVGTALIKKYPKLESEFVYGDYKVYDVRKMIAKSEQEIGKATAKYFFYSNIMNFFKTEITLANGEIRKRPLIETNGETGEIVWDKGRDFATVRKVLSMPQVNIVKKTEVQTGGFSKESILPKRNSDKLIARKKDWDPKKYGGFDSPTVAYSVLVVAKVEKGKSKKLKSVKELLGITIMERSSFEKNPIDFLEAKGYKEVKKDLIIKLPKYSLFELENGRKRMLASAGELQKGNELALPSKYVNFLYLASHYEKLKGSPEDNEQKQLFVEQHKHYLDEIIEQISEFSKRVILADANLDKVLSAYNKHRDKPIREQAENIIHLFTLTNLGAPAAFKYFDTTIDRKRYTSTKEVLDATLIHQSITGLYETRIDLSQLGGDGGGGGGSEAAAKGGGGSGGTLNIEDEYRLHETSKGPDVPLGSTWLSDFPQAWAETGGMGLAVRQAPLIIPLKATSTPVSIKQYPMSQEARLGIKPHIQRLLDQGILVPCQSPWNTPLLPVKKPGTNDYRPVQDLREVNKRVEDIHPTVPNPYNLLSGLPPSHQWYTVLDLKDAFFCLRLHPTSQSLFAFEWRDPEMGISGQLTWTRLPQGFKNSPTLFNEALHRDLADFRIQHPDLILLQYVDDLLLAATSELDCQQGTRALLQTLGDLGYRASAKKAQICQKQVKYLGYLLKEGQRWLTEARKETVMGQPTPKTPRQLREFLGKAGFCRLFIPGFAEMAAPLYPLTKPGTLFEWGPDQQKAYQEIKQALLTAPALGLPDLTKPFELFVDEKQGYAKGVLTQKLGPWRRPVAYLSKKLDPVAAGWPPCLRMVAAIAVLTKDAGKLTMGQPLVILAPHAVEALVKQPPDRWLSNARMTHYQALLLDTDRVQFGPIVALNPATLLPLPEEGLQHDCLDILAEAHGTRPDLTDQPLPDADHTWYTDGSSFLQEGQRKAGAAVTTETEVVWAKALPAGTSAQRAELIALTQALKMAEGKKLNVYTDSRYAFATAHIHGEIYRRRGWLTSEGKEIKNKDEILALLKALFLPKRLSIIHCPGHQKGNRAEARGNRMADQAAREVATRETPETSTLLAGKRTADGSEFEKRTADGSEFESPKKKAKVE

SEQ ID NO: 2529 - protein, 2131 aa, synthetic construct
MPAAKRVKLDGGDKKYSIGLDIGTNSVGWAVITDEYKVPSKKFKVLGNTDRHSIKKNLIGALLFDSGETAEATRLKRTARRRYTRRKNRICYLQEIFSNEMAKVDDSFFHRLEESFLVEEDKKHERHPIFGNIVDEVAYHEKYPTIYHLRKKLVDSTDKADLRLIYLALAHMIKFRGHFLIEGDLNPDNSDVDKLFIQLVQTYNQLFEENPINASGVDAKAILSARLSKSRRLENLIAQLPGEKKNGLFGNLIALSLGLTPNFKSNFDLAEDAKLQLSKDTYDDDLDNLLAQIGDQYADLFLAAKNLSDAILLSDILRVNTEITKAPLSASMIKRYDEHHQDLTLLKALVRQQLPEKYKEIFFDQSKNGYAGYIDGGASQEEFYKFIKPILEKMDGTEELLVKLNREDLLRKQRTFDNGSIPHQIHLGELHAILRRQEDFYPFLKDNREKIEKILTFRIPYYVGPLARGNSRFAWMTRKSEETITPWNFEEVVDKGASAQSFIERMTNFDKNLPNEKVLPKHSLLYEYFTVYNELTKVKYVTEGMRKPAFLSGEQKKAIVDLLFKTNRKVTVKQLKEDYFKKIECFDSVEISGVEDRFNASLGTYHDLLKIIKDKDFLDNEENEDILEDIVLTLTLFEDREMIEERLKTYAHLFDDKVMKQLKRRRYTGWGRLSRKLINGIRDKQSGKTILDFLKSDGFANRNFMQLIHDDSLTFKEDIQKAQVSGQGDSLHEHIANLAGSPAIKKGILQTVKVVDELVKVMGRHKPENIVIEMARENQTTQKGQKNSRERMKRIEEGIKELGSQILKEHPVENTQLQNEKLYLYYLQNGRDMYVDQELDINRLSDYDVDHIVPQSFLKDDSIDNKVLTRSDKARGKSDNVPSEEVVKKMKNYWRQLLNAKLITQRKFDNLTKAERGGLSELDKAGFIKRQLVETRQITKHVAQILDSRMNTKYDENDKLIREVKVITLKSKLVSDFRKDFQFYKVREINNYHHAHDAYLNAVVGTALIKKYPKLESEFVYGDYKVYDVRKMIAKSEQEIGKATAKYFFYSNIMNFFKTEITLANGEIRKRPLIETNGETGEIVWDKGRDFATVRKVLSMPQVNIVKKTEVQTGGFSKESILPKRNSDKLIARKKDWDPKKYGGFDSPTVAYSVLVVAKVEKGKSKKLKSVKELLGITIMERSSFEKNPIDFLEAKGYKEVKKDLIIKLPKYSLFELENGRKRMLASAGELQKGNELALPSKYVNFLYLASHYEKLKGSPEDNEQKQLFVEQHKHYLDEIIEQISEFSKRVILADANLDKVLSAYNKHRDKPIREQAENIIHLFTLTNLGAPAAFKYFDTTIDRKRYTSTKEVLDATLIHQSITGLYETRIDLSQLGGDGGAEAAAKEAAAKEAAAKEAAAKALEAEAAAKEAAAKEAAAKEAAAKAGGTLNIEDEYRLHETSKGPDVPLGSTWLSDFPQAWAETGGMGLAVRQAPLIIPLKATSTPVSIKQYPMSQEARLGIKPHIQRLLDQGILVPCQSPWNTPLLPVKKPGTNDYRPVQDLREVNKRVEDIHPTVPNPYNLLSGLPPSHQWYTVLDLKDAFFCLRLHPTSQSLFAFEWRDPEMGISGQLTWTRLPQGFKNSPTLFNEALHRDLADFRIQHPDLILLQYVDDLLLAATSELDCQQGTRALLQTLGDLGYRASAKKAQICQKQVKYLGYLLKEGQRWLTEARKETVMGQPTPKTPRQLREFLGKAGFCRLFIPGFAEMAAPLYPLTKPGTLFEWGPDQQKAYQEIKQALLTAPALGLPDLTKPFELFVDEKQGYAKGVLTQKLGPWRRPVAYLSKKLDPVAAGWPPCLRMVAAIAVLTKDAGKLTMGQPLVILAPHAVEALVKQPPDRWLSNARMTHYQALLLDTDRVQFGPIVALNPATLLPLPEEGLQHDCLDILAEAHGTRPDLTDQPLPDADHTWYTDGSSFLQEGQRKAGAAVTTETEVVWAKALPAGTSAQRAELIALTQALKMAEGKKLNVYTDSRYAFATAHIHGEIYRRRGWLTSEGKEIKNKDEILALLKALFLPKRLSIIHCPGHQKGNRAEARGNRMADQAAREVATRETPETSTLLAGKRTADGSEFEKRTADGSEFESPKKKAKVE

SEQ ID NO: 2530 - protein, 2096 aa, synthetic construct
MPAAKRVKLDGGDKKYSIGLDIGTNSVGWAVITDEYKVPSKKFKVLGNTDRHSIKKNLIGALLFDSGETAEATRLKRTARRRYTRRKNRICYLQEIFSNEMAKVDDSFFHRLEESFLVEEDKKHERHPIFGNIVDEVAYHEKYPTIYHLRKKLVDSTDKADLRLIYLALAHMIKFRGHFLIEGDLNPDNSDVDKLFIQLVQTYNQLFEENPINASGVDAKAILSARLSKSRRLENLIAQLPGEKKNGLFGNLIALSLGLTPNFKSNFDLAEDAKLQLSKDTYDDDLDNLLAQIGDQYADLFLAAKNLSDAILLSDILRVNTEITKAPLSASMIKRYDEHHQDLTLLKALVRQQLPEKYKEIFFDQSKNGYAGYIDGGASQEEFYKFIKPILEKMDGTEELLVKLNREDLLRKQRTFDNGSIPHQIHLGELHAILRRQEDFYPFLKDNREKIEKILTFRIPYYVGPLARGNSRFAWMTRKSEETITPWNFEEVVDKGASAQSFIERMTNFDKNLPNEKVLPKHSLLYEYFTVYNELTKVKYVTEGMRKPAFLSGEQKKAIVDLLFKTNRKVTVKQLKEDYFKKIECFDSVEISGVEDRFNASLGTYHDLLKIIKDKDFLDNEENEDILEDIVLTLTLFEDREMIEERLKTYAHLFDDKVMKQLKRRRYTGWGRLSRKLINGIRDKQSGKTILDFLKSDGFANRNFMQLIHDDSLTFKEDIQKAQVSGQGDSLHEHIANLAGSPAIKKGILQTVKVVDELVKVMGRHKPENIVIEMARENQTTQKGQKNSRERMKRIEEGIKELGSQILKEHPVENTQLQNEKLYLYYLQNGRDMYVDQELDINRLSDYDVDHIVPQSFLKDDSIDNKVLTRSDKARGKSDNVPSEEVVKKMKNYWRQLLNAKLITQRKFDNLTKAERGGLSELDKAGFIKRQLVETRQITKHVAQILDSRMNTKYDENDKLIREVKVITLKSKLVSDFRKDFQFYKVREINNYHHAHDAYLNAVVGTALIKKYPKLESEFVYGDYKVYDVRKMIAKSEQEIGKATAKYFFYSNIMNFFKTEITLANGEIRKRPLIETNGETGEIVWDKGRDFATVRKVLSMPQVNIVKKTEVQTGGFSKESILPKRNSDKLIARKKDWDPKKYGGFDSPTVAYSVLVVAKVEKGKSKKLKSVKELLGITIMERSSFEKNPIDFLEAKGYKEVKKDLIIKLPKYSLFELENGRKRMLASAGELQKGNELALPSKYVNFLYLASHYEKLKGSPEDNEQKQLFVEQHKHYLDEIIEQISEFSKRVILADANLDKVLSAYNKHRDKPIREQAENIIHLFTLTNLGAPAAFKYFDTTIDRKRYTSTKEVLDATLIHQSITGLYETRIDLSQLGGDGGGGSEAAAKPAPGGTLNIEDEYRLHETSKGPDVPLGSTWLSDFPQAWAETGGMGLAVRQAPLIIPLKATSTPVSIKQYPMSQEARLGIKPHIQRLLDQGILVPCQSPWNTPLLPVKKPGTNDYRPVQDLREVNKRVEDIHPTVPNPYNLLSGLPPSHQWYTVLDLKDAFFCLRLHPTSQSLFAFEWRDPEMGISGQLTWTRLPQGFKNSPTLFNEALHRDLADFRIQHPDLILLQYVDDLLLAATSELDCQQGTRALLQTLGDLGYRASAKKAQICQKQVKYLGYLLKEGQRWLTEARKETVMGQPTPKTPRQLREFLGKAGFCRLFIPGFAEMAAPLYPLTKPGTLFEWGPDQQKAYQEIKQALLTAPALGLPDLTKPFELFVDEKQGYAKGVLTQKLGPWRRPVAYLSKKLDPVAAGWPPCLRMVAAIAVLTKDAGKLTMGQPLVILAPHAVEALVKQPPDRWLSNARMTHYQALLLDTDRVQFGPIVALNPATLLPLPEEGLQHDCLDILAEAHGTRPDLTDQPLPDADHTWYTDGSSFLQEGQRKAGAAVTTETEVVWAKALPAGTSAQRAELIALTQALKMAEGKKLNVYTDSRYAFATAHIHGEIYRRRGWLTSEGKEIKNKDEILALLKALFLPKRLSIIHCPGHQKGNRAEARGNRMADQAAREVATRETPETSTLLAGKRTADGSEFEKRTADGSEFESPKKKAKVE

SEQ ID NO: 2531 - protein, 2094 aa, synthetic construct
MPAAKRVKLDGGDKKYSIGLDIGTNSVGWAVITDEYKVPSKKFKVLGNTDRHSIKKNLIGALLFDSGETAEATRLKRTARRRYTRRKNRICYLQEIFSNEMAKVDDSFFHRLEESFLVEEDKKHERHPIFGNIVDEVAYHEKYPTIYHLRKKLVDSTDKADLRLIYLALAHMIKFRGHFLIEGDLNPDNSDVDKLFIQLVQTYNQLFEENPINASGVDAKAILSARLSKSRRLENLIAQLPGEKKNGLFGNLIALSLGLTPNFKSNFDLAEDAKLQLSKDTYDDDLDNLLAQIGDQYADLFLAAKNLSDAILLSDILRVNTEITKAPLSASMIKRYDEHHQDLTLLKALVRQQLPEKYKEIFFDQSKNGYAGYIDGGASQEEFYKFIKPILEKMDGTEELLVKLNREDLLRKQRTFDNGSIPHQIHLGELHAILRRQEDFYPFLKDNREKIEKILTFRIPYYVGPLARGNSRFAWMTRKSEETITPWNFEEVVDKGASAQSFIERMTNFDKNLPNEKVLPKHSLLYEYFTVYNELTKVKYVTEGMRKPAFLSGEQKKAIVDLLFKTNRKVTVKQLKEDYFKKIECFDSVEISGVEDRFNASLGTYHDLLKIIKDKDFLDNEENEDILEDIVLTLTLFEDREMIEERLKTYAHLFDDKVMKQLKRRRYTGWGRLSRKLINGIRDKQSGKTILDFLKSDGFANRNFMQLIHDDSLTFKEDIQKAQVSGQGDSLHEHIANLAGSPAIKKGILQTVKVVDELVKVMGRHKPENIVIEMARENQTTQKGQKNSRERMKRIEEGIKELGSQILKEHPVENTQLQNEKLYLYYLQNGRDMYVDQELDINRLSDYDVDHIVPQSFLKDDSIDNKVLTRSDKARGKSDNVPSEEVVKKMKNYWRQLLNAKLITQRKFDNLTKAERGGLSELDKAGFIKRQLVETRQITKHVAQILDSRMNTKYDENDKLIREVKVITLKSKLVSDFRKDFQFYKVREINNYHHAHDAYLNAVVGTALIKKYPKLESEFVYGDYKVYDVRKMIAKSEQEIGKATAKYFFYSNIMNFFKTEITLANGEIRKRPLIETNGETGEIVWDKGRDFATVRKVLSMPQVNIVKKTEVQTGGFSKESILPKRNSDKLIARKKDWDPKKYGGFDSPTVAYSVLVVAKVEKGKSKKLKSVKELLGITIMERSSFEKNPIDFLEAKGYKEVKKDLIIKLPKYSLFELENGRKRMLASAGELQKGNELALPSKYVNFLYLASHYEKLKGSPEDNEQKQLFVEQHKHYLDEIIEQISEFSKRVILADANLDKVLSAYNKHRDKPIREQAENIIHLFTLTNLGAPAAFKYFDTTIDRKRYTSTKEVLDATLIHQSITGLYETRIDLSQLGGDGGPAPGSSGGGGGTLNIEDEYRLHETSKGPDVPLGSTWLSDFPQAWAETGGMGLAVRQAPLIIPLKATSTPVSIKQYPMSQEARLGIKPHIQRLLDQGILVPCQSPWNTPLLPVKKPGTNDYRPVQDLREVNKRVEDIHPTVPNPYNLLSGLPPSHQWYTVLDLKDAFFCLRLHPTSQSLFAFEWRDPEMGISGQLTWTRLPQGFKNSPTLFNEALHRDLADFRIQHPDLILLQYVDDLLLAATSELDCQQGTRALLQTLGDLGYRASAKKAQICQKQVKYLGYLLKEGQRWLTEARKETVMGQPTPKTPRQLREFLGKAGFCRLFIPGFAEMAAPLYPLTKPGTLFEWGPDQQKAYQEIKQALLTAPALGLPDLTKPFELFVDEKQGYAKGVLTQKLGPWRRPVAYLSKKLDPVAAGWPPCLRMVAAIAVLTKDAGKLTMGQPLVILAPHAVEALVKQPPDRWLSNARMTHYQALLLDTDRVQFGPIVALNPATLLPLPEEGLQHDCLDILAEAHGTRPDLTDQPLPDADHTWYTDGSSFLQEGQRKAGAAVTTETEVVWAKALPAGTSAQRAELIALTQALKMAEGKKLNVYTDSRYAFATAHIHGEIYRRRGWLTSEGKEIKNKDEILALLKALFLPKRLSIIHCPGHQKGNRAEARGNRMADQAAREVATRETPETSTLLAGKRTADGSEFEKRTADGSEFESPKKKAKVE

SEQ ID NO: 2532 - protein, 2100 aa, synthetic construct
MPAAKRVKLDGGDKKYSIGLDIGTNSVGWAVITDEYKVPSKKFKVLGNTDRHSIKKNLIGALLFDSGETAEATRLKRTARRRYTRRKNRICYLQEIFSNEMAKVDDSFFHRLEESFLVEEDKKHERHPIFGNIVDEVAYHEKYPTIYHLRKKLVDSTDKADLRLIYLALAHMIKFRGHFLIEGDLNPDNSDVDKLFIQLVQTYNQLFEENPINASGVDAKAILSARLSKSRRLENLIAQLPGEKKNGLFGNLIALSLGLTPNFKSNFDLAEDAKLQLSKDTYDDDLDNLLAQIGDQYADLFLAAKNLSDAILLSDILRVNTEITKAPLSASMIKRYDEHHQDLTLLKALVRQQLPEKYKEIFFDQSKNGYAGYIDGGASQEEFYKFIKPILEKMDGTEELLVKLNREDLLRKQRTFDNGSIPHQIHLGELHAILRRQEDFYPFLKDNREKIEKILTFRIPYYVGPLARGNSRFAWMTRKSEETITPWNFEEVVDKGASAQSFIERMTNFDKNLPNEKVLPKHSLLYEYFTVYNELTKVKYVTEGMRKPAFLSGEQKKAIVDLLFKTNRKVTVKQLKEDYFKKIECFDSVEISGVEDRFNASLGTYHDLLKIIKDKDFLDNEENEDILEDIVLTLTLFEDREMIEERLKTYAHLFDDKVMKQLKRRRYTGWGRLSRKLINGIRDKQSGKTILDFLKSDGFANRNFMQLIHDDSLTFKEDIQKAQVSGQGDSLHEHIANLAGSPAIKKGILQTVKVVDELVKVMGRHKPENIVIEMARENQTTQKGQKNSRERMKRIEEGIKELGSQILKEHPVENTQLQNEKLYLYYLQNGRDMYVDQELDINRLSDYDVDHIVPQSFLKDDSIDNKVLTRSDKARGKSDNVPSEEVVKKMKNYWRQLLNAKLITQRKFDNLTKAERGGLSELDKAGFIKRQLVETRQITKHVAQILDSRMNTKYDENDKLIREVKVITLKSKLVSDFRKDFQFYKVREINNYHHAHDAYLNAVVGTALIKKYPKLESEFVYGDYKVYDVRKMIAKSEQEIGKATAKYFFYSNIMNFFKTEITLANGEIRKRPLIETNGETGEIVWDKGRDFATVRKVLSMPQVNIVKKTEVQTGGFSKESILPKRNSDKLIARKKDWDPKKYGGFDSPTVAYSVLVVAKVEKGKSKKLKSVKELLGITIMERSSFEKNPIDFLEAKGYKEVKKDLIIKLPKYSLFELENGRKRMLASAGELQKGNELALPSKYVNFLYLASHYEKLKGSPEDNEQKQLFVEQHKHYLDEIIEQISEFSKRVILADANLDKVLSAYNKHRDKPIREQAENIIHLFTLTNLGAPAAFKYFDTTIDRKRYTSTKEVLDATLIHQSITGLYETRIDLSQLGGDGGGSSGSSGSSGSSGSSGGTLNIEDEYRLHETSKGPDVPLGSTWLSDFPQAWAETGGMGLAVRQAPLIIPLKATSTPVSIKQYPMSQEARLGIKPHIQRLLDQGILVPCQSPWNTPLLPVKKPGTNDYRPVQDLREVNKRVEDIHPTVPNPYNLLSGLPPSHQWYTVLDLKDAFFCLRLHPTSQSLFAFEWRDPEMGISGQLTWTRLPQGFKNSPTLFNEALHRDLADFRIQHPDLILLQYVDDLLLAATSELDCQQGTRALLQTLGDLGYRASAKKAQICQKQVKYLGYLLKEGQRWLTEARKETVMGQPTPKTPRQLREFLGKAGFCRLFIPGFAEMAAPLYPLTKPGTLFEWGPDQQKAYQEIKQALLTAPALGLPDLTKPFELFVDEKQGYAKGVLTQKLGPWRRPVAYLSKKLDPVAAGWPPCLRMVAAIAVLTKDAGKLTMGQPLVILAPHAVEALVKQPPDRWLSNARMTHYQALLLDTDRVQFGPIVALNPATLLPLPEEGLQHDCLDILAEAHGTRPDLTDQPLPDADHTWYTDGSSFLQEGQRKAGAAVTTETEVVWAKALPAGTSAQRAELIALTQALKMAEGKKLNVYTDSRYAFATAHIHGEIYRRRGWLTSEGKEIKNKDEILALLKALFLPKRLSIIHCPGHQKGNRAEARGNRMADQAAREVATRETPETSTLLAGKRTADGSEFEKRTADGSEFESPKKKAKVE

SEQ ID NO: 2533 - protein, 2094 aa, synthetic construct
MPAAKRVKLDGGDKKYSIGLDIGTNSVGWAVITDEYKVPSKKFKVLGNTDRHSIKKNLIGALLFDSGETAEATRLKRTARRRYTRRKNRICYLQEIFSNEMAKVDDSFFHRLEESFLVEEDKKHERHPIFGNIVDEVAYHEKYPTIYHLRKKLVDSTDKADLRLIYLALAHMIKFRGHFLIEGDLNPDNSDVDKLFIQLVQTYNQLFEENPINASGVDAKAILSARLSKSRRLENLIAQLPGEKKNGLFGNLIALSLGLTPNFKSNFDLAEDAKLQLSKDTYDDDLDNLLAQIGDQYADLFLAAKNLSDAILLSDILRVNTEITKAPLSASMIKRYDEHHQDLTLLKALVRQQLPEKYKEIFFDQSKNGYAGYIDGGASQEEFYKFIKPILEKMDGTEELLVKLNREDLLRKQRTFDNGSIPHQIHLGELHAILRRQEDFYPFLKDNREKIEKILTFRIPYYVGPLARGNSRFAWMTRKSEETITPWNFEEVVDKGASAQSFIERMTNFDKNLPNEKVLPKHSLLYEYFTVYNELTKVKYVTEGMRKPAFLSGEQKKAIVDLLFKTNRKVTVKQLKEDYFKKIECFDSVEISGVEDRFNASLGTYHDLLKIIKDKDFLDNEENEDILEDIVLTLTLFEDREMIEERLKTYAHLFDDKVMKQLKRRRYTGWGRLSRKLINGIRDKQSGKTILDFLKSDGFANRNFMQLIHDDSLTFKEDIQKAQVSGQGDSLHEHIANLAGSPAIKKGILQTVKVVDELVKVMGRHKPENIVIEMARENQTTQKGQKNSRERMKRIEEGIKELGSQILKEHPVENTQLQNEKLYLYYLQNGRDMYVDQELDINRLSDYDVDHIVPQSFLKDDSIDNKVLTRSDKARGKSDNVPSEEVVKKMKNYWRQLLNAKLITQRKFDNLTKAERGGLSELDKAGFIKRQLVETRQITKHVAQILDSRMNTKYDENDKLIREVKVITLKSKLVSDFRKDFQFYKVREINNYHHAHDAYLNAVVGTALIKKYPKLESEFVYGDYKVYDVRKMIAKSEQEIGKATAKYFFYSNIMNFFKTEITLANGEIRKRPLIETNGETGEIVWDKGRDFATVRKVLSMPQVNIVKKTEVQTGGFSKESILPKRNSDKLIARKKDWDPKKYGGFDSPTVAYSVLVVAKVEKGKSKKLKSVKELLGITIMERSSFEKNPIDFLEAKGYKEVKKDLIIKLPKYSLFELENGRKRMLASAGELQKGNELALPSKYVNFLYLASHYEKLKGSPEDNEQKQLFVEQHKHYLDEIIEQISEFSKRVILADANLDKVLSAYNKHRDKPIREQAENIIHLFTLTNLGAPAAFKYFDTTIDRKRYTSTKEVLDATLIHQSITGLYETRIDLSQLGGDGGPAPGGSGSSGGTLNIEDEYRLHETSKGPDVPLGSTWLSDFPQAWAETGGMGLAVRQAPLIIPLKATSTPVSIKQYPMSQEARLGIKPHIQRLLDQGILVPCQSPWNTPLLPVKKPGTNDYRPVQDLREVNKRVEDIHPTVPNPYNLLSGLPPSHQWYTVLDLKDAFFCLRLHPTSQSLFAFEWRDPEMGISGQLTWTRLPQGFKNSPTLFNEALHRDLADFRIQHPDLILLQYVDDLLLAATSELDCQQGTRALLQTLGDLGYRASAKKAQICQKQVKYLGYLLKEGQRWLTEARKETVMGQPTPKTPRQLREFLGKAGFCRLFIPGFAEMAAPLYPLTKPGTLFEWGPDQQKAYQEIKQALLTAPALGLPDLTKPFELFVDEKQGYAKGVLTQKLGPWRRPVAYLSKKLDPVAAGWPPCLRMVAAIAVLTKDAGKLTMGQPLVILAPHAVEALVKQPPDRWLSNARMTHYQALLLDTDRVQFGPIVALNPATLLPLPEEGLQHDCLDILAEAHGTRPDLTDQPLPDADHTWYTDGSSFLQEGQRKAGAAVTTETEVVWAKALPAGTSAQRAELIALTQALKMAEGKKLNVYTDSRYAFATAHIHGEIYRRRGWLTSEGKEIKNKDEILALLKALFLPKRLSIIHCPGHQKGNRAEARGNRMADQAAREVATRETPETSTLLAGKRTADGSEFEKRTADGSEFESPKKKAKVE

SEQ ID NO: 2534 - protein, 2098 aa, synthetic construct
MPAAKRVKLDGGDKKYSIGLDIGTNSVGWAVITDEYKVPSKKFKVLGNTDRHSIKKNLIGALLFDSGETAEATRLKRTARRRYTRRKNRICYLQEIFSNEMAKVDDSFFHRLEESFLVEEDKKHERHPIFGNIVDEVAYHEKYPTIYHLRKKLVDSTDKADLRLIYLALAHMIKFRGHFLIEGDLNPDNSDVDKLFIQLVQTYNQLFEENPINASGVDAKAILSARLSKSRRLENLIAQLPGEKKNGLFGNLIALSLGLTPNFKSNFDLAEDAKLQLSKDTYDDDLDNLLAQIGDQYADLFLAAKNLSDAILLSDILRVNTEITKAPLSASMIKRYDEHHQDLTLLKALVRQQLPEKYKEIFFDQSKNGYAGYIDGGASQEEFYKFIKPILEKMDGTEELLVKLNREDLLRKQRTFDNGSIPHQIHLGELHAILRRQEDFYPFLKDNREKIEKILTFRIPYYVGPLARGNSRFAWMTRKSEETITPWNFEEVVDKGASAQSFIERMTNFDKNLPNEKVLPKHSLLYEYFTVYNELTKVKYVTEGMRKPAFLSGEQKKAIVDLLFKTNRKVTVKQLKEDYFKKIECFDSVEISGVEDRFNASLGTYHDLLKIIKDKDFLDNEENEDILEDIVLTLTLFEDREMIEERLKTYAHLFDDKVMKQLKRRRYTGWGRLSRKLINGIRDKQSGKTILDFLKSDGFANRNFMQLIHDDSLTFKEDIQKAQVSGQGDSLHEHIANLAGSPAIKKGILQTVKVVDELVKVMGRHKPENIVIEMARENQTTQKGQKNSRERMKRIEEGIKELGSQILKEHPVENTQLQNEKLYLYYLQNGRDMYVDQELDINRLSDYDVDHIVPQSFLKDDSIDNKVLTRSDKARGKSDNVPSEEVVKKMKNYWRQLLNAKLITQRKFDNLTKAERGGLSELDKAGFIKRQLVETRQITKHVAQILDSRMNTKYDENDKLIREVKVITLKSKLVSDFRKDFQFYKVREINNYHHAHDAYLNAVVGTALIKKYPKLESEFVYGDYKVYDVRKMIAKSEQEIGKATAKYFFYSNIMNFFKTEITLANGEIRKRPLIETNGETGEIVWDKGRDFATVRKVLSMPQVNIVKKTEVQTGGFSKESILPKRNSDKLIARKKDWDPKKYGGFDSPTVAYSVLVVAKVEKGKSKKLKSVKELLGITIMERSSFEKNPIDFLEAKGYKEVKKDLIIKLPKYSLFELENGRKRMLASAGELQKGNELALPSKYVNFLYLASHYEKLKGSPEDNEQKQLFVEQHKHYLDEIIEQISEFSKRVILADANLDKVLSAYNKHRDKPIREQAENIIHLFTLTNLGAPAAFKYFDTTIDRKRYTSTKEVLDATLIHQSITGLYETRIDLSQLGGDGGPAPAPAPAPAPAPGGTLNIEDEYRLHETSKGPDVPLGSTWLSDFPQAWAETGGMGLAVRQAPLIIPLKATSTPVSIKQYPMSQEARLGIKPHIQRLLDQGILVPCQSPWNTPLLPVKKPGTNDYRPVQDLREVNKRVEDIHPTVPNPYNLLSGLPPSHQWYTVLDLKDAFFCLRLHPTSQSLFAFEWRDPEMGISGQLTWTRLPQGFKNSPTLFNEALHRDLADFRIQHPDLILLQYVDDLLLAATSELDCQQGTRALLQTLGDLGYRASAKKAQICQKQVKYLGYLLKEGQRWLTEARKETVMGQPTPKTPRQLREFLGKAGFCRLFIPGFAEMAAPLYPLTKPGTLFEWGPDQQKAYQEIKQALLTAPALGLPDLTKPFELFVDEKQGYAKGVLTQKLGPWRRPVAYLSKKLDPVAAGWPPCLRMVAAIAVLTKDAGKLTMGQPLVILAPHAVEALVKQPPDRWLSNARMTHYQALLLDTDRVQFGPIVALNPATLLPLPEEGLQHDCLDILAEAHGTRPDLTDQPLPDADHTWYTDGSSFLQEGQRKAGAAVTTETEVVWAKALPAGTSAQRAELIALTQALKMAEGKKLNVYTDSRYAFATAHIHGEIYRRRGWLTSEGKEIKNKDEILALLKALFLPKRLSIIHCPGHQKGNRAEARGNRMADQAAREVATRETPETSTLLAGKRTADGSEFEKRTADGSEFESPKKKAKVE

SEQ ID NO: 2535 - protein, 2096 aa, synthetic construct
MPAAKRVKLDGGDKKYSIGLDIGTNSVGWAVITDEYKVPSKKFKVLGNTDRHSIKKNLIGALLFDSGETAEATRLKRTARRRYTRRKNRICYLQEIFSNEMAKVDDSFFHRLEESFLVEEDKKHERHPIFGNIVDEVAYHEKYPTIYHLRKKLVDSTDKADLRLIYLALAHMIKFRGHFLIEGDLNPDNSDVDKLFIQLVQTYNQLFEENPINASGVDAKAILSARLSKSRRLENLIAQLPGEKKNGLFGNLIALSLGLTPNFKSNFDLAEDAKLQLSKDTYDDDLDNLLAQIGDQYADLFLAAKNLSDAILLSDILRVNTEITKAPLSASMIKRYDEHHQDLTLLKALVRQQLPEKYKEIFFDQSKNGYAGYIDGGASQEEFYKFIKPILEKMDGTEELLVKLNREDLLRKQRTFDNGSIPHQIHLGELHAILRRQEDFYPFLKDNREKIEKILTFRIPYYVGPLARGNSRFAWMTRKSEETITPWNFEEVVDKGASAQSFIERMTNFDKNLPNEKVLPKHSLLYEYFTVYNELTKVKYVTEGMRKPAFLSGEQKKAIVDLLFKTNRKVTVKQLKEDYFKKIECFDSVEISGVEDRFNASLGTYHDLLKIIKDKDFLDNEENEDILEDIVLTLTLFEDREMIEERLKTYAHLFDDKVMKQLKRRRYTGWGRLSRKLINGIRDKQSGKTILDFLKSDGFANRNFMQLIHDDSLTFKEDIQKAQVSGQGDSLHEHIANLAGSPAIKKGILQTVKVVDELVKVMGRHKPENIVIEMARENQTTQKGQKNSRERMKRIEEGIKELGSQILKEHPVENTQLQNEKLYLYYLQNGRDMYVDQELDINRLSDYDVDHIVPQSFLKDDSIDNKVLTRSDKARGKSDNVPSEEVVKKMKNYWRQLLNAKLITQRKFDNLTKAERGGLSELDKAGFIKRQLVETRQITKHVAQILDSRMNTKYDENDKLIREVKVITLKSKLVSDFRKDFQFYKVREINNYHHAHDAYLNAVVGTALIKKYPKLESEFVYGDYKVYDVRKMIAKSEQEIGKATAKYFFYSNIMNFFKTEITLANGEIRKRPLIETNGETGEIVWDKGRDFATVRKVLSMPQVNIVKKTEVQTGGFSKESILPKRNSDKLIARKKDWDPKKYGGFDSPTVAYSVLVVAKVEKGKSKKLKSVKELLGITIMERSSFEKNPIDFLEAKGYKEVKKDLIIKLPKYSLFELENGRKRMLASAGELQKGNELALPSKYVNFLYLASHYEKLKGSPEDNEQKQLFVEQHKHYLDEIIEQISEFSKRVILADANLDKVLSAYNKHRDKPIREQAENIIHLFTLTNLGAPAAFKYFDTTIDRKRYTSTKEVLDATLIHQSITGLYETRIDLSQLGGDGGGSSEAAAKPAPGGTLNIEDEYRLHETSKGPDVPLGSTWLSDFPQAWAETGGMGLAVRQAPLIIPLKATSTPVSIKQYPMSQEARLGIKPHIQRLLDQGILVPCQSPWNTPLLPVKKPGTNDYRPVQDLREVNKRVEDIHPTVPNPYNLLSGLPPSHQWYTVLDLKDAFFCLRLHPTSQSLFAFEWRDPEMGISGQLTWTRLPQGFKNSPTLFNEALHRDLADFRIQHPDLILLQYVDDLLLAATSELDCQQGTRALLQTLGDLGYRASAKKAQICQKQVKYLGYLLKEGQRWLTEARKETVMGQPTPKTPRQLREFLGKAGFCRLFIPGFAEMAAPLYPLTKPGTLFEWGPDQQKAYQEIKQALLTAPALGLPDLTKPFELFVDEKQGYAKGVLTQKLGPWRRPVAYLSKKLDPVAAGWPPCLRMVAAIAVLTKDAGKLTMGQPLVILAPHAVEALVKQPPDRWLSNARMTHYQALLLDTDRVQFGPIVALNPATLLPLPEEGLQHDCLDILAEAHGTRPDLTDQPLPDADHTWYTDGSSFLQEGQRKAGAAVTTETEVVWAKALPAGTSAQRAELIALTQALKMAEGKKLNVYTDSRYAFATAHIHGEIYRRRGWLTSEGKEIKNKDEILALLKALFLPKRLSIIHCPGHQKGNRAEARGNRMADQAAREVATRETPETSTLLAGKRTADGSEFEKRTADGSEFESPKKKAKVE

SEQ ID NO: 2536 - protein, 2110 aa, synthetic construct
MPAAKRVKLDGGDKKYSIGLDIGTNSVGWAVITDEYKVPSKKFKVLGNTDRHSIKKNLIGALLFDSGETAEATRLKRTARRRYTRRKNRICYLQEIFSNEMAKVDDSFFHRLEESFLVEEDKKHERHPIFGNIVDEVAYHEKYPTIYHLRKKLVDSTDKADLRLIYLALAHMIKFRGHFLIEGDLNPDNSDVDKLFIQLVQTYNQLFEENPINASGVDAKAILSARLSKSRRLENLIAQLPGEKKNGLFGNLIALSLGLTPNFKSNFDLAEDAKLQLSKDTYDDDLDNLLAQIGDQYADLFLAAKNLSDAILLSDILRVNTEITKAPLSASMIKRYDEHHQDLTLLKALVRQQLPEKYKEIFFDQSKNGYAGYIDGGASQEEFYKFIKPILEKMDGTEELLVKLNREDLLRKQRTFDNGSIPHQIHLGELHAILRRQEDFYPFLKDNREKIEKILTFRIPYYVGPLARGNSRFAWMTRKSEETITPWNFEEVVDKGASAQSFIERMTNFDKNLPNEKVLPKHSLLYEYFTVYNELTKVKYVTEGMRKPAFLSGEQKKAIVDLLFKTNRKVTVKQLKEDYFKKIECFDSVEISGVEDRFNASLGTYHDLLKIIKDKDFLDNEENEDILEDIVLTLTLFEDREMIEERLKTYAHLFDDKVMKQLKRRRYTGWGRLSRKLINGIRDKQSGKTILDFLKSDGFANRNFMQLIHDDSLTFKEDIQKAQVSGQGDSLHEHIANLAGSPAIKKGILQTVKVVDELVKVMGRHKPENIVIEMARENQTTQKGQKNSRERMKRIEEGIKELGSQILKEHPVENTQLQNEKLYLYYLQNGRDMYVDQELDINRLSDYDVDHIVPQSFLKDDSIDNKVLTRSDKARGKSDNVPSEEVVKKMKNYWRQLLNAKLITQRKFDNLTKAERGGLSELDKAGFIKRQLVETRQITKHVAQILDSRMNTKYDENDKLIREVKVITLKSKLVSDFRKDFQFYKVREINNYHHAHDAYLNAVVGTALIKKYPKLESEFVYGDYKVYDVRKMIAKSEQEIGKATAKYFFYSNIMNFFKTEITLANGEIRKRPLIETNGETGEIVWDKGRDFATVRKVLSMPQVNIVKKTEVQTGGFSKESILPKRNSDKLIARKKDWDPKKYGGFDSPTVAYSVLVVAKVEKGKSKKLKSVKELLGITIMERSSFEKNPIDFLEAKGYKEVKKDLIIKLPKYSLFELENGRKRMLASAGELQKGNELALPSKYVNFLYLASHYEKLKGSPEDNEQKQLFVEQHKHYLDEIIEQISEFSKRVILADANLDKVLSAYNKHRDKPIREQAENIIHLFTLTNLGAPAAFKYFDTTIDRKRYTSTKEVLDATLIHQSITGLYETRIDLSQLGGDGGEAAAKEAAAKEAAAKEAAAKEAAAKGGTLNIEDEYRLHETSKGPDVPLGSTWLSDFPQAWAETGGMGLAVRQAPLIIPLKATSTPVSIKQYPMSQEARLGIKPHIQRLLDQGILVPCQSPWNTPLLPVKKPGTNDYRPVQDLREVNKRVEDIHPTVPNPYNLLSGLPPSHQWYTVLDLKDAFFCLRLHPTSQSLFAFEWRDPEMGISGQLTWTRLPQGFKNSPTLFNEALHRDLADFRIQHPDLILLQYVDDLLLAATSELDCQQGTRALLQTLGDLGYRASAKKAQICQKQVKYLGYLLKEGQRWLTEARKETVMGQPTPKTPRQLREFLGKAGFCRLFIPGFAEMAAPLYPLTKPGTLFEWGPDQQKAYQEIKQALLTAPALGLPDLTKPFELFVDEKQGYAKGVLTQKLGPWRRPVAYLSKKLDPVAAGWPPCLRMVAAIAVLTKDAGKLTMGQPLVILAPHAVEALVKQPPDRWLSNARMTHYQALLLDTDRVQFGPIVALNPATLLPLPEEGLQHDCLDILAEAHGTRPDLTDQPLPDADHTWYTDGSSFLQEGQRKAGAAVTTETEVVWAKALPAGTSAQRAELIALTQALKMAEGKKLNVYTDSRYAFATAHIHGEIYRRRGWLTSEGKEIKNKDEILALLKALFLPKRLSIIHCPGHQKGNRAEARGNRMADQAAREVATRETPETSTLLAGKRTADGSEFEKRTADGSEFESPKKKAKVE

SEQ ID NO: 2537 - protein, 2097 aa, synthetic construct
MPAAKRVKLDGGDKKYSIGLDIGTNSVGWAVITDEYKVPSKKFKVLGNTDRHSIKKNLIGALLFDSGETAEATRLKRTARRRYTRRKNRICYLQEIFSNEMAKVDDSFFHRLEESFLVEEDKKHERHPIFGNIVDEVAYHEKYPTIYHLRKKLVDSTDKADLRLIYLALAHMIKFRGHFLIEGDLNPDNSDVDKLFIQLVQTYNQLFEENPINASGVDAKAILSARLSKSRRLENLIAQLPGEKKNGLFGNLIALSLGLTPNFKSNFDLAEDAKLQLSKDTYDDDLDNLLAQIGDQYADLFLAAKNLSDAILLSDILRVNTEITKAPLSASMIKRYDEHHQDLTLLKALVRQQLPEKYKEIFFDQSKNGYAGYIDGGASQEEFYKFIKPILEKMDGTEELLVKLNREDLLRKQRTFDNGSIPHQIHLGELHAILRRQEDFYPFLKDNREKIEKILTFRIPYYVGPLARGNSRFAWMTRKSEETITPWNFEEVVDKGASAQSFIERMTNFDKNLPNEKVLPKHSLLYEYFTVYNELTKVKYVTEGMRKPAFLSGEQKKAIVDLLFKTNRKVTVKQLKEDYFKKIECFDSVEISGVEDRFNASLGTYHDLLKIIKDKDFLDNEENEDILEDIVLTLTLFEDREMIEERLKTYAHLFDDKVMKQLKRRRYTGWGRLSRKLINGIRDKQSGKTILDFLKSDGFANRNFMQLIHDDSLTFKEDIQKAQVSGQGDSLHEHIANLAGSPAIKKGILQTVKVVDELVKVMGRHKPENIVIEMARENQTTQKGQKNSRERMKRIEEGIKELGSQILKEHPVENTQLQNEKLYLYYLQNGRDMYVDQELDINRLSDYDVDHIVPQSFLKDDSIDNKVLTRSDKARGKSDNVPSEEVVKKMKNYWRQLLNAKLITQRKFDNLTKAERGGLSELDKAGFIKRQLVETRQITKHVAQILDSRMNTKYDENDKLIREVKVITLKSKLVSDFRKDFQFYKVREINNYHHAHDAYLNAVVGTALIKKYPKLESEFVYGDYKVYDVRKMIAKSEQEIGKATAKYFFYSNIMNFFKTEITLANGEIRKRPLIETNGETGEIVWDKGRDFATVRKVLSMPQVNIVKKTEVQTGGFSKESILPKRNSDKLIARKKDWDPKKYGGFDSPTVAYSVLVVAKVEKGKSKKLKSVKELLGITIMERSSFEKNPIDFLEAKGYKEVKKDLIIKLPKYSLFELENGRKRMLASAGELQKGNELALPSKYVNFLYLASHYEKLKGSPEDNEQKQLFVEQHKHYLDEIIEQISEFSKRVILADANLDKVLSAYNKHRDKPIREQAENIIHLFTLTNLGAPAAFKYFDTTIDRKRYTSTKEVLDATLIHQSITGLYETRIDLSQLGGDGGGSSGSSGSSGSSGGTLNIEDEYRLHETSKGPDVPLGSTWLSDFPQAWAETGGMGLAVRQAPLIIPLKATSTPVSIKQYPMSQEARLGIKPHIQRLLDQGILVPCQSPWNTPLLPVKKPGTNDYRPVQDLREVNKRVEDIHPTVPNPYNLLSGLPPSHQWYTVLDLKDAFFCLRLHPTSQSLFAFEWRDPEMGISGQLTWTRLPQGFKNSPTLFNEALHRDLADFRIQHPDLILLQYVDDLLLAATSELDCQQGTRALLQTLGDLGYRASAKKAQICQKQVKYLGYLLKEGQRWLTEARKETVMGQPTPKTPRQLREFLGKAGFCRLFIPGFAEMAAPLYPLTKPGTLFEWGPDQQKAYQEIKQALLTAPALGLPDLTKPFELFVDEKQGYAKGVLTQKLGPWRRPVAYLSKKLDPVAAGWPPCLRMVAAIAVLTKDAGKLTMGQPLVILAPHAVEALVKQPPDRWLSNARMTHYQALLLDTDRVQFGPIVALNPATLLPLPEEGLQHDCLDILAEAHGTRPDLTDQPLPDADHTWYTDGSSFLQEGQRKAGAAVTTETEVVWAKALPAGTSAQRAELIALTQALKMAEGKKLNVYTDSRYAFATAHIHGEIYRRRGWLTSEGKEIKNKDEILALLKALFLPKRLSIIHCPGHQKGNRAEARGNRMADQAAREVATRETPETSTLLAGKRTADGSEFEKRTADGSEFESPKKKAKVE

SEQ ID NO: 2538 - protein, 2096 aa, synthetic construct
MPAAKRVKLDGGDKKYSIGLDIGTNSVGWAVITDEYKVPSKKFKVLGNTDRHSIKKNLIGALLFDSGETAEATRLKRTARRRYTRRKNRICYLQEIFSNEMAKVDDSFFHRLEESFLVEEDKKHERHPIFGNIVDEVAYHEKYPTIYHLRKKLVDSTDKADLRLIYLALAHMIKFRGHFLIEGDLNPDNSDVDKLFIQLVQTYNQLFEENPINASGVDAKAILSARLSKSRRLENLIAQLPGEKKNGLFGNLIALSLGLTPNFKSNFDLAEDAKLQLSKDTYDDDLDNLLAQIGDQYADLFLAAKNLSDAILLSDILRVNTEITKAPLSASMIKRYDEHHQDLTLLKALVRQQLPEKYKEIFFDQSKNGYAGYIDGGASQEEFYKFIKPILEKMDGTEELLVKLNREDLLRKQRTFDNGSIPHQIHLGELHAILRRQEDFYPFLKDNREKIEKILTFRIPYYVGPLARGNSRFAWMTRKSEETITPWNFEEVVDKGASAQSFIERMTNFDKNLPNEKVLPKHSLLYEYFTVYNELTKVKYVTEGMRKPAFLSGEQKKAIVDLLFKTNRKVTVKQLKEDYFKKIECFDSVEISGVEDRFNASLGTYHDLLKIIKDKDFLDNEENEDILEDIVLTLTLFEDREMIEERLKTYAHLFDDKVMKQLKRRRYTGWGRLSRKLINGIRDKQSGKTILDFLKSDGFANRNFMQLIHDDSLTFKEDIQKAQVSGQGDSLHEHIANLAGSPAIKKGILQTVKVVDELVKVMGRHKPENIVIEMARENQTTQKGQKNSRERMKRIEEGIKELGSQILKEHPVENTQLQNEKLYLYYLQNGRDMYVDQELDINRLSDYDVDHIVPQSFLKDDSIDNKVLTRSDKARGKSDNVPSEEVVKKMKNYWRQLLNAKLITQRKFDNLTKAERGGLSELDKAGFIKRQLVETRQITKHVAQILDSRMNTKYDENDKLIREVKVITLKSKLVSDFRKDFQFYKVREINNYHHAHDAYLNAVVGTALIKKYPKLESEFVYGDYKVYDVRKMIAKSEQEIGKATAKYFFYSNIMNFFKTEITLANGEIRKRPLIETNGETGEIVWDKGRDFATVRKVLSMPQVNIVKKTEVQTGGFSKESILPKRNSDKLIARKKDWDPKKYGGFDSPTVAYSVLVVAKVEKGKSKKLKSVKELLGITIMERSSFEKNPIDFLEAKGYKEVKKDLIIKLPKYSLFELENGRKRMLASAGELQKGNELALPSKYVNFLYLASHYEKLKGSPEDNEQKQLFVEQHKHYLDEIIEQISEFSKRVILADANLDKVLSAYNKHRDKPIREQAENIIHLFTLTNLGAPAAFKYFDTTIDRKRYTSTKEVLDATLIHQSITGLYETRIDLSQLGGDGGGGSGSSEAAAKGGTLNIEDEYRLHETSKGPDVPLGSTWLSDFPQAWAETGGMGLAVRQAPLIIPLKATSTPVSIKQYPMSQEARLGIKPHIQRLLDQGILVPCQSPWNTPLLPVKKPGTNDYRPVQDLREVNKRVEDIHPTVPNPYNLLSGLPPSHQWYTVLDLKDAFFCLRLHPTSQSLFAFEWRDPEMGISGQLTWTRLPQGFKNSPTLFNEALHRDLADFRIQHPDLILLQYVDDLLLAATSELDCQQGTRALLQTLGDLGYRASAKKAQICQKQVKYLGYLLKEGQRWLTEARKETVMGQPTPKTPRQLREFLGKAGFCRLFIPGFAEMAAPLYPLTKPGTLFEWGPDQQKAYQEIKQALLTAPALGLPDLTKPFELFVDEKQGYAKGVLTQKLGPWRRPVAYLSKKLDPVAAGWPPCLRMVAAIAVLTKDAGKLTMGQPLVILAPHAVEALVKQPPDRWLSNARMTHYQALLLDTDRVQFGPIVALNPATLLPLPEEGLQHDCLDILAEAHGTRPDLTDQPLPDADHTWYTDGSSFLQEGQRKAGAAVTTETEVVWAKALPAGTSAQRAELIALTQALKMAEGKKLNVYTDSRYAFATAHIHGEIYRRRGWLTSEGKEIKNKDEILALLKALFLPKRLSIIHCPGHQKGNRAEARGNRMADQAAREVATRETPETSTLLAGKRTADGSEFEKRTADGSEFESPKKKAKVE

SEQ ID NO: 2539 - protein, 2090 aa, synthetic construct
MPAAKRVKLDGGDKKYSIGLDIGTNSVGWAVITDEYKVPSKKFKVLGNTDRHSIKKNLIGALLFDSGETAEATRLKRTARRRYTRRKNRICYLQEIFSNEMAKVDDSFFHRLEESFLVEEDKKHERHPIFGNIVDEVAYHEKYPTIYHLRKKLVDSTDKADLRLIYLALAHMIKFRGHFLIEGDLNPDNSDVDKLFIQLVQTYNQLFEENPINASGVDAKAILSARLSKSRRLENLIAQLPGEKKNGLFGNLIALSLGLTPNFKSNFDLAEDAKLQLSKDTYDDDLDNLLAQIGDQYADLFLAAKNLSDAILLSDILRVNTEITKAPLSASMIKRYDEHHQDLTLLKALVRQQLPEKYKEIFFDQSKNGYAGYIDGGASQEEFYKFIKPILEKMDGTEELLVKLNREDLLRKQRTFDNGSIPHQIHLGELHAILRRQEDFYPFLKDNREKIEKILTFRIPYYVGPLARGNSRFAWMTRKSEETITPWNFEEVVDKGASAQSFIERMTNFDKNLPNEKVLPKHSLLYEYFTVYNELTKVKYVTEGMRKPAFLSGEQKKAIVDLLFKTNRKVTVKQLKEDYFKKIECFDSVEISGVEDRFNASLGTYHDLLKIIKDKDFLDNEENEDILEDIVLTLTLFEDREMIEERLKTYAHLFDDKVMKQLKRRRYTGWGRLSRKLINGIRDKQSGKTILDFLKSDGFANRNFMQLIHDDSLTFKEDIQKAQVSGQGDSLHEHIANLAGSPAIKKGILQTVKVVDELVKVMGRHKPENIVIEMARENQTTQKGQKNSRERMKRIEEGIKELGSQILKEHPVENTQLQNEKLYLYYLQNGRDMYVDQELDINRLSDYDVDHIVPQSFLKDDSIDNKVLTRSDKARGKSDNVPSEEVVKKMKNYWRQLLNAKLITQRKFDNLTKAERGGLSELDKAGFIKRQLVETRQITKHVAQILDSRMNTKYDENDKLIREVKVITLKSKLVSDFRKDFQFYKVREINNYHHAHDAYLNAVVGTALIKKYPKLESEFVYGDYKVYDVRKMIAKSEQEIGKATAKYFFYSNIMNFFKTEITLANGEIRKRPLIETNGETGEIVWDKGRDFATVRKVLSMPQVNIVKKTEVQTGGFSKESILPKRNSDKLIARKKDWDPKKYGGFDSPTVAYSVLVVAKVEKGKSKKLKSVKELLGITIMERSSFEKNPIDFLEAKGYKEVKKDLIIKLPKYSLFELENGRKRMLASAGELQKGNELALPSKYVNFLYLASHYEKLKGSPEDNEQKQLFVEQHKHYLDEIIEQISEFSKRVILADANLDKVLSAYNKHRDKPIREQAENIIHLFTLTNLGAPAAFKYFDTTIDRKRYTSTKEVLDATLIHQSITGLYETRIDLSQLGGDGGEAAAKGGTLNIEDEYRLHETSKGPDVPLGSTWLSDFPQAWAETGGMGLAVRQAPLIIPLKATSTPVSIKQYPMSQEARLGIKPHIQRLLDQGILVPCQSPWNTPLLPVKKPGTNDYRPVQDLREVNKRVEDIHPTVPNPYNLLSGLPPSHQWYTVLDLKDAFFCLRLHPTSQSLFAFEWRDPEMGISGQLTWTRLPQGFKNSPTLFNEALHRDLADFRIQHPDLILLQYVDDLLLAATSELDCQQGTRALLQTLGDLGYRASAKKAQICQKQVKYLGYLLKEGQRWLTEARKETVMGQPTPKTPRQLREFLGKAGFCRLFIPGFAEMAAPLYPLTKPGTLFEWGPDQQKAYQEIKQALLTAPALGLPDLTKPFELFVDEKQGYAKGVLTQKLGPWRRPVAYLSKKLDPVAAGWPPCLRMVAAIAVLTKDAGKLTMGQPLVILAPHAVEALVKQPPDRWLSNARMTHYQALLLDTDRVQFGPIVALNPATLLPLPEEGLQHDCLDILAEAHGTRPDLTDQPLPDADHTWYTDGSSFLQEGQRKAGAAVTTETEVVWAKALPAGTSAQRAELIALTQALKMAEGKKLNVYTDSRYAFATAHIHGEIYRRRGWLTSEGKEIKNKDEILALLKALFLPKRLSIIHCPGHQKGNRAEARGNRMADQAAREVATRETPETSTLLAGKRTADGSEFEKRTADGSEFESPKKKAKVE

SEQ ID NO: 2540 - protein, 2091 aa, synthetic construct
MPAAKRVKLDGGDKKYSIGLDIGTNSVGWAVITDEYKVPSKKFKVLGNTDRHSIKKNLIGALLFDSGETAEATRLKRTARRRYTRRKNRICYLQEIFSNEMAKVDDSFFHRLEESFLVEEDKKHERHPIFGNIVDEVAYHEKYPTIYHLRKKLVDSTDKADLRLIYLALAHMIKFRGHFLIEGDLNPDNSDVDKLFIQLVQTYNQLFEENPINASGVDAKAILSARLSKSRRLENLIAQLPGEKKNGLFGNLIALSLGLTPNFKSNFDLAEDAKLQLSKDTYDDDLDNLLAQIGDQYADLFLAAKNLSDAILLSDILRVNTEITKAPLSASMIKRYDEHHQDLTLLKALVRQQLPEKYKEIFFDQSKNGYAGYIDGGASQEEFYKFIKPILEKMDGTEELLVKLNREDLLRKQRTFDNGSIPHQIHLGELHAILRRQEDFYPFLKDNREKIEKILTFRIPYYVGPLARGNSRFAWMTRKSEETITPWNFEEVVDKGASAQSFIERMTNFDKNLPNEKVLPKHSLLYEYFTVYNELTKVKYVTEGMRKPAFLSGEQKKAIVDLLFKTNRKVTVKQLKEDYFKKIECFDSVEISGVEDRFNASLGTYHDLLKIIKDKDFLDNEENEDILEDIVLTLTLFEDREMIEERLKTYAHLFDDKVMKQLKRRRYTGWGRLSRKLINGIRDKQSGKTILDFLKSDGFANRNFMQLIHDDSLTFKEDIQKAQVSGQGDSLHEHIANLAGSPAIKKGILQTVKVVDELVKVMGRHKPENIVIEMARENQTTQKGQKNSRERMKRIEEGIKELGSQILKEHPVENTQLQNEKLYLYYLQNGRDMYVDQELDINRLSDYDVDHIVPQSFLKDDSIDNKVLTRSDKARGKSDNVPSEEVVKKMKNYWRQLLNAKLITQRKFDNLTKAERGGLSELDKAGFIKRQLVETRQITKHVAQILDSRMNTKYDENDKLIREVKVITLKSKLVSDFRKDFQFYKVREINNYHHAHDAYLNAVVGTALIKKYPKLESEFVYGDYKVYDVRKMIAKSEQEIGKATAKYFFYSNIMNFFKTEITLANGEIRKRPLIETNGETGEIVWDKGRDFATVRKVLSMPQVNIVKKTEVQTGGFSKESILPKRNSDKLIARKKDWDPKKYGGFDSPTVAYSVLVVAKVEKGKSKKLKSVKELLGITIMERSSFEKNPIDFLEAKGYKEVKKDLIIKLPKYSLFELENGRKRMLASAGELQKGNELALPSKYVNFLYLASHYEKLKGSPEDNEQKQLFVEQHKHYLDEIIEQISEFSKRVILADANLDKVLSAYNKHRDKPIREQAENIIHLFTLTNLGAPAAFKYFDTTIDRKRYTSTKEVLDATLIHQSITGLYETRIDLSQLGGDGGPAPGGGGGTLNIEDEYRLHETSKGPDVPLGSTWLSDFPQAWAETGGMGLAVRQAPLIIPLKATSTPVSIKQYPMSQEARLGIKPHIQRLLDQGILVPCQSPWNTPLLPVKKPGTNDYRPVQDLREVNKRVEDIHPTVPNPYNLLSGLPPSHQWYTVLDLKDAFFCLRLHPTSQSLFAFEWRDPEMGISGQLTWTRLPQGFKNSPTLFNEALHRDLADFRIQHPDLILLQYVDDLLLAATSELDCQQGTRALLQTLGDLGYRASAKKAQICQKQVKYLGYLLKEGQRWLTEARKETVMGQPTPKTPRQLREFLGKAGFCRLFIPGFAEMAAPLYPLTKPGTLFEWGPDQQKAYQEIKQALLTAPALGLPDLTKPFELFVDEKQGYAKGVLTQKLGPWRRPVAYLSKKLDPVAAGWPPCLRMVAAIAVLTKDAGKLTMGQPLVILAPHAVEALVKQPPDRWLSNARMTHYQALLLDTDRVQFGPIVALNPATLLPLPEEGLQHDCLDILAEAHGTRPDLTDQPLPDADHTWYTDGSSFLQEGQRKAGAAVTTETEVVWAKALPAGTSAQRAELIALTQALKMAEGKKLNVYTDSRYAFATAHIHGEIYRRRGWLTSEGKEIKNKDEILALLKALFLPKRLSIIHCPGHQKGNRAEARGNRMADQAAREVATRETPETSTLLAGKRTADGSEFEKRTADGSEFESPKKKAKVE

SEQ ID NO: 2541 - protein, 2115 aa, synthetic construct
MPAAKRVKLDGGDKKYSIGLDIGTNSVGWAVITDEYKVPSKKFKVLGNTDRHSIKKNLIGALLFDSGETAEATRLKRTARRRYTRRKNRICYLQEIFSNEMAKVDDSFFHRLEESFLVEEDKKHERHPIFGNIVDEVAYHEKYPTIYHLRKKLVDSTDKADLRLIYLALAHMIKFRGHFLIEGDLNPDNSDVDKLFIQLVQTYNQLFEENPINASGVDAKAILSARLSKSRRLENLIAQLPGEKKNGLFGNLIALSLGLTPNFKSNFDLAEDAKLQLSKDTYDDDLDNLLAQIGDQYADLFLAAKNLSDAILLSDILRVNTEITKAPLSASMIKRYDEHHQDLTLLKALVRQQLPEKYKEIFFDQSKNGYAGYIDGGASQEEFYKFIKPILEKMDGTEELLVKLNREDLLRKQRTFDNGSIPHQIHLGELHAILRRQEDFYPFLKDNREKIEKILTFRIPYYVGPLARGNSRFAWMTRKSEETITPWNFEEVVDKGASAQSFIERMTNFDKNLPNEKVLPKHSLLYEYFTVYNELTKVKYVTEGMRKPAFLSGEQKKAIVDLLFKTNRKVTVKQLKEDYFKKIECFDSVEISGVEDRFNASLGTYHDLLKIIKDKDFLDNEENEDILEDIVLTLTLFEDREMIEERLKTYAHLFDDKVMKQLKRRRYTGWGRLSRKLINGIRDKQSGKTILDFLKSDGFANRNFMQLIHDDSLTFKEDIQKAQVSGQGDSLHEHIANLAGSPAIKKGILQTVKVVDELVKVMGRHKPENIVIEMARENQTTQKGQKNSRERMKRIEEGIKELGSQILKEHPVENTQLQNEKLYLYYLQNGRDMYVDQELDINRLSDYDVDHIVPQSFLKDDSIDNKVLTRSDKARGKSDNVPSEEVVKKMKNYWRQLLNAKLITQRKFDNLTKAERGGLSELDKAGFIKRQLVETRQITKHVAQILDSRMNTKYDENDKLIREVKVITLKSKLVSDFRKDFQFYKVREINNYHHAHDAYLNAVVGTALIKKYPKLESEFVYGDYKVYDVRKMIAKSEQEIGKATAKYFFYSNIMNFFKTEITLANGEIRKRPLIETNGETGEIVWDKGRDFATVRKVLSMPQVNIVKKTEVQTGGFSKESILPKRNSDKLIARKKDWDPKKYGGFDSPTVAYSVLVVAKVEKGKSKKLKSVKELLGITIMERSSFEKNPIDFLEAKGYKEVKKDLIIKLPKYSLFELENGRKRMLASAGELQKGNELALPSKYVNFLYLASHYEKLKGSPEDNEQKQLFVEQHKHYLDEIIEQISEFSKRVILADANLDKVLSAYNKHRDKPIREQAENIIHLFTLTNLGAPAAFKYFDTTIDRKRYTSTKEVLDATLIHQSITGLYETRIDLSQLGGDGGEAAAKEAAAKEAAAKEAAAKEAAAKEAAAKGGTLNIEDEYRLHETSKGPDVPLGSTWLSDFPQAWAETGGMGLAVRQAPLIIPLKATSTPVSIKQYPMSQEARLGIKPHIQRLLDQGILVPCQSPWNTPLLPVKKPGTNDYRPVQDLREVNKRVEDIHPTVPNPYNLLSGLPPSHQWYTVLDLKDAFFCLRLHPTSQSLFAFEWRDPEMGISGQLTWTRLPQGFKNSPTLFNEALHRDLADFRIQHPDLILLQYVDDLLLAATSELDCQQGTRALLQTLGDLGYRASAKKAQICQKQVKYLGYLLKEGQRWLTEARKETVMGQPTPKTPRQLREFLGKAGFCRLFIPGFAEMAAPLYPLTKPGTLFEWGPDQQKAYQEIKQALLTAPALGLPDLTKPFELFVDEKQGYAKGVLTQKLGPWRRPVAYLSKKLDPVAAGWPPCLRMVAAIAVLTKDAGKLTMGQPLVILAPHAVEALVKQPPDRWLSNARMTHYQALLLDTDRVQFGPIVALNPATLLPLPEEGLQHDCLDILAEAHGTRPDLTDQPLPDADHTWYTDGSSFLQEGQRKAGAAVTTETEVVWAKALPAGTSAQRAELIALTQALKMAEGKKLNVYTDSRYAFATAHIHGEIYRRRGWLTSEGKEIKNKDEILALLKALFLPKRLSIIHCPGHQKGNRAEARGNRMADQAAREVATRETPETSTLLAGKRTADGSEFEKRTADGSEFESPKKKAKVE

SEQ ID NO: 2542 - protein, 2096 aa, synthetic construct
MPAAKRVKLDGGDKKYSIGLDIGTNSVGWAVITDEYKVPSKKFKVLGNTDRHSIKKNLIGALLFDSGETAEATRLKRTARRRYTRRKNRICYLQEIFSNEMAKVDDSFFHRLEESFLVEEDKKHERHPIFGNIVDEVAYHEKYPTIYHLRKKLVDSTDKADLRLIYLALAHMIKFRGHFLIEGDLNPDNSDVDKLFIQLVQTYNQLFEENPINASGVDAKAILSARLSKSRRLENLIAQLPGEKKNGLFGNLIALSLGLTPNFKSNFDLAEDAKLQLSKDTYDDDLDNLLAQIGDQYADLFLAAKNLSDAILLSDILRVNTEITKAPLSASMIKRYDEHHQDLTLLKALVRQQLPEKYKEIFFDQSKNGYAGYIDGGASQEEFYKFIKPILEKMDGTEELLVKLNREDLLRKQRTFDNGSIPHQIHLGELHAILRRQEDFYPFLKDNREKIEKILTFRIPYYVGPLARGNSRFAWMTRKSEETITPWNFEEVVDKGASAQSFIERMTNFDKNLPNEKVLPKHSLLYEYFTVYNELTKVKYVTEGMRKPAFLSGEQKKAIVDLLFKTNRKVTVKQLKEDYFKKIECFDSVEISGVEDRFNASLGTYHDLLKIIKDKDFLDNEENEDILEDIVLTLTLFEDREMIEERLKTYAHLFDDKVMKQLKRRRYTGWGRLSRKLINGIRDKQSGKTILDFLKSDGFANRNFMQLIHDDSLTFKEDIQKAQVSGQGDSLHEHIANLAGSPAIKKGILQTVKVVDELVKVMGRHKPENIVIEMARENQTTQKGQKNSRERMKRIEEGIKELGSQILKEHPVENTQLQNEKLYLYYLQNGRDMYVDQELDINRLSDYDVDHIVPQSFLKDDSIDNKVLTRSDKARGKSDNVPSEEVVKKMKNYWRQLLNAKLITQRKFDNLTKAERGGLSELDKAGFIKRQLVETRQITKHVAQILDSRMNTKYDENDKLIREVKVITLKSKLVSDFRKDFQFYKVREINNYHHAHDAYLNAVVGTALIKKYPKLESEFVYGDYKVYDVRKMIAKSEQEIGKATAKYFFYSNIMNFFKTEITLANGEIRKRPLIETNGETGEIVWDKGRDFATVRKVLSMPQVNIVKKTEVQTGGFSKESILPKRNSDKLIARKKDWDPKKYGGFDSPTVAYSVLVVAKVEKGKSKKLKSVKELLGITIMERSSFEKNPIDFLEAKGYKEVKKDLIIKLPKYSLFELENGRKRMLASAGELQKGNELALPSKYVNFLYLASHYEKLKGSPEDNEQKQLFVEQHKHYLDEIIEQISEFSKRVILADANLDKVLSAYNKHRDKPIREQAENIIHLFTLTNLGAPAAFKYFDTTIDRKRYTSTKEVLDATLIHQSITGLYETRIDLSQLGGDGGPAPGSSEAAAKGGTLNIEDEYRLHETSKGPDVPLGSTWLSDFPQAWAETGGMGLAVRQAPLIIPLKATSTPVSIKQYPMSQEARLGIKPHIQRLLDQGILVPCQSPWNTPLLPVKKPGTNDYRPVQDLREVNKRVEDIHPTVPNPYNLLSGLPPSHQWYTVLDLKDAFFCLRLHPTSQSLFAFEWRDPEMGISGQLTWTRLPQGFKNSPTLFNEALHRDLADFRIQHPDLILLQYVDDLLLAATSELDCQQGTRALLQTLGDLGYRASAKKAQICQKQVKYLGYLLKEGQRWLTEARKETVMGQPTPKTPRQLREFLGKAGFCRLFIPGFAEMAAPLYPLTKPGTLFEWGPDQQKAYQEIKQALLTAPALGLPDLTKPFELFVDEKQGYAKGVLTQKLGPWRRPVAYLSKKLDPVAAGWPPCLRMVAAIAVLTKDAGKLTMGQPLVILAPHAVEALVKQPPDRWLSNARMTHYQALLLDTDRVQFGPIVALNPATLLPLPEEGLQHDCLDILAEAHGTRPDLTDQPLPDADHTWYTDGSSFLQEGQRKAGAAVTTETEVVWAKALPAGTSAQRAELIALTQALKMAEGKKLNVYTDSRYAFATAHIHGEIYRRRGWLTSEGKEIKNKDEILALLKALFLPKRLSIIHCPGHQKGNRAEARGNRMADQAAREVATRETPETSTLLAGKRTADGSEFEKRTADGSEFESPKKKAKVE

SEQ ID NO: 2543 - protein, 2094 aa, synthetic construct
MPAAKRVKLDGGDKKYSIGLDIGTNSVGWAVITDEYKVPSKKFKVLGNTDRHSIKKNLIGALLFDSGETAEATRLKRTARRRYTRRKNRICYLQEIFSNEMAKVDDSFFHRLEESFLVEEDKKHERHPIFGNIVDEVAYHEKYPTIYHLRKKLVDSTDKADLRLIYLALAHMIKFRGHFLIEGDLNPDNSDVDKLFIQLVQTYNQLFEENPINASGVDAKAILSARLSKSRRLENLIAQLPGEKKNGLFGNLIALSLGLTPNFKSNFDLAEDAKLQLSKDTYDDDLDNLLAQIGDQYADLFLAAKNLSDAILLSDILRVNTEITKAPLSASMIKRYDEHHQDLTLLKALVRQQLPEKYKEIFFDQSKNGYAGYIDGGASQEEFYKFIKPILEKMDGTEELLVKLNREDLLRKQRTFDNGSIPHQIHLGELHAILRRQEDFYPFLKDNREKIEKILTFRIPYYVGPLARGNSRFAWMTRKSEETITPWNFEEVVDKGASAQSFIERMTNFDKNLPNEKVLPKHSLLYEYFTVYNELTKVKYVTEGMRKPAFLSGEQKKAIVDLLFKTNRKVTVKQLKEDYFKKIECFDSVEISGVEDRFNASLGTYHDLLKIIKDKDFLDNEENEDILEDIVLTLTLFEDREMIEERLKTYAHLFDDKVMKQLKRRRYTGWGRLSRKLINGIRDKQSGKTILDFLKSDGFANRNFMQLIHDDSLTFKEDIQKAQVSGQGDSLHEHIANLAGSPAIKKGILQTVKVVDELVKVMGRHKPENIVIEMARENQTTQKGQKNSRERMKRIEEGIKELGSQILKEHPVENTQLQNEKLYLYYLQNGRDMYVDQELDINRLSDYDVDHIVPQSFLKDDSIDNKVLTRSDKARGKSDNVPSEEVVKKMKNYWRQLLNAKLITQRKFDNLTKAERGGLSELDKAGFIKRQLVETRQITKHVAQILDSRMNTKYDENDKLIREVKVITLKSKLVSDFRKDFQFYKVREINNYHHAHDAYLNAVVGTALIKKYPKLESEFVYGDYKVYDVRKMIAKSEQEIGKATAKYFFYSNIMNFFKTEITLANGEIRKRPLIETNGETGEIVWDKGRDFATVRKVLSMPQVNIVKKTEVQTGGFSKESILPKRNSDKLIARKKDWDPKKYGGFDSPTVAYSVLVVAKVEKGKSKKLKSVKELLGITIMERSSFEKNPIDFLEAKGYKEVKKDLIIKLPKYSLFELENGRKRMLASAGELQKGNELALPSKYVNFLYLASHYEKLKGSPEDNEQKQLFVEQHKHYLDEIIEQISEFSKRVILADANLDKVLSAYNKHRDKPIREQAENIIHLFTLTNLGAPAAFKYFDTTIDRKRYTSTKEVLDATLIHQSITGLYETRIDLSQLGGDGGGGGPAPGGSGGTLNIEDEYRLHETSKGPDVPLGSTWLSDFPQAWAETGGMGLAVRQAPLIIPLKATSTPVSIKQYPMSQEARLGIKPHIQRLLDQGILVPCQSPWNTPLLPVKKPGTNDYRPVQDLREVNKRVEDIHPTVPNPYNLLSGLPPSHQWYTVLDLKDAFFCLRLHPTSQSLFAFEWRDPEMGISGQLTWTRLPQGFKNSPTLFNEALHRDLADFRIQHPDLILLQYVDDLLLAATSELDCQQGTRALLQTLGDLGYRASAKKAQICQKQVKYLGYLLKEGQRWLTEARKETVMGQPTPKTPRQLREFLGKAGFCRLFIPGFAEMAAPLYPLTKPGTLFEWGPDQQKAYQEIKQALLTAPALGLPDLTKPFELFVDEKQGYAKGVLTQKLGPWRRPVAYLSKKLDPVAAGWPPCLRMVAAIAVLTKDAGKLTMGQPLVILAPHAVEALVKQPPDRWLSNARMTHYQALLLDTDRVQFGPIVALNPATLLPLPEEGLQHDCLDILAEAHGTRPDLTDQPLPDADHTWYTDGSSFLQEGQRKAGAAVTTETEVVWAKALPAGTSAQRAELIALTQALKMAEGKKLNVYTDSRYAFATAHIHGEIYRRRGWLTSEGKEIKNKDEILALLKALFLPKRLSIIHCPGHQKGNRAEARGNRMADQAAREVATRETPETSTLLAGKRTADGSEFEKRTADGSEFESPKKKAKVE

SEQ ID NO: 2544 - protein, 2097 aa, synthetic construct
MPAAKRVKLDGGDKKYSIGLDIGTNSVGWAVITDEYKVPSKKFKVLGNTDRHSIKKNLIGALLFDSGETAEATRLKRTARRRYTRRKNRICYLQEIFSNEMAKVDDSFFHRLEESFLVEEDKKHERHPIFGNIVDEVAYHEKYPTIYHLRKKLVDSTDKADLRLIYLALAHMIKFRGHFLIEGDLNPDNSDVDKLFIQLVQTYNQLFEENPINASGVDAKAILSARLSKSRRLENLIAQLPGEKKNGLFGNLIALSLGLTPNFKSNFDLAEDAKLQLSKDTYDDDLDNLLAQIGDQYADLFLAAKNLSDAILLSDILRVNTEITKAPLSASMIKRYDEHHQDLTLLKALVRQQLPEKYKEIFFDQSKNGYAGYIDGGASQEEFYKFIKPILEKMDGTEELLVKLNREDLLRKQRTFDNGSIPHQIHLGELHAILRRQEDFYPFLKDNREKIEKILTFRIPYYVGPLARGNSRFAWMTRKSEETITPWNFEEVVDKGASAQSFIERMTNFDKNLPNEKVLPKHSLLYEYFTVYNELTKVKYVTEGMRKPAFLSGEQKKAIVDLLFKTNRKVTVKQLKEDYFKKIECFDSVEISGVEDRFNASLGTYHDLLKIIKDKDFLDNEENEDILEDIVLTLTLFEDREMIEERLKTYAHLFDDKVMKQLKRRRYTGWGRLSRKLINGIRDKQSGKTILDFLKSDGFANRNFMQLIHDDSLTFKEDIQKAQVSGQGDSLHEHIANLAGSPAIKKGILQTVKVVDELVKVMGRHKPENIVIEMARENQTTQKGQKNSRERMKRIEEGIKELGSQILKEHPVENTQLQNEKLYLYYLQNGRDMYVDQELDINRLSDYDVDHIVPQSFLKDDSIDNKVLTRSDKARGKSDNVPSEEVVKKMKNYWRQLLNAKLITQRKFDNLTKAERGGLSELDKAGFIKRQLVETRQITKHVAQILDSRMNTKYDENDKLIREVKVITLKSKLVSDFRKDFQFYKVREINNYHHAHDAYLNAVVGTALIKKYPKLESEFVYGDYKVYDVRKMIAKSEQEIGKATAKYFFYSNIMNFFKTEITLANGEIRKRPLIETNGETGEIVWDKGRDFATVRKVLSMPQVNIVKKTEVQTGGFSKESILPKRNSDKLIARKKDWDPKKYGGFDSPTVAYSVLVVAKVEKGKSKKLKSVKELLGITIMERSSFEKNPIDFLEAKGYKEVKKDLIIKLPKYSLFELENGRKRMLASAGELQKGNELALPSKYVNFLYLASHYEKLKGSPEDNEQKQLFVEQHKHYLDEIIEQISEFSKRVILADANLDKVLSAYNKHRDKPIREQAENIIHLFTLTNLGAPAAFKYFDTTIDRKRYTSTKEVLDATLIHQSITGLYETRIDLSQLGGDGGGGSGGSGGSGGSGGTLNIEDEYRLHETSKGPDVPLGSTWLSDFPQAWAETGGMGLAVRQAPLIIPLKATSTPVSIKQYPMSQEARLGIKPHIQRLLDQGILVPCQSPWNTPLLPVKKPGTNDYRPVQDLREVNKRVEDIHPTVPNPYNLLSGLPPSHQWYTVLDLKDAFFCLRLHPTSQSLFAFEWRDPEMGISGQLTWTRLPQGFKNSPTLFNEALHRDLADFRIQHPDLILLQYVDDLLLAATSELDCQQGTRALLQTLGDLGYRASAKKAQICQKQVKYLGYLLKEGQRWLTEARKETVMGQPTPKTPRQLREFLGKAGFCRLFIPGFAEMAAPLYPLTKPGTLFEWGPDQQKAYQEIKQALLTAPALGLPDLTKPFELFVDEKQGYAKGVLTQKLGPWRRPVAYLSKKLDPVAAGWPPCLRMVAAIAVLTKDAGKLTMGQPLVILAPHAVEALVKQPPDRWLSNARMTHYQALLLDTDRVQFGPIVALNPATLLPLPEEGLQHDCLDILAEAHGTRPDLTDQPLPDADHTWYTDGSSFLQEGQRKAGAAVTTETEVVWAKALPAGTSAQRAELIALTQALKMAEGKKLNVYTDSRYAFATAHIHGEIYRRRGWLTSEGKEIKNKDEILALLKALFLPKRLSIIHCPGHQKGNRAEARGNRMADQAAREVATRETPETSTLLAGKRTADGSEFEKRTADGSEFESPKKKAKVE

SEQ ID NO: 2545 - protein, 2094 aa, synthetic construct
MPAAKRVKLDGGDKKYSIGLDIGTNSVGWAVITDEYKVPSKKFKVLGNTDRHSIKKNLIGALLFDSGETAEATRLKRTARRRYTRRKNRICYLQEIFSNEMAKVDDSFFHRLEESFLVEEDKKHERHPIFGNIVDEVAYHEKYPTIYHLRKKLVDSTDKADLRLIYLALAHMIKFRGHFLIEGDLNPDNSDVDKLFIQLVQTYNQLFEENPINASGVDAKAILSARLSKSRRLENLIAQLPGEKKNGLFGNLIALSLGLTPNFKSNFDLAEDAKLQLSKDTYDDDLDNLLAQIGDQYADLFLAAKNLSDAILLSDILRVNTEITKAPLSASMIKRYDEHHQDLTLLKALVRQQLPEKYKEIFFDQSKNGYAGYIDGGASQEEFYKFIKPILEKMDGTEELLVKLNREDLLRKQRTFDNGSIPHQIHLGELHAILRRQEDFYPFLKDNREKIEKILTFRIPYYVGPLARGNSRFAWMTRKSEETITPWNFEEVVDKGASAQSFIERMTNFDKNLPNEKVLPKHSLLYEYFTVYNELTKVKYVTEGMRKPAFLSGEQKKAIVDLLFKTNRKVTVKQLKEDYFKKIECFDSVEISGVEDRFNASLGTYHDLLKIIKDKDFLDNEENEDILEDIVLTLTLFEDREMIEERLKTYAHLFDDKVMKQLKRRRYTGWGRLSRKLINGIRDKQSGKTILDFLKSDGFANRNFMQLIHDDSLTFKEDIQKAQVSGQGDSLHEHIANLAGSPAIKKGILQTVKVVDELVKVMGRHKPENIVIEMARENQTTQKGQKNSRERMKRIEEGIKELGSQILKEHPVENTQLQNEKLYLYYLQNGRDMYVDQELDINRLSDYDVDHIVPQSFLKDDSIDNKVLTRSDKARGKSDNVPSEEVVKKMKNYWRQLLNAKLITQRKFDNLTKAERGGLSELDKAGFIKRQLVETRQITKHVAQILDSRMNTKYDENDKLIREVKVITLKSKLVSDFRKDFQFYKVREINNYHHAHDAYLNAVVGTALIKKYPKLESEFVYGDYKVYDVRKMIAKSEQEIGKATAKYFFYSNIMNFFKTEITLANGEIRKRPLIETNGETGEIVWDKGRDFATVRKVLSMPQVNIVKKTEVQTGGFSKESILPKRNSDKLIARKKDWDPKKYGGFDSPTVAYSVLVVAKVEKGKSKKLKSVKELLGITIMERSSFEKNPIDFLEAKGYKEVKKDLIIKLPKYSLFELENGRKRMLASAGELQKGNELALPSKYVNFLYLASHYEKLKGSPEDNEQKQLFVEQHKHYLDEIIEQISEFSKRVILADANLDKVLSAYNKHRDKPIREQAENIIHLFTLTNLGAPAAFKYFDTTIDRKRYTSTKEVLDATLIHQSITGLYETRIDLSQLGGDGGGGSGSSGGGGGTLNIEDEYRLHETSKGPDVPLGSTWLSDFPQAWAETGGMGLAVRQAPLIIPLKATSTPVSIKQYPMSQEARLGIKPHIQRLLDQGILVPCQSPWNTPLLPVKKPGTNDYRPVQDLREVNKRVEDIHPTVPNPYNLLSGLPPSHQWYTVLDLKDAFFCLRLHPTSQSLFAFEWRDPEMGISGQLTWTRLPQGFKNSPTLFNEALHRDLADFRIQHPDLILLQYVDDLLLAATSELDCQQGTRALLQTLGDLGYRASAKKAQICQKQVKYLGYLLKEGQRWLTEARKETVMGQPTPKTPRQLREFLGKAGFCRLFIPGFAEMAAPLYPLTKPGTLFEWGPDQQKAYQEIKQALLTAPALGLPDLTKPFELFVDEKQGYAKGVLTQKLGPWRRPVAYLSKKLDPVAAGWPPCLRMVAAIAVLTKDAGKLTMGQPLVILAPHAVEALVKQPPDRWLSNARMTHYQALLLDTDRVQFGPIVALNPATLLPLPEEGLQHDCLDILAEAHGTRPDLTDQPLPDADHTWYTDGSSFLQEGQRKAGAAVTTETEVVWAKALPAGTSAQRAELIALTQALKMAEGKKLNVYTDSRYAFATAHIHGEIYRRRGWLTSEGKEIKNKDEILALLKALFLPKRLSIIHCPGHQKGNRAEARGNRMADQAAREVATRETPETSTLLAGKRTADGSEFEKRTADGSEFESPKKKAKVE

SEQ ID NO: 2546 - protein, 2091 aa, synthetic construct
MPAAKRVKLDGGDKKYSIGLDIGTNSVGWAVITDEYKVPSKKFKVLGNTDRHSIKKNLIGALLFDSGETAEATRLKRTARRRYTRRKNRICYLQEIFSNEMAKVDDSFFHRLEESFLVEEDKKHERHPIFGNIVDEVAYHEKYPTIYHLRKKLVDSTDKADLRLIYLALAHMIKFRGHFLIEGDLNPDNSDVDKLFIQLVQTYNQLFEENPINASGVDAKAILSARLSKSRRLENLIAQLPGEKKNGLFGNLIALSLGLTPNFKSNFDLAEDAKLQLSKDTYDDDLDNLLAQIGDQYADLFLAAKNLSDAILLSDILRVNTEITKAPLSASMIKRYDEHHQDLTLLKALVRQQLPEKYKEIFFDQSKNGYAGYIDGGASQEEFYKFIKPILEKMDGTEELLVKLNREDLLRKQRTFDNGSIPHQIHLGELHAILRRQEDFYPFLKDNREKIEKILTFRIPYYVGPLARGNSRFAWMTRKSEETITPWNFEEVVDKGASAQSFIERMTNFDKNLPNEKVLPKHSLLYEYFTVYNELTKVKYVTEGMRKPAFLSGEQKKAIVDLLFKTNRKVTVKQLKEDYFKKIECFDSVEISGVEDRFNASLGTYHDLLKIIKDKDFLDNEENEDILEDIVLTLTLFEDREMIEERLKTYAHLFDDKVMKQLKRRRYTGWGRLSRKLINGIRDKQSGKTILDFLKSDGFANRNFMQLIHDDSLTFKEDIQKAQVSGQGDSLHEHIANLAGSPAIKKGILQTVKVVDELVKVMGRHKPENIVIEMARENQTTQKGQKNSRERMKRIEEGIKELGSQILKEHPVENTQLQNEKLYLYYLQNGRDMYVDQELDINRLSDYDVDHIVPQSFLKDDSIDNKVLTRSDKARGKSDNVPSEEVVKKMKNYWRQLLNAKLITQRKFDNLTKAERGGLSELDKAGFIKRQLVETRQITKHVAQILDSRMNTKYDENDKLIREVKVITLKSKLVSDFRKDFQFYKVREINNYHHAHDAYLNAVVGTALIKKYPKLESEFVYGDYKVYDVRKMIAKSEQEIGKATAKYFFYSNIMNFFKTEITLANGEIRKRPLIETNGETGEIVWDKGRDFATVRKVLSMPQVNIVKKTEVQTGGFSKESILPKRNSDKLIARKKDWDPKKYGGFDSPTVAYSVLVVAKVEKGKSKKLKSVKELLGITIMERSSFEKNPIDFLEAKGYKEVKKDLIIKLPKYSLFELENGRKRMLASAGELQKGNELALPSKYVNFLYLASHYEKLKGSPEDNEQKQLFVEQHKHYLDEIIEQISEFSKRVILADANLDKVLSAYNKHRDKPIREQAENIIHLFTLTNLGAPAAFKYFDTTIDRKRYTSTKEVLDATLIHQSITGLYETRIDLSQLGGDGGPAPGGSGGTLNIEDEYRLHETSKGPDVPLGSTWLSDFPQAWAETGGMGLAVRQAPLIIPLKATSTPVSIKQYPMSQEARLGIKPHIQRLLDQGILVPCQSPWNTPLLPVKKPGTNDYRPVQDLREVNKRVEDIHPTVPNPYNLLSGLPPSHQWYTVLDLKDAFFCLRLHPTSQSLFAFEWRDPEMGISGQLTWTRLPQGFKNSPTLFNEALHRDLADFRIQHPDLILLQYVDDLLLAATSELDCQQGTRALLQTLGDLGYRASAKKAQICQKQVKYLGYLLKEGQRWLTEARKETVMGQPTPKTPRQLREFLGKAGFCRLFIPGFAEMAAPLYPLTKPGTLFEWGPDQQKAYQEIKQALLTAPALGLPDLTKPFELFVDEKQGYAKGVLTQKLGPWRRPVAYLSKKLDPVAAGWPPCLRMVAAIAVLTKDAGKLTMGQPLVILAPHAVEALVKQPPDRWLSNARMTHYQALLLDTDRVQFGPIVALNPATLLPLPEEGLQHDCLDILAEAHGTRPDLTDQPLPDADHTWYTDGSSFLQEGQRKAGAAVTTETEVVWAKALPAGTSAQRAELIALTQALKMAEGKKLNVYTDSRYAFATAHIHGEIYRRRGWLTSEGKEIKNKDEILALLKALFLPKRLSIIHCPGHQKGNRAEARGNRMADQAAREVATRETPETSTLLAGKRTADGSEFEKRTADGSEFESPKKKAKVE

SEQ ID NO: 2547 - protein, 2091 aa, synthetic construct
MPAAKRVKLDGGDKKYSIGLDIGTNSVGWAVITDEYKVPSKKFKVLGNTDRHSIKKNLIGALLFDSGETAEATRLKRTARRRYTRRKNRICYLQEIFSNEMAKVDDSFFHRLEESFLVEEDKKHERHPIFGNIVDEVAYHEKYPTIYHLRKKLVDSTDKADLRLIYLALAHMIKFRGHFLIEGDLNPDNSDVDKLFIQLVQTYNQLFEENPINASGVDAKAILSARLSKSRRLENLIAQLPGEKKNGLFGNLIALSLGLTPNFKSNFDLAEDAKLQLSKDTYDDDLDNLLAQIGDQYADLFLAAKNLSDAILLSDILRVNTEITKAPLSASMIKRYDEHHQDLTLLKALVRQQLPEKYKEIFFDQSKNGYAGYIDGGASQEEFYKFIKPILEKMDGTEELLVKLNREDLLRKQRTFDNGSIPHQIHLGELHAILRRQEDFYPFLKDNREKIEKILTFRIPYYVGPLARGNSRFAWMTRKSEETITPWNFEEVVDKGASAQSFIERMTNFDKNLPNEKVLPKHSLLYEYFTVYNELTKVKYVTEGMRKPAFLSGEQKKAIVDLLFKTNRKVTVKQLKEDYFKKIECFDSVEISGVEDRFNASLGTYHDLLKIIKDKDFLDNEENEDILEDIVLTLTLFEDREMIEERLKTYAHLFDDKVMKQLKRRRYTGWGRLSRKLINGIRDKQSGKTILDFLKSDGFANRNFMQLIHDDSLTFKEDIQKAQVSGQGDSLHEHIANLAGSPAIKKGILQTVKVVDELVKVMGRHKPENIVIEMARENQTTQKGQKNSRERMKRIEEGIKELGSQILKEHPVENTQLQNEKLYLYYLQNGRDMYVDQELDINRLSDYDVDHIVPQSFLKDDSIDNKVLTRSDKARGKSDNVPSEEVVKKMKNYWRQLLNAKLITQRKFDNLTKAERGGLSELDKAGFIKRQLVETRQITKHVAQILDSRMNTKYDENDKLIREVKVITLKSKLVSDFRKDFQFYKVREINNYHHAHDAYLNAVVGTALIKKYPKLESEFVYGDYKVYDVRKMIAKSEQEIGKATAKYFFYSNIMNFFKTEITLANGEIRKRPLIETNGETGEIVWDKGRDFATVRKVLSMPQVNIVKKTEVQTGGFSKESILPKRNSDKLIARKKDWDPKKYGGFDSPTVAYSVLVVAKVEKGKSKKLKSVKELLGITIMERSSFEKNPIDFLEAKGYKEVKKDLIIKLPKYSLFELENGRKRMLASAGELQKGNELALPSKYVNFLYLASHYEKLKGSPEDNEQKQLFVEQHKHYLDEIIEQISEFSKRVILADANLDKVLSAYNKHRDKPIREQAENIIHLFTLTNLGAPAAFKYFDTTIDRKRYTSTKEVLDATLIHQSITGLYETRIDLSQLGGDGGGGGPAPGGTLNIEDEYRLHETSKGPDVPLGSTWLSDFPQAWAETGGMGLAVRQAPLIIPLKATSTPVSIKQYPMSQEARLGIKPHIQRLLDQGILVPCQSPWNTPLLPVKKPGTNDYRPVQDLREVNKRVEDIHPTVPNPYNLLSGLPPSHQWYTVLDLKDAFFCLRLHPTSQSLFAFEWRDPEMGISGQLTWTRLPQGFKNSPTLFNEALHRDLADFRIQHPDLILLQYVDDLLLAATSELDCQQGTRALLQTLGDLGYRASAKKAQICQKQVKYLGYLLKEGQRWLTEARKETVMGQPTPKTPRQLREFLGKAGFCRLFIPGFAEMAAPLYPLTKPGTLFEWGPDQQKAYQEIKQALLTAPALGLPDLTKPFELFVDEKQGYAKGVLTQKLGPWRRPVAYLSKKLDPVAAGWPPCLRMVAAIAVLTKDAGKLTMGQPLVILAPHAVEALVKQPPDRWLSNARMTHYQALLLDTDRVQFGPIVALNPATLLPLPEEGLQHDCLDILAEAHGTRPDLTDQPLPDADHTWYTDGSSFLQEGQRKAGAAVTTETEVVWAKALPAGTSAQRAELIALTQALKMAEGKKLNVYTDSRYAFATAHIHGEIYRRRGWLTSEGKEIKNKDEILALLKALFLPKRLSIIHCPGHQKGNRAEARGNRMADQAAREVATRETPETSTLLAGKRTADGSEFEKRTADGSEFESPKKKAKVE

SEQ ID NO: 2548 - protein, 2096 aa, synthetic construct
MPAAKRVKLDGGDKKYSIGLDIGTNSVGWAVITDEYKVPSKKFKVLGNTDRHSIKKNLIGALLFDSGETAEATRLKRTARRRYTRRKNRICYLQEIFSNEMAKVDDSFFHRLEESFLVEEDKKHERHPIFGNIVDEVAYHEKYPTIYHLRKKLVDSTDKADLRLIYLALAHMIKFRGHFLIEGDLNPDNSDVDKLFIQLVQTYNQLFEENPINASGVDAKAILSARLSKSRRLENLIAQLPGEKKNGLFGNLIALSLGLTPNFKSNFDLAEDAKLQLSKDTYDDDLDNLLAQIGDQYADLFLAAKNLSDAILLSDILRVNTEITKAPLSASMIKRYDEHHQDLTLLKALVRQQLPEKYKEIFFDQSKNGYAGYIDGGASQEEFYKFIKPILEKMDGTEELLVKLNREDLLRKQRTFDNGSIPHQIHLGELHAILRRQEDFYPFLKDNREKIEKILTFRIPYYVGPLARGNSRFAWMTRKSEETITPWNFEEVVDKGASAQSFIERMTNFDKNLPNEKVLPKHSLLYEYFTVYNELTKVKYVTEGMRKPAFLSGEQKKAIVDLLFKTNRKVTVKQLKEDYFKKIECFDSVEISGVEDRFNASLGTYHDLLKIIKDKDFLDNEENEDILEDIVLTLTLFEDREMIEERLKTYAHLFDDKVMKQLKRRRYTGWGRLSRKLINGIRDKQSGKTILDFLKSDGFANRNFMQLIHDDSLTFKEDIQKAQVSGQGDSLHEHIANLAGSPAIKKGILQTVKVVDELVKVMGRHKPENIVIEMARENQTTQKGQKNSRERMKRIEEGIKELGSQILKEHPVENTQLQNEKLYLYYLQNGRDMYVDQELDINRLSDYDVDHIVPQSFLKDDSIDNKVLTRSDKARGKSDNVPSEEVVKKMKNYWRQLLNAKLITQRKFDNLTKAERGGLSELDKAGFIKRQLVETRQITKHVAQILDSRMNTKYDENDKLIREVKVITLKSKLVSDFRKDFQFYKVREINNYHHAHDAYLNAVVGTALIKKYPKLESEFVYGDYKVYDVRKMIAKSEQEIGKATAKYFFYSNIMNFFKTEITLANGEIRKRPLIETNGETGEIVWDKGRDFATVRKVLSMPQVNIVKKTEVQTGGFSKESILPKRNSDKLIARKKDWDPKKYGGFDSPTVAYSVLVVAKVEKGKSKKLKSVKELLGITIMERSSFEKNPIDFLEAKGYKEVKKDLIIKLPKYSLFELENGRKRMLASAGELQKGNELALPSKYVNFLYLASHYEKLKGSPEDNEQKQLFVEQHKHYLDEIIEQISEFSKRVILADANLDKVLSAYNKHRDKPIREQAENIIHLFTLTNLGAPAAFKYFDTTIDRKRYTSTKEVLDATLIHQSITGLYETRIDLSQLGGDGGEAAAKGGSGSSGGTLNIEDEYRLHETSKGPDVPLGSTWLSDFPQAWAETGGMGLAVRQAPLIIPLKATSTPVSIKQYPMSQEARLGIKPHIQRLLDQGILVPCQSPWNTPLLPVKKPGTNDYRPVQDLREVNKRVEDIHPTVPNPYNLLSGLPPSHQWYTVLDLKDAFFCLRLHPTSQSLFAFEWRDPEMGISGQLTWTRLPQGFKNSPTLFNEALHRDLADFRIQHPDLILLQYVDDLLLAATSELDCQQGTRALLQTLGDLGYRASAKKAQICQKQVKYLGYLLKEGQRWLTEARKETVMGQPTPKTPRQLREFLGKAGFCRLFIPGFAEMAAPLYPLTKPGTLFEWGPDQQKAYQEIKQALLTAPALGLPDLTKPFELFVDEKQGYAKGVLTQKLGPWRRPVAYLSKKLDPVAAGWPPCLRMVAAIAVLTKDAGKLTMGQPLVILAPHAVEALVKQPPDRWLSNARMTHYQALLLDTDRVQFGPIVALNPATLLPLPEEGLQHDCLDILAEAHGTRPDLTDQPLPDADHTWYTDGSSFLQEGQRKAGAAVTTETEVVWAKALPAGTSAQRAELIALTQALKMAEGKKLNVYTDSRYAFATAHIHGEIYRRRGWLTSEGKEIKNKDEILALLKALFLPKRLSIIHCPGHQKGNRAEARGNRMADQAAREVATRETPETSTLLAGKRTADGSEFEKRTADGSEFESPKKKAKVE

SEQ ID NO: 2549 - protein, 2093 aa, synthetic construct
MPAAKRVKLDGGDKKYSIGLDIGTNSVGWAVITDEYKVPSKKFKVLGNTDRHSIKKNLIGALLFDSGETAEATRLKRTARRRYTRRKNRICYLQEIFSNEMAKVDDSFFHRLEESFLVEEDKKHERHPIFGNIVDEVAYHEKYPTIYHLRKKLVDSTDKADLRLIYLALAHMIKFRGHFLIEGDLNPDNSDVDKLFIQLVQTYNQLFEENPINASGVDAKAILSARLSKSRRLENLIAQLPGEKKNGLFGNLIALSLGLTPNFKSNFDLAEDAKLQLSKDTYDDDLDNLLAQIGDQYADLFLAAKNLSDAILLSDILRVNTEITKAPLSASMIKRYDEHHQDLTLLKALVRQQLPEKYKEIFFDQSKNGYAGYIDGGASQEEFYKFIKPILEKMDGTEELLVKLNREDLLRKQRTFDNGSIPHQIHLGELHAILRRQEDFYPFLKDNREKIEKILTFRIPYYVGPLARGNSRFAWMTRKSEETITPWNFEEVVDKGASAQSFIERMTNFDKNLPNEKVLPKHSLLYEYFTVYNELTKVKYVTEGMRKPAFLSGEQKKAIVDLLFKTNRKVTVKQLKEDYFKKIECFDSVEISGVEDRFNASLGTYHDLLKIIKDKDFLDNEENEDILEDIVLTLTLFEDREMIEERLKTYAHLFDDKVMKQLKRRRYTGWGRLSRKLINGIRDKQSGKTILDFLKSDGFANRNFMQLIHDDSLTFKEDIQKAQVSGQGDSLHEHIANLAGSPAIKKGILQTVKVVDELVKVMGRHKPENIVIEMARENQTTQKGQKNSRERMKRIEEGIKELGSQILKEHPVENTQLQNEKLYLYYLQNGRDMYVDQELDINRLSDYDVDHIVPQSFLKDDSIDNKVLTRSDKARGKSDNVPSEEVVKKMKNYWRQLLNAKLITQRKFDNLTKAERGGLSELDKAGFIKRQLVETRQITKHVAQILDSRMNTKYDENDKLIREVKVITLKSKLVSDFRKDFQFYKVREINNYHHAHDAYLNAVVGTALIKKYPKLESEFVYGDYKVYDVRKMIAKSEQEIGKATAKYFFYSNIMNFFKTEITLANGEIRKRPLIETNGETGEIVWDKGRDFATVRKVLSMPQVNIVKKTEVQTGGFSKESILPKRNSDKLIARKKDWDPKKYGGFDSPTVAYSVLVVAKVEKGKSKKLKSVKELLGITIMERSSFEKNPIDFLEAKGYKEVKKDLIIKLPKYSLFELENGRKRMLASAGELQKGNELALPSKYVNFLYLASHYEKLKGSPEDNEQKQLFVEQHKHYLDEIIEQISEFSKRVILADANLDKVLSAYNKHRDKPIREQAENIIHLFTLTNLGAPAAFKYFDTTIDRKRYTSTKEVLDATLIHQSITGLYETRIDLSQLGGDGGGGGGGGGGGGTLNIEDEYRLHETSKGPDVPLGSTWLSDFPQAWAETGGMGLAVRQAPLIIPLKATSTPVSIKQYPMSQEARLGIKPHIQRLLDQGILVPCQSPWNTPLLPVKKPGTNDYRPVQDLREVNKRVEDIHPTVPNPYNLLSGLPPSHQWYTVLDLKDAFFCLRLHPTSQSLFAFEWRDPEMGISGQLTWTRLPQGFKNSPTLFNEALHRDLADFRIQHPDLILLQYVDDLLLAATSELDCQQGTRALLQTLGDLGYRASAKKAQICQKQVKYLGYLLKEGQRWLTEARKETVMGQPTPKTPRQLREFLGKAGFCRLFIPGFAEMAAPLYPLTKPGTLFEWGPDQQKAYQEIKQALLTAPALGLPDLTKPFELFVDEKQGYAKGVLTQKLGPWRRPVAYLSKKLDPVAAGWPPCLRMVAAIAVLTKDAGKLTMGQPLVILAPHAVEALVKQPPDRWLSNARMTHYQALLLDTDRVQFGPIVALNPATLLPLPEEGLQHDCLDILAEAHGTRPDLTDQPLPDADHTWYTDGSSFLQEGQRKAGAAVTTETEVVWAKALPAGTSAQRAELIALTQALKMAEGKKLNVYTDSRYAFATAHIHGEIYRRRGWLTSEGKEIKNKDEILALLKALFLPKRLSIIHCPGHQKGNRAEARGNRMADQAAREVATRETPETSTLLAGKRTADGSEFEKRTADGSEFESPKKKAKVE

SEQ ID NO: 2550 - protein, 2096 aa, synthetic construct
MPAAKRVKLDGGDKKYSIGLDIGTNSVGWAVITDEYKVPSKKFKVLGNTDRHSIKKNLIGALLFDSGETAEATRLKRTARRRYTRRKNRICYLQEIFSNEMAKVDDSFFHRLEESFLVEEDKKHERHPIFGNIVDEVAYHEKYPTIYHLRKKLVDSTDKADLRLIYLALAHMIKFRGHFLIEGDLNPDNSDVDKLFIQLVQTYNQLFEENPINASGVDAKAILSARLSKSRRLENLIAQLPGEKKNGLFGNLIALSLGLTPNFKSNFDLAEDAKLQLSKDTYDDDLDNLLAQIGDQYADLFLAAKNLSDAILLSDILRVNTEITKAPLSASMIKRYDEHHQDLTLLKALVRQQLPEKYKEIFFDQSKNGYAGYIDGGASQEEFYKFIKPILEKMDGTEELLVKLNREDLLRKQRTFDNGSIPHQIHLGELHAILRRQEDFYPFLKDNREKIEKILTFRIPYYVGPLARGNSRFAWMTRKSEETITPWNFEEVVDKGASAQSFIERMTNFDKNLPNEKVLPKHSLLYEYFTVYNELTKVKYVTEGMRKPAFLSGEQKKAIVDLLFKTNRKVTVKQLKEDYFKKIECFDSVEISGVEDRFNASLGTYHDLLKIIKDKDFLDNEENEDILEDIVLTLTLFEDREMIEERLKTYAHLFDDKVMKQLKRRRYTGWGRLSRKLINGIRDKQSGKTILDFLKSDGFANRNFMQLIHDDSLTFKEDIQKAQVSGQGDSLHEHIANLAGSPAIKKGILQTVKVVDELVKVMGRHKPENIVIEMARENQTTQKGQKNSRERMKRIEEGIKELGSQILKEHPVENTQLQNEKLYLYYLQNGRDMYVDQELDINRLSDYDVDHIVPQSFLKDDSIDNKVLTRSDKARGKSDNVPSEEVVKKMKNYWRQLLNAKLITQRKFDNLTKAERGGLSELDKAGFIKRQLVETRQITKHVAQILDSRMNTKYDENDKLIREVKVITLKSKLVSDFRKDFQFYKVREINNYHHAHDAYLNAVVGTALIKKYPKLESEFVYGDYKVYDVRKMIAKSEQEIGKATAKYFFYSNIMNFFKTEITLANGEIRKRPLIETNGETGEIVWDKGRDFATVRKVLSMPQVNIVKKTEVQTGGFSKESILPKRNSDKLIARKKDWDPKKYGGFDSPTVAYSVLVVAKVEKGKSKKLKSVKELLGITIMERSSFEKNPIDFLEAKGYKEVKKDLIIKLPKYSLFELENGRKRMLASAGELQKGNELALPSKYVNFLYLASHYEKLKGSPEDNEQKQLFVEQHKHYLDEIIEQISEFSKRVILADANLDKVLSAYNKHRDKPIREQAENIIHLFTLTNLGAPAAFKYFDTTIDRKRYTSTKEVLDATLIHQSITGLYETRIDLSQLGGDGGGSSEAAAKGGGGGTLNIEDEYRLHETSKGPDVPLGSTWLSDFPQAWAETGGMGLAVRQAPLIIPLKATSTPVSIKQYPMSQEARLGIKPHIQRLLDQGILVPCQSPWNTPLLPVKKPGTNDYRPVQDLREVNKRVEDIHPTVPNPYNLLSGLPPSHQWYTVLDLKDAFFCLRLHPTSQSLFAFEWRDPEMGISGQLTWTRLPQGFKNSPTLFNEALHRDLADFRIQHPDLILLQYVDDLLLAATSELDCQQGTRALLQTLGDLGYRASAKKAQICQKQVKYLGYLLKEGQRWLTEARKETVMGQPTPKTPRQLREFLGKAGFCRLFIPGFAEMAAPLYPLTKPGTLFEWGPDQQKAYQEIKQALLTAPALGLPDLTKPFELFVDEKQGYAKGVLTQKLGPWRRPVAYLSKKLDPVAAGWPPCLRMVAAIAVLTKDAGKLTMGQPLVILAPHAVEALVKQPPDRWLSNARMTHYQALLLDTDRVQFGPIVALNPATLLPLPEEGLQHDCLDILAEAHGTRPDLTDQPLPDADHTWYTDGSSFLQEGQRKAGAAVTTETEVVWAKALPAGTSAQRAELIALTQALKMAEGKKLNVYTDSRYAFATAHIHGEIYRRRGWLTSEGKEIKNKDEILALLKALFLPKRLSIIHCPGHQKGNRAEARGNRMADQAAREVATRETPETSTLLAGKRTADGSEFEKRTADGSEFESPKKKAKVE

SEQ ID NO: 2551 - protein, 2096 aa, synthetic construct
MPAAKRVKLDGGDKKYSIGLDIGTNSVGWAVITDEYKVPSKKFKVLGNTDRHSIKKNLIGALLFDSGETAEATRLKRTARRRYTRRKNRICYLQEIFSNEMAKVDDSFFHRLEESFLVEEDKKHERHPIFGNIVDEVAYHEKYPTIYHLRKKLVDSTDKADLRLIYLALAHMIKFRGHFLIEGDLNPDNSDVDKLFIQLVQTYNQLFEENPINASGVDAKAILSARLSKSRRLENLIAQLPGEKKNGLFGNLIALSLGLTPNFKSNFDLAEDAKLQLSKDTYDDDLDNLLAQIGDQYADLFLAAKNLSDAILLSDILRVNTEITKAPLSASMIKRYDEHHQDLTLLKALVRQQLPEKYKEIFFDQSKNGYAGYIDGGASQEEFYKFIKPILEKMDGTEELLVKLNREDLLRKQRTFDNGSIPHQIHLGELHAILRRQEDFYPFLKDNREKIEKILTFRIPYYVGPLARGNSRFAWMTRKSEETITPWNFEEVVDKGASAQSFIERMTNFDKNLPNEKVLPKHSLLYEYFTVYNELTKVKYVTEGMRKPAFLSGEQKKAIVDLLFKTNRKVTVKQLKEDYFKKIECFDSVEISGVEDRFNASLGTYHDLLKIIKDKDFLDNEENEDILEDIVLTLTLFEDREMIEERLKTYAHLFDDKVMKQLKRRRYTGWGRLSRKLINGIRDKQSGKTILDFLKSDGFANRNFMQLIHDDSLTFKEDIQKAQVSGQGDSLHEHIANLAGSPAIKKGILQTVKVVDELVKVMGRHKPENIVIEMARENQTTQKGQKNSRERMKRIEEGIKELGSQILKEHPVENTQLQNEKLYLYYLQNGRDMYVDQELDINRLSDYDVDHIVPQSFLKDDSIDNKVLTRSDKARGKSDNVPSEEVVKKMKNYWRQLLNAKLITQRKFDNLTKAERGGLSELDKAGFIKRQLVETRQITKHVAQILDSRMNTKYDENDKLIREVKVITLKSKLVSDFRKDFQFYKVREINNYHHAHDAYLNAVVGTALIKKYPKLESEFVYGDYKVYDVRKMIAKSEQEIGKATAKYFFYSNIMNFFKTEITLANGEIRKRPLIETNGETGEIVWDKGRDFATVRKVLSMPQVNIVKKTEVQTGGFSKESILPKRNSDKLIARKKDWDPKKYGGFDSPTVAYSVLVVAKVEKGKSKKLKSVKELLGITIMERSSFEKNPIDFLEAKGYKEVKKDLIIKLPKYSLFELENGRKRMLASAGELQKGNELALPSKYVNFLYLASHYEKLKGSPEDNEQKQLFVEQHKHYLDEIIEQISEFSKRVILADANLDKVLSAYNKHRDKPIREQAENIIHLFTLTNLGAPAAFKYFDTTIDRKRYTSTKEVLDATLIHQSITGLYETRIDLSQLGGDGGEAAAKGGSGGGGGTLNIEDEYRLHETSKGPDVPLGSTWLSDFPQAWAETGGMGLAVRQAPLIIPLKATSTPVSIKQYPMSQEARLGIKPHIQRLLDQGILVPCQSPWNTPLLPVKKPGTNDYRPVQDLREVNKRVEDIHPTVPNPYNLLSGLPPSHQWYTVLDLKDAFFCLRLHPTSQSLFAFEWRDPEMGISGQLTWTRLPQGFKNSPTLFNEALHRDLADFRIQHPDLILLQYVDDLLLAATSELDCQQGTRALLQTLGDLGYRASAKKAQICQKQVKYLGYLLKEGQRWLTEARKETVMGQPTPKTPRQLREFLGKAGFCRLFIPGFAEMAAPLYPLTKPGTLFEWGPDQQKAYQEIKQALLTAPALGLPDLTKPFELFVDEKQGYAKGVLTQKLGPWRRPVAYLSKKLDPVAAGWPPCLRMVAAIAVLTKDAGKLTMGQPLVILAPHAVEALVKQPPDRWLSNARMTHYQALLLDTDRVQFGPIVALNPATLLPLPEEGLQHDCLDILAEAHGTRPDLTDQPLPDADHTWYTDGSSFLQEGQRKAGAAVTTETEVVWAKALPAGTSAQRAELIALTQALKMAEGKKLNVYTDSRYAFATAHIHGEIYRRRGWLTSEGKEIKNKDEILALLKALFLPKRLSIIHCPGHQKGNRAEARGNRMADQAAREVATRETPETSTLLAGKRTADGSEFEKRTADGSEFESPKKKAKVE

SEQ ID NO: 2552 - protein, 2094 aa, synthetic construct
MPAAKRVKLDGGDKKYSIGLDIGTNSVGWAVITDEYKVPSKKFKVLGNTDRHSIKKNLIGALLFDSGETAEATRLKRTARRRYTRRKNRICYLQEIFSNEMAKVDDSFFHRLEESFLVEEDKKHERHPIFGNIVDEVAYHEKYPTIYHLRKKLVDSTDKADLRLIYLALAHMIKFRGHFLIEGDLNPDNSDVDKLFIQLVQTYNQLFEENPINASGVDAKAILSARLSKSRRLENLIAQLPGEKKNGLFGNLIALSLGLTPNFKSNFDLAEDAKLQLSKDTYDDDLDNLLAQIGDQYADLFLAAKNLSDAILLSDILRVNTEITKAPLSASMIKRYDEHHQDLTLLKALVRQQLPEKYKEIFFDQSKNGYAGYIDGGASQEEFYKFIKPILEKMDGTEELLVKLNREDLLRKQRTFDNGSIPHQIHLGELHAILRRQEDFYPFLKDNREKIEKILTFRIPYYVGPLARGNSRFAWMTRKSEETITPWNFEEVVDKGASAQSFIERMTNFDKNLPNEKVLPKHSLLYEYFTVYNELTKVKYVTEGMRKPAFLSGEQKKAIVDLLFKTNRKVTVKQLKEDYFKKIECFDSVEISGVEDRFNASLGTYHDLLKIIKDKDFLDNEENEDILEDIVLTLTLFEDREMIEERLKTYAHLFDDKVMKQLKRRRYTGWGRLSRKLINGIRDKQSGKTILDFLKSDGFANRNFMQLIHDDSLTFKEDIQKAQVSGQGDSLHEHIANLAGSPAIKKGILQTVKVVDELVKVMGRHKPENIVIEMARENQTTQKGQKNSRERMKRIEEGIKELGSQILKEHPVENTQLQNEKLYLYYLQNGRDMYVDQELDINRLSDYDVDHIVPQSFLKDDSIDNKVLTRSDKARGKSDNVPSEEVVKKMKNYWRQLLNAKLITQRKFDNLTKAERGGLSELDKAGFIKRQLVETRQITKHVAQILDSRMNTKYDENDKLIREVKVITLKSKLVSDFRKDFQFYKVREINNYHHAHDAYLNAVVGTALIKKYPKLESEFVYGDYKVYDVRKMIAKSEQEIGKATAKYFFYSNIMNFFKTEITLANGEIRKRPLIETNGETGEIVWDKGRDFATVRKVLSMPQVNIVKKTEVQTGGFSKESILPKRNSDKLIARKKDWDPKKYGGFDSPTVAYSVLVVAKVEKGKSKKLKSVKELLGITIMERSSFEKNPIDFLEAKGYKEVKKDLIIKLPKYSLFELENGRKRMLASAGELQKGNELALPSKYVNFLYLASHYEKLKGSPEDNEQKQLFVEQHKHYLDEIIEQISEFSKRVILADANLDKVLSAYNKHRDKPIREQAENIIHLFTLTNLGAPAAFKYFDTTIDRKRYTSTKEVLDATLIHQSITGLYETRIDLSQLGGDGGGSSPAPGGSGGTLNIEDEYRLHETSKGPDVPLGSTWLSDFPQAWAETGGMGLAVRQAPLIIPLKATSTPVSIKQYPMSQEARLGIKPHIQRLLDQGILVPCQSPWNTPLLPVKKPGTNDYRPVQDLREVNKRVEDIHPTVPNPYNLLSGLPPSHQWYTVLDLKDAFFCLRLHPTSQSLFAFEWRDPEMGISGQLTWTRLPQGFKNSPTLFNEALHRDLADFRIQHPDLILLQYVDDLLLAATSELDCQQGTRALLQTLGDLGYRASAKKAQICQKQVKYLGYLLKEGQRWLTEARKETVMGQPTPKTPRQLREFLGKAGFCRLFIPGFAEMAAPLYPLTKPGTLFEWGPDQQKAYQEIKQALLTAPALGLPDLTKPFELFVDEKQGYAKGVLTQKLGPWRRPVAYLSKKLDPVAAGWPPCLRMVAAIAVLTKDAGKLTMGQPLVILAPHAVEALVKQPPDRWLSNARMTHYQALLLDTDRVQFGPIVALNPATLLPLPEEGLQHDCLDILAEAHGTRPDLTDQPLPDADHTWYTDGSSFLQEGQRKAGAAVTTETEVVWAKALPAGTSAQRAELIALTQALKMAEGKKLNVYTDSRYAFATAHIHGEIYRRRGWLTSEGKEIKNKDEILALLKALFLPKRLSIIHCPGHQKGNRAEARGNRMADQAAREVATRETPETSTLLAGKRTADGSEFEKRTADGSEFESPKKKAKVE

SEQ ID NO: 2553 - protein, 2096 aa, synthetic construct
MPAAKRVKLDGGDKKYSIGLDIGTNSVGWAVITDEYKVPSKKFKVLGNTDRHSIKKNLIGALLFDSGETAEATRLKRTARRRYTRRKNRICYLQEIFSNEMAKVDDSFFHRLEESFLVEEDKKHERHPIFGNIVDEVAYHEKYPTIYHLRKKLVDSTDKADLRLIYLALAHMIKFRGHFLIEGDLNPDNSDVDKLFIQLVQTYNQLFEENPINASGVDAKAILSARLSKSRRLENLIAQLPGEKKNGLFGNLIALSLGLTPNFKSNFDLAEDAKLQLSKDTYDDDLDNLLAQIGDQYADLFLAAKNLSDAILLSDILRVNTEITKAPLSASMIKRYDEHHQDLTLLKALVRQQLPEKYKEIFFDQSKNGYAGYIDGGASQEEFYKFIKPILEKMDGTEELLVKLNREDLLRKQRTFDNGSIPHQIHLGELHAILRRQEDFYPFLKDNREKIEKILTFRIPYYVGPLARGNSRFAWMTRKSEETITPWNFEEVVDKGASAQSFIERMTNFDKNLPNEKVLPKHSLLYEYFTVYNELTKVKYVTEGMRKPAFLSGEQKKAIVDLLFKTNRKVTVKQLKEDYFKKIECFDSVEISGVEDRFNASLGTYHDLLKIIKDKDFLDNEENEDILEDIVLTLTLFEDREMIEERLKTYAHLFDDKVMKQLKRRRYTGWGRLSRKLINGIRDKQSGKTILDFLKSDGFANRNFMQLIHDDSLTFKEDIQKAQVSGQGDSLHEHIANLAGSPAIKKGILQTVKVVDELVKVMGRHKPENIVIEMARENQTTQKGQKNSRERMKRIEEGIKELGSQILKEHPVENTQLQNEKLYLYYLQNGRDMYVDQELDINRLSDYDVDHIVPQSFLKDDSIDNKVLTRSDKARGKSDNVPSEEVVKKMKNYWRQLLNAKLITQRKFDNLTKAERGGLSELDKAGFIKRQLVETRQITKHVAQILDSRMNTKYDENDKLIREVKVITLKSKLVSDFRKDFQFYKVREINNYHHAHDAYLNAVVGTALIKKYPKLESEFVYGDYKVYDVRKMIAKSEQEIGKATAKYFFYSNIMNFFKTEITLANGEIRKRPLIETNGETGEIVWDKGRDFATVRKVLSMPQVNIVKKTEVQTGGFSKESILPKRNSDKLIARKKDWDPKKYGGFDSPTVAYSVLVVAKVEKGKSKKLKSVKELLGITIMERSSFEKNPIDFLEAKGYKEVKKDLIIKLPKYSLFELENGRKRMLASAGELQKGNELALPSKYVNFLYLASHYEKLKGSPEDNEQKQLFVEQHKHYLDEIIEQISEFSKRVILADANLDKVLSAYNKHRDKPIREQAENIIHLFTLTNLGAPAAFKYFDTTIDRKRYTSTKEVLDATLIHQSITGLYETRIDLSQLGGDGGGSSEAAAKGGSGGTLNIEDEYRLHETSKGPDVPLGSTWLSDFPQAWAETGGMGLAVRQAPLIIPLKATSTPVSIKQYPMSQEARLGIKPHIQRLLDQGILVPCQSPWNTPLLPVKKPGTNDYRPVQDLREVNKRVEDIHPTVPNPYNLLSGLPPSHQWYTVLDLKDAFFCLRLHPTSQSLFAFEWRDPEMGISGQLTWTRLPQGFKNSPTLFNEALHRDLADFRIQHPDLILLQYVDDLLLAATSELDCQQGTRALLQTLGDLGYRASAKKAQICQKQVKYLGYLLKEGQRWLTEARKETVMGQPTPKTPRQLREFLGKAGFCRLFIPGFAEMAAPLYPLTKPGTLFEWGPDQQKAYQEIKQALLTAPALGLPDLTKPFELFVDEKQGYAKGVLTQKLGPWRRPVAYLSKKLDPVAAGWPPCLRMVAAIAVLTKDAGKLTMGQPLVILAPHAVEALVKQPPDRWLSNARMTHYQALLLDTDRVQFGPIVALNPATLLPLPEEGLQHDCLDILAEAHGTRPDLTDQPLPDADHTWYTDGSSFLQEGQRKAGAAVTTETEVVWAKALPAGTSAQRAELIALTQALKMAEGKKLNVYTDSRYAFATAHIHGEIYRRRGWLTSEGKEIKNKDEILALLKALFLPKRLSIIHCPGHQKGNRAEARGNRMADQAAREVATRETPETSTLLAGKRTADGSEFEKRTADGSEFESPKKKAKVE

SEQ ID NO: 2554 - protein, 2094 aa, synthetic construct
MPAAKRVKLDGGDKKYSIGLDIGTNSVGWAVITDEYKVPSKKFKVLGNTDRHSIKKNLIGALLFDSGETAEATRLKRTARRRYTRRKNRICYLQEIFSNEMAKVDDSFFHRLEESFLVEEDKKHERHPIFGNIVDEVAYHEKYPTIYHLRKKLVDSTDKADLRLIYLALAHMIKFRGHFLIEGDLNPDNSDVDKLFIQLVQTYNQLFEENPINASGVDAKAILSARLSKSRRLENLIAQLPGEKKNGLFGNLIALSLGLTPNFKSNFDLAEDAKLQLSKDTYDDDLDNLLAQIGDQYADLFLAAKNLSDAILLSDILRVNTEITKAPLSASMIKRYDEHHQDLTLLKALVRQQLPEKYKEIFFDQSKNGYAGYIDGGASQEEFYKFIKPILEKMDGTEELLVKLNREDLLRKQRTFDNGSIPHQIHLGELHAILRRQEDFYPFLKDNREKIEKILTFRIPYYVGPLARGNSRFAWMTRKSEETITPWNFEEVVDKGASAQSFIERMTNFDKNLPNEKVLPKHSLLYEYFTVYNELTKVKYVTEGMRKPAFLSGEQKKAIVDLLFKTNRKVTVKQLKEDYFKKIECFDSVEISGVEDRFNASLGTYHDLLKIIKDKDFLDNEENEDILEDIVLTLTLFEDREMIEERLKTYAHLFDDKVMKQLKRRRYTGWGRLSRKLINGIRDKQSGKTILDFLKSDGFANRNFMQLIHDDSLTFKEDIQKAQVSGQGDSLHEHIANLAGSPAIKKGILQTVKVVDELVKVMGRHKPENIVIEMARENQTTQKGQKNSRERMKRIEEGIKELGSQILKEHPVENTQLQNEKLYLYYLQNGRDMYVDQELDINRLSDYDVDHIVPQSFLKDDSIDNKVLTRSDKARGKSDNVPSEEVVKKMKNYWRQLLNAKLITQRKFDNLTKAERGGLSELDKAGFIKRQLVETRQITKHVAQILDSRMNTKYDENDKLIREVKVITLKSKLVSDFRKDFQFYKVREINNYHHAHDAYLNAVVGTALIKKYPKLESEFVYGDYKVYDVRKMIAKSEQEIGKATAKYFFYSNIMNFFKTEITLANGEIRKRPLIETNGETGEIVWDKGRDFATVRKVLSMPQVNIVKKTEVQTGGFSKESILPKRNSDKLIARKKDWDPKKYGGFDSPTVAYSVLVVAKVEKGKSKKLKSVKELLGITIMERSSFEKNPIDFLEAKGYKEVKKDLIIKLPKYSLFELENGRKRMLASAGELQKGNELALPSKYVNFLYLASHYEKLKGSPEDNEQKQLFVEQHKHYLDEIIEQISEFSKRVILADANLDKVLSAYNKHRDKPIREQAENIIHLFTLTNLGAPAAFKYFDTTIDRKRYTSTKEVLDATLIHQSITGLYETRIDLSQLGGDGGGSSGGGPAPGGTLNIEDEYRLHETSKGPDVPLGSTWLSDFPQAWAETGGMGLAVRQAPLIIPLKATSTPVSIKQYPMSQEARLGIKPHIQRLLDQGILVPCQSPWNTPLLPVKKPGTNDYRPVQDLREVNKRVEDIHPTVPNPYNLLSGLPPSHQWYTVLDLKDAFFCLRLHPTSQSLFAFEWRDPEMGISGQLTWTRLPQGFKNSPTLFNEALHRDLADFRIQHPDLILLQYVDDLLLAATSELDCQQGTRALLQTLGDLGYRASAKKAQICQKQVKYLGYLLKEGQRWLTEARKETVMGQPTPKTPRQLREFLGKAGFCRLFIPGFAEMAAPLYPLTKPGTLFEWGPDQQKAYQEIKQALLTAPALGLPDLTKPFELFVDEKQGYAKGVLTQKLGPWRRPVAYLSKKLDPVAAGWPPCLRMVAAIAVLTKDAGKLTMGQPLVILAPHAVEALVKQPPDRWLSNARMTHYQALLLDTDRVQFGPIVALNPATLLPLPEEGLQHDCLDILAEAHGTRPDLTDQPLPDADHTWYTDGSSFLQEGQRKAGAAVTTETEVVWAKALPAGTSAQRAELIALTQALKMAEGKKLNVYTDSRYAFATAHIHGEIYRRRGWLTSEGKEIKNKDEILALLKALFLPKRLSIIHCPGHQKGNRAEARGNRMADQAAREVATRETPETSTLLAGKRTADGSEFEKRTADGSEFESPKKKAKVE

SEQ ID NO: 2555 - protein, 2100 aa, synthetic construct
MPAAKRVKLDGGDKKYSIGLDIGTNSVGWAVITDEYKVPSKKFKVLGNTDRHSIKKNLIGALLFDSGETAEATRLKRTARRRYTRRKNRICYLQEIFSNEMAKVDDSFFHRLEESFLVEEDKKHERHPIFGNIVDEVAYHEKYPTIYHLRKKLVDSTDKADLRLIYLALAHMIKFRGHFLIEGDLNPDNSDVDKLFIQLVQTYNQLFEENPINASGVDAKAILSARLSKSRRLENLIAQLPGEKKNGLFGNLIALSLGLTPNFKSNFDLAEDAKLQLSKDTYDDDLDNLLAQIGDQYADLFLAAKNLSDAILLSDILRVNTEITKAPLSASMIKRYDEHHQDLTLLKALVRQQLPEKYKEIFFDQSKNGYAGYIDGGASQEEFYKFIKPILEKMDGTEELLVKLNREDLLRKQRTFDNGSIPHQIHLGELHAILRRQEDFYPFLKDNREKIEKILTFRIPYYVGPLARGNSRFAWMTRKSEETITPWNFEEVVDKGASAQSFIERMTNFDKNLPNEKVLPKHSLLYEYFTVYNELTKVKYVTEGMRKPAFLSGEQKKAIVDLLFKTNRKVTVKQLKEDYFKKIECFDSVEISGVEDRFNASLGTYHDLLKIIKDKDFLDNEENEDILEDIVLTLTLFEDREMIEERLKTYAHLFDDKVMKQLKRRRYTGWGRLSRKLINGIRDKQSGKTILDFLKSDGFANRNFMQLIHDDSLTFKEDIQKAQVSGQGDSLHEHIANLAGSPAIKKGILQTVKVVDELVKVMGRHKPENIVIEMARENQTTQKGQKNSRERMKRIEEGIKELGSQILKEHPVENTQLQNEKLYLYYLQNGRDMYVDQELDINRLSDYDVDHIVPQSFLKDDSIDNKVLTRSDKARGKSDNVPSEEVVKKMKNYWRQLLNAKLITQRKFDNLTKAERGGLSELDKAGFIKRQLVETRQITKHVAQILDSRMNTKYDENDKLIREVKVITLKSKLVSDFRKDFQFYKVREINNYHHAHDAYLNAVVGTALIKKYPKLESEFVYGDYKVYDVRKMIAKSEQEIGKATAKYFFYSNIMNFFKTEITLANGEIRKRPLIETNGETGEIVWDKGRDFATVRKVLSMPQVNIVKKTEVQTGGFSKESILPKRNSDKLIARKKDWDPKKYGGFDSPTVAYSVLVVAKVEKGKSKKLKSVKELLGITIMERSSFEKNPIDFLEAKGYKEVKKDLIIKLPKYSLFELENGRKRMLASAGELQKGNELALPSKYVNFLYLASHYEKLKGSPEDNEQKQLFVEQHKHYLDEIIEQISEFSKRVILADANLDKVLSAYNKHRDKPIREQAENIIHLFTLTNLGAPAAFKYFDTTIDRKRYTSTKEVLDATLIHQSITGLYETRIDLSQLGGDGGGGSGGSGGSGGSGGSGGTLNIEDEYRLHETSKGPDVPLGSTWLSDFPQAWAETGGMGLAVRQAPLIIPLKATSTPVSIKQYPMSQEARLGIKPHIQRLLDQGILVPCQSPWNTPLLPVKKPGTNDYRPVQDLREVNKRVEDIHPTVPNPYNLLSGLPPSHQWYTVLDLKDAFFCLRLHPTSQSLFAFEWRDPEMGISGQLTWTRLPQGFKNSPTLFNEALHRDLADFRIQHPDLILLQYVDDLLLAATSELDCQQGTRALLQTLGDLGYRASAKKAQICQKQVKYLGYLLKEGQRWLTEARKETVMGQPTPKTPRQLREFLGKAGFCRLFIPGFAEMAAPLYPLTKPGTLFEWGPDQQKAYQEIKQALLTAPALGLPDLTKPFELFVDEKQGYAKGVLTQKLGPWRRPVAYLSKKLDPVAAGWPPCLRMVAAIAVLTKDAGKLTMGQPLVILAPHAVEALVKQPPDRWLSNARMTHYQALLLDTDRVQFGPIVALNPATLLPLPEEGLQHDCLDILAEAHGTRPDLTDQPLPDADHTWYTDGSSFLQEGQRKAGAAVTTETEVVWAKALPAGTSAQRAELIALTQALKMAEGKKLNVYTDSRYAFATAHIHGEIYRRRGWLTSEGKEIKNKDEILALLKALFLPKRLSIIHCPGHQKGNRAEARGNRMADQAAREVATRETPETSTLLAGKRTADGSEFEKRTADGSEFESPKKKAKVE

SEQ ID NO: 2556 - protein, 2096 aa, synthetic construct
MPAAKRVKLDGGDKKYSIGLDIGTNSVGWAVITDEYKVPSKKFKVLGNTDRHSIKKNLIGALLFDSGETAEATRLKRTARRRYTRRKNRICYLQEIFSNEMAKVDDSFFHRLEESFLVEEDKKHERHPIFGNIVDEVAYHEKYPTIYHLRKKLVDSTDKADLRLIYLALAHMIKFRGHFLIEGDLNPDNSDVDKLFIQLVQTYNQLFEENPINASGVDAKAILSARLSKSRRLENLIAQLPGEKKNGLFGNLIALSLGLTPNFKSNFDLAEDAKLQLSKDTYDDDLDNLLAQIGDQYADLFLAAKNLSDAILLSDILRVNTEITKAPLSASMIKRYDEHHQDLTLLKALVRQQLPEKYKEIFFDQSKNGYAGYIDGGASQEEFYKFIKPILEKMDGTEELLVKLNREDLLRKQRTFDNGSIPHQIHLGELHAILRRQEDFYPFLKDNREKIEKILTFRIPYYVGPLARGNSRFAWMTRKSEETITPWNFEEVVDKGASAQSFIERMTNFDKNLPNEKVLPKHSLLYEYFTVYNELTKVKYVTEGMRKPAFLSGEQKKAIVDLLFKTNRKVTVKQLKEDYFKKIECFDSVEISGVEDRFNASLGTYHDLLKIIKDKDFLDNEENEDILEDIVLTLTLFEDREMIEERLKTYAHLFDDKVMKQLKRRRYTGWGRLSRKLINGIRDKQSGKTILDFLKSDGFANRNFMQLIHDDSLTFKEDIQKAQVSGQGDSLHEHIANLAGSPAIKKGILQTVKVVDELVKVMGRHKPENIVIEMARENQTTQKGQKNSRERMKRIEEGIKELGSQILKEHPVENTQLQNEKLYLYYLQNGRDMYVDQELDINRLSDYDVDHIVPQSFLKDDSIDNKVLTRSDKARGKSDNVPSEEVVKKMKNYWRQLLNAKLITQRKFDNLTKAERGGLSELDKAGFIKRQLVETRQITKHVAQILDSRMNTKYDENDKLIREVKVITLKSKLVSDFRKDFQFYKVREINNYHHAHDAYLNAVVGTALIKKYPKLESEFVYGDYKVYDVRKMIAKSEQEIGKATAKYFFYSNIMNFFKTEITLANGEIRKRPLIETNGETGEIVWDKGRDFATVRKVLSMPQVNIVKKTEVQTGGFSKESILPKRNSDKLIARKKDWDPKKYGGFDSPTVAYSVLVVAKVEKGKSKKLKSVKELLGITIMERSSFEKNPIDFLEAKGYKEVKKDLIIKLPKYSLFELENGRKRMLASAGELQKGNELALPSKYVNFLYLASHYEKLKGSPEDNEQKQLFVEQHKHYLDEIIEQISEFSKRVILADANLDKVLSAYNKHRDKPIREQAENIIHLFTLTNLGAPAAFKYFDTTIDRKRYTSTKEVLDATLIHQSITGLYETRIDLSQLGGDGGEAAAKGGGPAPGGTLNIEDEYRLHETSKGPDVPLGSTWLSDFPQAWAETGGMGLAVRQAPLIIPLKATSTPVSIKQYPMSQEARLGIKPHIQRLLDQGILVPCQSPWNTPLLPVKKPGTNDYRPVQDLREVNKRVEDIHPTVPNPYNLLSGLPPSHQWYTVLDLKDAFFCLRLHPTSQSLFAFEWRDPEMGISGQLTWTRLPQGFKNSPTLFNEALHRDLADFRIQHPDLILLQYVDDLLLAATSELDCQQGTRALLQTLGDLGYRASAKKAQICQKQVKYLGYLLKEGQRWLTEARKETVMGQPTPKTPRQLREFLGKAGFCRLFIPGFAEMAAPLYPLTKPGTLFEWGPDQQKAYQEIKQALLTAPALGLPDLTKPFELFVDEKQGYAKGVLTQKLGPWRRPVAYLSKKLDPVAAGWPPCLRMVAAIAVLTKDAGKLTMGQPLVILAPHAVEALVKQPPDRWLSNARMTHYQALLLDTDRVQFGPIVALNPATLLPLPEEGLQHDCLDILAEAHGTRPDLTDQPLPDADHTWYTDGSSFLQEGQRKAGAAVTTETEVVWAKALPAGTSAQRAELIALTQALKMAEGKKLNVYTDSRYAFATAHIHGEIYRRRGWLTSEGKEIKNKDEILALLKALFLPKRLSIIHCPGHQKGNRAEARGNRMADQAAREVATRETPETSTLLAGKRTADGSEFEKRTADGSEFESPKKKAKVE

SEQ ID NO: 2557 - protein, 2094 aa, synthetic construct
MPAAKRVKLDGGDKKYSIGLDIGTNSVGWAVITDEYKVPSKKFKVLGNTDRHSIKKNLIGALLFDSGETAEATRLKRTARRRYTRRKNRICYLQEIFSNEMAKVDDSFFHRLEESFLVEEDKKHERHPIFGNIVDEVAYHEKYPTIYHLRKKLVDSTDKADLRLIYLALAHMIKFRGHFLIEGDLNPDNSDVDKLFIQLVQTYNQLFEENPINASGVDAKAILSARLSKSRRLENLIAQLPGEKKNGLFGNLIALSLGLTPNFKSNFDLAEDAKLQLSKDTYDDDLDNLLAQIGDQYADLFLAAKNLSDAILLSDILRVNTEITKAPLSASMIKRYDEHHQDLTLLKALVRQQLPEKYKEIFFDQSKNGYAGYIDGGASQEEFYKFIKPILEKMDGTEELLVKLNREDLLRKQRTFDNGSIPHQIHLGELHAILRRQEDFYPFLKDNREKIEKILTFRIPYYVGPLARGNSRFAWMTRKSEETITPWNFEEVVDKGASAQSFIERMTNFDKNLPNEKVLPKHSLLYEYFTVYNELTKVKYVTEGMRKPAFLSGEQKKAIVDLLFKTNRKVTVKQLKEDYFKKIECFDSVEISGVEDRFNASLGTYHDLLKIIKDKDFLDNEENEDILEDIVLTLTLFEDREMIEERLKTYAHLFDDKVMKQLKRRRYTGWGRLSRKLINGIRDKQSGKTILDFLKSDGFANRNFMQLIHDDSLTFKEDIQKAQVSGQGDSLHEHIANLAGSPAIKKGILQTVKVVDELVKVMGRHKPENIVIEMARENQTTQKGQKNSRERMKRIEEGIKELGSQILKEHPVENTQLQNEKLYLYYLQNGRDMYVDQELDINRLSDYDVDHIVPQSFLKDDSIDNKVLTRSDKARGKSDNVPSEEVVKKMKNYWRQLLNAKLITQRKFDNLTKAERGGLSELDKAGFIKRQLVETRQITKHVAQILDSRMNTKYDENDKLIREVKVITLKSKLVSDFRKDFQFYKVREINNYHHAHDAYLNAVVGTALIKKYPKLESEFVYGDYKVYDVRKMIAKSEQEIGKATAKYFFYSNIMNFFKTEITLANGEIRKRPLIETNGETGEIVWDKGRDFATVRKVLSMPQVNIVKKTEVQTGGFSKESILPKRNSDKLIARKKDWDPKKYGGFDSPTVAYSVLVVAKVEKGKSKKLKSVKELLGITIMERSSFEKNPIDFLEAKGYKEVKKDLIIKLPKYSLFELENGRKRMLASAGELQKGNELALPSKYVNFLYLASHYEKLKGSPEDNEQKQLFVEQHKHYLDEIIEQISEFSKRVILADANLDKVLSAYNKHRDKPIREQAENIIHLFTLTNLGAPAAFKYFDTTIDRKRYTSTKEVLDATLIHQSITGLYETRIDLSQLGGDGGGSSGSSGSSGGTLNIEDEYRLHETSKGPDVPLGSTWLSDFPQAWAETGGMGLAVRQAPLIIPLKATSTPVSIKQYPMSQEARLGIKPHIQRLLDQGILVPCQSPWNTPLLPVKKPGTNDYRPVQDLREVNKRVEDIHPTVPNPYNLLSGLPPSHQWYTVLDLKDAFFCLRLHPTSQSLFAFEWRDPEMGISGQLTWTRLPQGFKNSPTLFNEALHRDLADFRIQHPDLILLQYVDDLLLAATSELDCQQGTRALLQTLGDLGYRASAKKAQICQKQVKYLGYLLKEGQRWLTEARKETVMGQPTPKTPRQLREFLGKAGFCRLFIPGFAEMAAPLYPLTKPGTLFEWGPDQQKAYQEIKQALLTAPALGLPDLTKPFELFVDEKQGYAKGVLTQKLGPWRRPVAYLSKKLDPVAAGWPPCLRMVAAIAVLTKDAGKLTMGQPLVILAPHAVEALVKQPPDRWLSNARMTHYQALLLDTDRVQFGPIVALNPATLLPLPEEGLQHDCLDILAEAHGTRPDLTDQPLPDADHTWYTDGSSFLQEGQRKAGAAVTTETEVVWAKALPAGTSAQRAELIALTQALKMAEGKKLNVYTDSRYAFATAHIHGEIYRRRGWLTSEGKEIKNKDEILALLKALFLPKRLSIIHCPGHQKGNRAEARGNRMADQAAREVATRETPETSTLLAGKRTADGSEFEKRTADGSEFESPKKKAKVE

SEQ ID NO: 2558 - protein, 2094 aa, synthetic construct
MPAAKRVKLDGGDKKYSIGLDIGTNSVGWAVITDEYKVPSKKFKVLGNTDRHSIKKNLIGALLFDSGETAEATRLKRTARRRYTRRKNRICYLQEIFSNEMAKVDDSFFHRLEESFLVEEDKKHERHPIFGNIVDEVAYHEKYPTIYHLRKKLVDSTDKADLRLIYLALAHMIKFRGHFLIEGDLNPDNSDVDKLFIQLVQTYNQLFEENPINASGVDAKAILSARLSKSRRLENLIAQLPGEKKNGLFGNLIALSLGLTPNFKSNFDLAEDAKLQLSKDTYDDDLDNLLAQIGDQYADLFLAAKNLSDAILLSDILRVNTEITKAPLSASMIKRYDEHHQDLTLLKALVRQQLPEKYKEIFFDQSKNGYAGYIDGGASQEEFYKFIKPILEKMDGTEELLVKLNREDLLRKQRTFDNGSIPHQIHLGELHAILRRQEDFYPFLKDNREKIEKILTFRIPYYVGPLARGNSRFAWMTRKSEETITPWNFEEVVDKGASAQSFIERMTNFDKNLPNEKVLPKHSLLYEYFTVYNELTKVKYVTEGMRKPAFLSGEQKKAIVDLLFKTNRKVTVKQLKEDYFKKIECFDSVEISGVEDRFNASLGTYHDLLKIIKDKDFLDNEENEDILEDIVLTLTLFEDREMIEERLKTYAHLFDDKVMKQLKRRRYTGWGRLSRKLINGIRDKQSGKTILDFLKSDGFANRNFMQLIHDDSLTFKEDIQKAQVSGQGDSLHEHIANLAGSPAIKKGILQTVKVVDELVKVMGRHKPENIVIEMARENQTTQKGQKNSRERMKRIEEGIKELGSQILKEHPVENTQLQNEKLYLYYLQNGRDMYVDQELDINRLSDYDVDHIVPQSFLKDDSIDNKVLTRSDKARGKSDNVPSEEVVKKMKNYWRQLLNAKLITQRKFDNLTKAERGGLSELDKAGFIKRQLVETRQITKHVAQILDSRMNTKYDENDKLIREVKVITLKSKLVSDFRKDFQFYKVREINNYHHAHDAYLNAVVGTALIKKYPKLESEFVYGDYKVYDVRKMIAKSEQEIGKATAKYFFYSNIMNFFKTEITLANGEIRKRPLIETNGETGEIVWDKGRDFATVRKVLSMPQVNIVKKTEVQTGGFSKESILPKRNSDKLIARKKDWDPKKYGGFDSPTVAYSVLVVAKVEKGKSKKLKSVKELLGITIMERSSFEKNPIDFLEAKGYKEVKKDLIIKLPKYSLFELENGRKRMLASAGELQKGNELALPSKYVNFLYLASHYEKLKGSPEDNEQKQLFVEQHKHYLDEIIEQISEFSKRVILADANLDKVLSAYNKHRDKPIREQAENIIHLFTLTNLGAPAAFKYFDTTIDRKRYTSTKEVLDATLIHQSITGLYETRIDLSQLGGDGGGGSGSSPAPGGTLNIEDEYRLHETSKGPDVPLGSTWLSDFPQAWAETGGMGLAVRQAPLIIPLKATSTPVSIKQYPMSQEARLGIKPHIQRLLDQGILVPCQSPWNTPLLPVKKPGTNDYRPVQDLREVNKRVEDIHPTVPNPYNLLSGLPPSHQWYTVLDLKDAFFCLRLHPTSQSLFAFEWRDPEMGISGQLTWTRLPQGFKNSPTLFNEALHRDLADFRIQHPDLILLQYVDDLLLAATSELDCQQGTRALLQTLGDLGYRASAKKAQICQKQVKYLGYLLKEGQRWLTEARKETVMGQPTPKTPRQLREFLGKAGFCRLFIPGFAEMAAPLYPLTKPGTLFEWGPDQQKAYQEIKQALLTAPALGLPDLTKPFELFVDEKQGYAKGVLTQKLGPWRRPVAYLSKKLDPVAAGWPPCLRMVAAIAVLTKDAGKLTMGQPLVILAPHAVEALVKQPPDRWLSNARMTHYQALLLDTDRVQFGPIVALNPATLLPLPEEGLQHDCLDILAEAHGTRPDLTDQPLPDADHTWYTDGSSFLQEGQRKAGAAVTTETEVVWAKALPAGTSAQRAELIALTQALKMAEGKKLNVYTDSRYAFATAHIHGEIYRRRGWLTSEGKEIKNKDEILALLKALFLPKRLSIIHCPGHQKGNRAEARGNRMADQAAREVATRETPETSTLLAGKRTADGSEFEKRTADGSEFESPKKKAKVE

SEQ ID NO: 2559 - protein, 2091 aa, synthetic construct
MPAAKRVKLDGGDKKYSIGLDIGTNSVGWAVITDEYKVPSKKFKVLGNTDRHSIKKNLIGALLFDSGETAEATRLKRTARRRYTRRKNRICYLQEIFSNEMAKVDDSFFHRLEESFLVEEDKKHERHPIFGNIVDEVAYHEKYPTIYHLRKKLVDSTDKADLRLIYLALAHMIKFRGHFLIEGDLNPDNSDVDKLFIQLVQTYNQLFEENPINASGVDAKAILSARLSKSRRLENLIAQLPGEKKNGLFGNLIALSLGLTPNFKSNFDLAEDAKLQLSKDTYDDDLDNLLAQIGDQYADLFLAAKNLSDAILLSDILRVNTEITKAPLSASMIKRYDEHHQDLTLLKALVRQQLPEKYKEIFFDQSKNGYAGYIDGGASQEEFYKFIKPILEKMDGTEELLVKLNREDLLRKQRTFDNGSIPHQIHLGELHAILRRQEDFYPFLKDNREKIEKILTFRIPYYVGPLARGNSRFAWMTRKSEETITPWNFEEVVDKGASAQSFIERMTNFDKNLPNEKVLPKHSLLYEYFTVYNELTKVKYVTEGMRKPAFLSGEQKKAIVDLLFKTNRKVTVKQLKEDYFKKIECFDSVEISGVEDRFNASLGTYHDLLKIIKDKDFLDNEENEDILEDIVLTLTLFEDREMIEERLKTYAHLFDDKVMKQLKRRRYTGWGRLSRKLINGIRDKQSGKTILDFLKSDGFANRNFMQLIHDDSLTFKEDIQKAQVSGQGDSLHEHIANLAGSPAIKKGILQTVKVVDELVKVMGRHKPENIVIEMARENQTTQKGQKNSRERMKRIEEGIKELGSQILKEHPVENTQLQNEKLYLYYLQNGRDMYVDQELDINRLSDYDVDHIVPQSFLKDDSIDNKVLTRSDKARGKSDNVPSEEVVKKMKNYWRQLLNAKLITQRKFDNLTKAERGGLSELDKAGFIKRQLVETRQITKHVAQILDSRMNTKYDENDKLIREVKVITLKSKLVSDFRKDFQFYKVREINNYHHAHDAYLNAVVGTALIKKYPKLESEFVYGDYKVYDVRKMIAKSEQEIGKATAKYFFYSNIMNFFKTEITLANGEIRKRPLIETNGETGEIVWDKGRDFATVRKVLSMPQVNIVKKTEVQTGGFSKESILPKRNSDKLIARKKDWDPKKYGGFDSPTVAYSVLVVAKVEKGKSKKLKSVKELLGITIMERSSFEKNPIDFLEAKGYKEVKKDLIIKLPKYSLFELENGRKRMLASAGELQKGNELALPSKYVNFLYLASHYEKLKGSPEDNEQKQLFVEQHKHYLDEIIEQISEFSKRVILADANLDKVLSAYNKHRDKPIREQAENIIHLFTLTNLGAPAAFKYFDTTIDRKRYTSTKEVLDATLIHQSITGLYETRIDLSQLGGDGGGGSGGGGGTLNIEDEYRLHETSKGPDVPLGSTWLSDFPQAWAETGGMGLAVRQAPLIIPLKATSTPVSIKQYPMSQEARLGIKPHIQRLLDQGILVPCQSPWNTPLLPVKKPGTNDYRPVQDLREVNKRVEDIHPTVPNPYNLLSGLPPSHQWYTVLDLKDAFFCLRLHPTSQSLFAFEWRDPEMGISGQLTWTRLPQGFKNSPTLFNEALHRDLADFRIQHPDLILLQYVDDLLLAATSELDCQQGTRALLQTLGDLGYRASAKKAQICQKQVKYLGYLLKEGQRWLTEARKETVMGQPTPKTPRQLREFLGKAGFCRLFIPGFAEMAAPLYPLTKPGTLFEWGPDQQKAYQEIKQALLTAPALGLPDLTKPFELFVDEKQGYAKGVLTQKLGPWRRPVAYLSKKLDPVAAGWPPCLRMVAAIAVLTKDAGKLTMGQPLVILAPHAVEALVKQPPDRWLSNARMTHYQALLLDTDRVQFGPIVALNPATLLPLPEEGLQHDCLDILAEAHGTRPDLTDQPLPDADHTWYTDGSSFLQEGQRKAGAAVTTETEVVWAKALPAGTSAQRAELIALTQALKMAEGKKLNVYTDSRYAFATAHIHGEIYRRRGWLTSEGKEIKNKDEILALLKALFLPKRLSIIHCPGHQKGNRAEARGNRMADQAAREVATRETPETSTLLAGKRTADGSEFEKRTADGSEFESPKKKAKVE

SEQ ID NO: 2560 - protein, 2092 aa, synthetic construct
MPAAKRVKLDGGDKKYSIGLDIGTNSVGWAVITDEYKVPSKKFKVLGNTDRHSIKKNLIGALLFDSGETAEATRLKRTARRRYTRRKNRICYLQEIFSNEMAKVDDSFFHRLEESFLVEEDKKHERHPIFGNIVDEVAYHEKYPTIYHLRKKLVDSTDKADLRLIYLALAHMIKFRGHFLIEGDLNPDNSDVDKLFIQLVQTYNQLFEENPINASGVDAKAILSARLSKSRRLENLIAQLPGEKKNGLFGNLIALSLGLTPNFKSNFDLAEDAKLQLSKDTYDDDLDNLLAQIGDQYADLFLAAKNLSDAILLSDILRVNTEITKAPLSASMIKRYDEHHQDLTLLKALVRQQLPEKYKEIFFDQSKNGYAGYIDGGASQEEFYKFIKPILEKMDGTEELLVKLNREDLLRKQRTFDNGSIPHQIHLGELHAILRRQEDFYPFLKDNREKIEKILTFRIPYYVGPLARGNSRFAWMTRKSEETITPWNFEEVVDKGASAQSFIERMTNFDKNLPNEKVLPKHSLLYEYFTVYNELTKVKYVTEGMRKPAFLSGEQKKAIVDLLFKTNRKVTVKQLKEDYFKKIECFDSVEISGVEDRFNASLGTYHDLLKIIKDKDFLDNEENEDILEDIVLTLTLFEDREMIEERLKTYAHLFDDKVMKQLKRRRYTGWGRLSRKLINGIRDKQSGKTILDFLKSDGFANRNFMQLIHDDSLTFKEDIQKAQVSGQGDSLHEHIANLAGSPAIKKGILQTVKVVDELVKVMGRHKPENIVIEMARENQTTQKGQKNSRERMKRIEEGIKELGSQILKEHPVENTQLQNEKLYLYYLQNGRDMYVDQELDINRLSDYDVDHIVPQSFLKDDSIDNKVLTRSDKARGKSDNVPSEEVVKKMKNYWRQLLNAKLITQRKFDNLTKAERGGLSELDKAGFIKRQLVETRQITKHVAQILDSRMNTKYDENDKLIREVKVITLKSKLVSDFRKDFQFYKVREINNYHHAHDAYLNAVVGTALIKKYPKLESEFVYGDYKVYDVRKMIAKSEQEIGKATAKYFFYSNIMNFFKTEITLANGEIRKRPLIETNGETGEIVWDKGRDFATVRKVLSMPQVNIVKKTEVQTGGFSKESILPKRNSDKLIARKKDWDPKKYGGFDSPTVAYSVLVVAKVEKGKSKKLKSVKELLGITIMERSSFEKNPIDFLEAKGYKEVKKDLIIKLPKYSLFELENGRKRMLASAGELQKGNELALPSKYVNFLYLASHYEKLKGSPEDNEQKQLFVEQHKHYLDEIIEQISEFSKRVILADANLDKVLSAYNKHRDKPIREQAENIIHLFTLTNLGAPAAFKYFDTTIDRKRYTSTKEVLDATLIHQSITGLYETRIDLSQLGGDGGGGGGGGGGGTLNIEDEYRLHETSKGPDVPLGSTWLSDFPQAWAETGGMGLAVRQAPLIIPLKATSTPVSIKQYPMSQEARLGIKPHIQRLLDQGILVPCQSPWNTPLLPVKKPGTNDYRPVQDLREVNKRVEDIHPTVPNPYNLLSGLPPSHQWYTVLDLKDAFFCLRLHPTSQSLFAFEWRDPEMGISGQLTWTRLPQGFKNSPTLFNEALHRDLADFRIQHPDLILLQYVDDLLLAATSELDCQQGTRALLQTLGDLGYRASAKKAQICQKQVKYLGYLLKEGQRWLTEARKETVMGQPTPKTPRQLREFLGKAGFCRLFIPGFAEMAAPLYPLTKPGTLFEWGPDQQKAYQEIKQALLTAPALGLPDLTKPFELFVDEKQGYAKGVLTQKLGPWRRPVAYLSKKLDPVAAGWPPCLRMVAAIAVLTKDAGKLTMGQPLVILAPHAVEALVKQPPDRWLSNARMTHYQALLLDTDRVQFGPIVALNPATLLPLPEEGLQHDCLDILAEAHGTRPDLTDQPLPDADHTWYTDGSSFLQEGQRKAGAAVTTETEVVWAKALPAGTSAQRAELIALTQALKMAEGKKLNVYTDSRYAFATAHIHGEIYRRRGWLTSEGKEIKNKDEILALLKALFLPKRLSIIHCPGHQKGNRAEARGNRMADQAAREVATRETPETSTLLAGKRTADGSEFEKRTADGSEFESPKKKAKVE

SEQ ID NO: 2561 - protein, 2100 aa, synthetic construct
MPAAKRVKLDGGDKKYSIGLDIGTNSVGWAVITDEYKVPSKKFKVLGNTDRHSIKKNLIGALLFDSGETAEATRLKRTARRRYTRRKNRICYLQEIFSNEMAKVDDSFFHRLEESFLVEEDKKHERHPIFGNIVDEVAYHEKYPTIYHLRKKLVDSTDKADLRLIYLALAHMIKFRGHFLIEGDLNPDNSDVDKLFIQLVQTYNQLFEENPINASGVDAKAILSARLSKSRRLENLIAQLPGEKKNGLFGNLIALSLGLTPNFKSNFDLAEDAKLQLSKDTYDDDLDNLLAQIGDQYADLFLAAKNLSDAILLSDILRVNTEITKAPLSASMIKRYDEHHQDLTLLKALVRQQLPEKYKEIFFDQSKNGYAGYIDGGASQEEFYKFIKPILEKMDGTEELLVKLNREDLLRKQRTFDNGSIPHQIHLGELHAILRRQEDFYPFLKDNREKIEKILTFRIPYYVGPLARGNSRFAWMTRKSEETITPWNFEEVVDKGASAQSFIERMTNFDKNLPNEKVLPKHSLLYEYFTVYNELTKVKYVTEGMRKPAFLSGEQKKAIVDLLFKTNRKVTVKQLKEDYFKKIECFDSVEISGVEDRFNASLGTYHDLLKIIKDKDFLDNEENEDILEDIVLTLTLFEDREMIEERLKTYAHLFDDKVMKQLKRRRYTGWGRLSRKLINGIRDKQSGKTILDFLKSDGFANRNFMQLIHDDSLTFKEDIQKAQVSGQGDSLHEHIANLAGSPAIKKGILQTVKVVDELVKVMGRHKPENIVIEMARENQTTQKGQKNSRERMKRIEEGIKELGSQILKEHPVENTQLQNEKLYLYYLQNGRDMYVDQELDINRLSDYDVDHIVPQSFLKDDSIDNKVLTRSDKARGKSDNVPSEEVVKKMKNYWRQLLNAKLITQRKFDNLTKAERGGLSELDKAGFIKRQLVETRQITKHVAQILDSRMNTKYDENDKLIREVKVITLKSKLVSDFRKDFQFYKVREINNYHHAHDAYLNAVVGTALIKKYPKLESEFVYGDYKVYDVRKMIAKSEQEIGKATAKYFFYSNIMNFFKTEITLANGEIRKRPLIETNGETGEIVWDKGRDFATVRKVLSMPQVNIVKKTEVQTGGFSKESILPKRNSDKLIARKKDWDPKKYGGFDSPTVAYSVLVVAKVEKGKSKKLKSVKELLGITIMERSSFEKNPIDFLEAKGYKEVKKDLIIKLPKYSLFELENGRKRMLASAGELQKGNELALPSKYVNFLYLASHYEKLKGSPEDNEQKQLFVEQHKHYLDEIIEQISEFSKRVILADANLDKVLSAYNKHRDKPIREQAENIIHLFTLTNLGAPAAFKYFDTTIDRKRYTSTKEVLDATLIHQSITGLYETRIDLSQLGGDGGEAAAKGGGGSEAAAKGGTLNIEDEYRLHETSKGPDVPLGSTWLSDFPQAWAETGGMGLAVRQAPLIIPLKATSTPVSIKQYPMSQEARLGIKPHIQRLLDQGILVPCQSPWNTPLLPVKKPGTNDYRPVQDLREVNKRVEDIHPTVPNPYNLLSGLPPSHQWYTVLDLKDAFFCLRLHPTSQSLFAFEWRDPEMGISGQLTWTRLPQGFKNSPTLFNEALHRDLADFRIQHPDLILLQYVDDLLLAATSELDCQQGTRALLQTLGDLGYRASAKKAQICQKQVKYLGYLLKEGQRWLTEARKETVMGQPTPKTPRQLREFLGKAGFCRLFIPGFAEMAAPLYPLTKPGTLFEWGPDQQKAYQEIKQALLTAPALGLPDLTKPFELFVDEKQGYAKGVLTQKLGPWRRPVAYLSKKLDPVAAGWPPCLRMVAAIAVLTKDAGKLTMGQPLVILAPHAVEALVKQPPDRWLSNARMTHYQALLLDTDRVQFGPIVALNPATLLPLPEEGLQHDCLDILAEAHGTRPDLTDQPLPDADHTWYTDGSSFLQEGQRKAGAAVTTETEVVWAKALPAGTSAQRAELIALTQALKMAEGKKLNVYTDSRYAFATAHIHGEIYRRRGWLTSEGKEIKNKDEILALLKALFLPKRLSIIHCPGHQKGNRAEARGNRMADQAAREVATRETPETSTLLAGKRTADGSEFEKRTADGSEFESPKKKAKVE

SEQ ID NO: 2562 - protein, 2091 aa, synthetic construct
MPAAKRVKLDGGDKKYSIGLDIGTNSVGWAVITDEYKVPSKKFKVLGNTDRHSIKKNLIGALLFDSGETAEATRLKRTARRRYTRRKNRICYLQEIFSNEMAKVDDSFFHRLEESFLVEEDKKHERHPIFGNIVDEVAYHEKYPTIYHLRKKLVDSTDKADLRLIYLALAHMIKFRGHFLIEGDLNPDNSDVDKLFIQLVQTYNQLFEENPINASGVDAKAILSARLSKSRRLENLIAQLPGEKKNGLFGNLIALSLGLTPNFKSNFDLAEDAKLQLSKDTYDDDLDNLLAQIGDQYADLFLAAKNLSDAILLSDILRVNTEITKAPLSASMIKRYDEHHQDLTLLKALVRQQLPEKYKEIFFDQSKNGYAGYIDGGASQEEFYKFIKPILEKMDGTEELLVKLNREDLLRKQRTFDNGSIPHQIHLGELHAILRRQEDFYPFLKDNREKIEKILTFRIPYYVGPLARGNSRFAWMTRKSEETITPWNFEEVVDKGASAQSFIERMTNFDKNLPNEKVLPKHSLLYEYFTVYNELTKVKYVTEGMRKPAFLSGEQKKAIVDLLFKTNRKVTVKQLKEDYFKKIECFDSVEISGVEDRFNASLGTYHDLLKIIKDKDFLDNEENEDILEDIVLTLTLFEDREMIEERLKTYAHLFDDKVMKQLKRRRYTGWGRLSRKLINGIRDKQSGKTILDFLKSDGFANRNFMQLIHDDSLTFKEDIQKAQVSGQGDSLHEHIANLAGSPAIKKGILQTVKVVDELVKVMGRHKPENIVIEMARENQTTQKGQKNSRERMKRIEEGIKELGSQILKEHPVENTQLQNEKLYLYYLQNGRDMYVDQELDINRLSDYDVDHIVPQSFLKDDSIDNKVLTRSDKARGKSDNVPSEEVVKKMKNYWRQLLNAKLITQRKFDNLTKAERGGLSELDKAGFIKRQLVETRQITKHVAQILDSRMNTKYDENDKLIREVKVITLKSKLVSDFRKDFQFYKVREINNYHHAHDAYLNAVVGTALIKKYPKLESEFVYGDYKVYDVRKMIAKSEQEIGKATAKYFFYSNIMNFFKTEITLANGEIRKRPLIETNGETGEIVWDKGRDFATVRKVLSMPQVNIVKKTEVQTGGFSKESILPKRNSDKLIARKKDWDPKKYGGFDSPTVAYSVLVVAKVEKGKSKKLKSVKELLGITIMERSSFEKNPIDFLEAKGYKEVKKDLIIKLPKYSLFELENGRKRMLASAGELQKGNELALPSKYVNFLYLASHYEKLKGSPEDNEQKQLFVEQHKHYLDEIIEQISEFSKRVILADANLDKVLSAYNKHRDKPIREQAENIIHLFTLTNLGAPAAFKYFDTTIDRKRYTSTKEVLDATLIHQSITGLYETRIDLSQLGGDGGGGGGGGGGTLNIEDEYRLHETSKGPDVPLGSTWLSDFPQAWAETGGMGLAVRQAPLIIPLKATSTPVSIKQYPMSQEARLGIKPHIQRLLDQGILVPCQSPWNTPLLPVKKPGTNDYRPVQDLREVNKRVEDIHPTVPNPYNLLSGLPPSHQWYTVLDLKDAFFCLRLHPTSQSLFAFEWRDPEMGISGQLTWTRLPQGFKNSPTLFNEALHRDLADFRIQHPDLILLQYVDDLLLAATSELDCQQGTRALLQTLGDLGYRASAKKAQICQKQVKYLGYLLKEGQRWLTEARKETVMGQPTPKTPRQLREFLGKAGFCRLFIPGFAEMAAPLYPLTKPGTLFEWGPDQQKAYQEIKQALLTAPALGLPDLTKPFELFVDEKQGYAKGVLTQKLGPWRRPVAYLSKKLDPVAAGWPPCLRMVAAIAVLTKDAGKLTMGQPLVILAPHAVEALVKQPPDRWLSNARMTHYQALLLDTDRVQFGPIVALNPATLLPLPEEGLQHDCLDILAEAHGTRPDLTDQPLPDADHTWYTDGSSFLQEGQRKAGAAVTTETEVVWAKALPAGTSAQRAELIALTQALKMAEGKKLNVYTDSRYAFATAHIHGEIYRRRGWLTSEGKEIKNKDEILALLKALFLPKRLSIIHCPGHQKGNRAEARGNRMADQAAREVATRETPETSTLLAGKRTADGSEFEKRTADGSEFESPKKKAKVE

SEQ ID NO: 2563 - protein, 2094 aa, synthetic construct
MPAAKRVKLDGGDKKYSIGLDIGTNSVGWAVITDEYKVPSKKFKVLGNTDRHSIKKNLIGALLFDSGETAEATRLKRTARRRYTRRKNRICYLQEIFSNEMAKVDDSFFHRLEESFLVEEDKKHERHPIFGNIVDEVAYHEKYPTIYHLRKKLVDSTDKADLRLIYLALAHMIKFRGHFLIEGDLNPDNSDVDKLFIQLVQTYNQLFEENPINASGVDAKAILSARLSKSRRLENLIAQLPGEKKNGLFGNLIALSLGLTPNFKSNFDLAEDAKLQLSKDTYDDDLDNLLAQIGDQYADLFLAAKNLSDAILLSDILRVNTEITKAPLSASMIKRYDEHHQDLTLLKALVRQQLPEKYKEIFFDQSKNGYAGYIDGGASQEEFYKFIKPILEKMDGTEELLVKLNREDLLRKQRTFDNGSIPHQIHLGELHAILRRQEDFYPFLKDNREKIEKILTFRIPYYVGPLARGNSRFAWMTRKSEETITPWNFEEVVDKGASAQSFIERMTNFDKNLPNEKVLPKHSLLYEYFTVYNELTKVKYVTEGMRKPAFLSGEQKKAIVDLLFKTNRKVTVKQLKEDYFKKIECFDSVEISGVEDRFNASLGTYHDLLKIIKDKDFLDNEENEDILEDIVLTLTLFEDREMIEERLKTYAHLFDDKVMKQLKRRRYTGWGRLSRKLINGIRDKQSGKTILDFLKSDGFANRNFMQLIHDDSLTFKEDIQKAQVSGQGDSLHEHIANLAGSPAIKKGILQTVKVVDELVKVMGRHKPENIVIEMARENQTTQKGQKNSRERMKRIEEGIKELGSQILKEHPVENTQLQNEKLYLYYLQNGRDMYVDQELDINRLSDYDVDHIVPQSFLKDDSIDNKVLTRSDKARGKSDNVPSEEVVKKMKNYWRQLLNAKLITQRKFDNLTKAERGGLSELDKAGFIKRQLVETRQITKHVAQILDSRMNTKYDENDKLIREVKVITLKSKLVSDFRKDFQFYKVREINNYHHAHDAYLNAVVGTALIKKYPKLESEFVYGDYKVYDVRKMIAKSEQEIGKATAKYFFYSNIMNFFKTEITLANGEIRKRPLIETNGETGEIVWDKGRDFATVRKVLSMPQVNIVKKTEVQTGGFSKESILPKRNSDKLIARKKDWDPKKYGGFDSPTVAYSVLVVAKVEKGKSKKLKSVKELLGITIMERSSFEKNPIDFLEAKGYKEVKKDLIIKLPKYSLFELENGRKRMLASAGELQKGNELALPSKYVNFLYLASHYEKLKGSPEDNEQKQLFVEQHKHYLDEIIEQISEFSKRVILADANLDKVLSAYNKHRDKPIREQAENIIHLFTLTNLGAPAAFKYFDTTIDRKRYTSTKEVLDATLIHQSITGLYETRIDLSQLGGDGGGGSPAPGSSGGTLNIEDEYRLHETSKGPDVPLGSTWLSDFPQAWAETGGMGLAVRQAPLIIPLKATSTPVSIKQYPMSQEARLGIKPHIQRLLDQGILVPCQSPWNTPLLPVKKPGTNDYRPVQDLREVNKRVEDIHPTVPNPYNLLSGLPPSHQWYTVLDLKDAFFCLRLHPTSQSLFAFEWRDPEMGISGQLTWTRLPQGFKNSPTLFNEALHRDLADFRIQHPDLILLQYVDDLLLAATSELDCQQGTRALLQTLGDLGYRASAKKAQICQKQVKYLGYLLKEGQRWLTEARKETVMGQPTPKTPRQLREFLGKAGFCRLFIPGFAEMAAPLYPLTKPGTLFEWGPDQQKAYQEIKQALLTAPALGLPDLTKPFELFVDEKQGYAKGVLTQKLGPWRRPVAYLSKKLDPVAAGWPPCLRMVAAIAVLTKDAGKLTMGQPLVILAPHAVEALVKQPPDRWLSNARMTHYQALLLDTDRVQFGPIVALNPATLLPLPEEGLQHDCLDILAEAHGTRPDLTDQPLPDADHTWYTDGSSFLQEGQRKAGAAVTTETEVVWAKALPAGTSAQRAELIALTQALKMAEGKKLNVYTDSRYAFATAHIHGEIYRRRGWLTSEGKEIKNKDEILALLKALFLPKRLSIIHCPGHQKGNRAEARGNRMADQAAREVATRETPETSTLLAGKRTADGSEFEKRTADGSEFESPKKKAKVE

SEQ ID NO: 2564 - protein, 2096 aa, synthetic construct
MPAAKRVKLDGGDKKYSIGLDIGTNSVGWAVITDEYKVPSKKFKVLGNTDRHSIKKNLIGALLFDSGETAEATRLKRTARRRYTRRKNRICYLQEIFSNEMAKVDDSFFHRLEESFLVEEDKKHERHPIFGNIVDEVAYHEKYPTIYHLRKKLVDSTDKADLRLIYLALAHMIKFRGHFLIEGDLNPDNSDVDKLFIQLVQTYNQLFEENPINASGVDAKAILSARLSKSRRLENLIAQLPGEKKNGLFGNLIALSLGLTPNFKSNFDLAEDAKLQLSKDTYDDDLDNLLAQIGDQYADLFLAAKNLSDAILLSDILRVNTEITKAPLSASMIKRYDEHHQDLTLLKALVRQQLPEKYKEIFFDQSKNGYAGYIDGGASQEEFYKFIKPILEKMDGTEELLVKLNREDLLRKQRTFDNGSIPHQIHLGELHAILRRQEDFYPFLKDNREKIEKILTFRIPYYVGPLARGNSRFAWMTRKSEETITPWNFEEVVDKGASAQSFIERMTNFDKNLPNEKVLPKHSLLYEYFTVYNELTKVKYVTEGMRKPAFLSGEQKKAIVDLLFKTNRKVTVKQLKEDYFKKIECFDSVEISGVEDRFNASLGTYHDLLKIIKDKDFLDNEENEDILEDIVLTLTLFEDREMIEERLKTYAHLFDDKVMKQLKRRRYTGWGRLSRKLINGIRDKQSGKTILDFLKSDGFANRNFMQLIHDDSLTFKEDIQKAQVSGQGDSLHEHIANLAGSPAIKKGILQTVKVVDELVKVMGRHKPENIVIEMARENQTTQKGQKNSRERMKRIEEGIKELGSQILKEHPVENTQLQNEKLYLYYLQNGRDMYVDQELDINRLSDYDVDHIVPQSFLKDDSIDNKVLTRSDKARGKSDNVPSEEVVKKMKNYWRQLLNAKLITQRKFDNLTKAERGGLSELDKAGFIKRQLVETRQITKHVAQILDSRMNTKYDENDKLIREVKVITLKSKLVSDFRKDFQFYKVREINNYHHAHDAYLNAVVGTALIKKYPKLESEFVYGDYKVYDVRKMIAKSEQEIGKATAKYFFYSNIMNFFKTEITLANGEIRKRPLIETNGETGEIVWDKGRDFATVRKVLSMPQVNIVKKTEVQTGGFSKESILPKRNSDKLIARKKDWDPKKYGGFDSPTVAYSVLVVAKVEKGKSKKLKSVKELLGITIMERSSFEKNPIDFLEAKGYKEVKKDLIIKLPKYSLFELENGRKRMLASAGELQKGNELALPSKYVNFLYLASHYEKLKGSPEDNEQKQLFVEQHKHYLDEIIEQISEFSKRVILADANLDKVLSAYNKHRDKPIREQAENIIHLFTLTNLGAPAAFKYFDTTIDRKRYTSTKEVLDATLIHQSITGLYETRIDLSQLGGDGGPAPGGSEAAAKGGTLNIEDEYRLHETSKGPDVPLGSTWLSDFPQAWAETGGMGLAVRQAPLIIPLKATSTPVSIKQYPMSQEARLGIKPHIQRLLDQGILVPCQSPWNTPLLPVKKPGTNDYRPVQDLREVNKRVEDIHPTVPNPYNLLSGLPPSHQWYTVLDLKDAFFCLRLHPTSQSLFAFEWRDPEMGISGQLTWTRLPQGFKNSPTLFNEALHRDLADFRIQHPDLILLQYVDDLLLAATSELDCQQGTRALLQTLGDLGYRASAKKAQICQKQVKYLGYLLKEGQRWLTEARKETVMGQPTPKTPRQLREFLGKAGFCRLFIPGFAEMAAPLYPLTKPGTLFEWGPDQQKAYQEIKQALLTAPALGLPDLTKPFELFVDEKQGYAKGVLTQKLGPWRRPVAYLSKKLDPVAAGWPPCLRMVAAIAVLTKDAGKLTMGQPLVILAPHAVEALVKQPPDRWLSNARMTHYQALLLDTDRVQFGPIVALNPATLLPLPEEGLQHDCLDILAEAHGTRPDLTDQPLPDADHTWYTDGSSFLQEGQRKAGAAVTTETEVVWAKALPAGTSAQRAELIALTQALKMAEGKKLNVYTDSRYAFATAHIHGEIYRRRGWLTSEGKEIKNKDEILALLKALFLPKRLSIIHCPGHQKGNRAEARGNRMADQAAREVATRETPETSTLLAGKRTADGSEFEKRTADGSEFESPKKKAKVE

SEQ ID NO: 2565 - protein, 2094 aa, synthetic construct
MPAAKRVKLDGGDKKYSIGLDIGTNSVGWAVITDEYKVPSKKFKVLGNTDRHSIKKNLIGALLFDSGETAEATRLKRTARRRYTRRKNRICYLQEIFSNEMAKVDDSFFHRLEESFLVEEDKKHERHPIFGNIVDEVAYHEKYPTIYHLRKKLVDSTDKADLRLIYLALAHMIKFRGHFLIEGDLNPDNSDVDKLFIQLVQTYNQLFEENPINASGVDAKAILSARLSKSRRLENLIAQLPGEKKNGLFGNLIALSLGLTPNFKSNFDLAEDAKLQLSKDTYDDDLDNLLAQIGDQYADLFLAAKNLSDAILLSDILRVNTEITKAPLSASMIKRYDEHHQDLTLLKALVRQQLPEKYKEIFFDQSKNGYAGYIDGGASQEEFYKFIKPILEKMDGTEELLVKLNREDLLRKQRTFDNGSIPHQIHLGELHAILRRQEDFYPFLKDNREKIEKILTFRIPYYVGPLARGNSRFAWMTRKSEETITPWNFEEVVDKGASAQSFIERMTNFDKNLPNEKVLPKHSLLYEYFTVYNELTKVKYVTEGMRKPAFLSGEQKKAIVDLLFKTNRKVTVKQLKEDYFKKIECFDSVEISGVEDRFNASLGTYHDLLKIIKDKDFLDNEENEDILEDIVLTLTLFEDREMIEERLKTYAHLFDDKVMKQLKRRRYTGWGRLSRKLINGIRDKQSGKTILDFLKSDGFANRNFMQLIHDDSLTFKEDIQKAQVSGQGDSLHEHIANLAGSPAIKKGILQTVKVVDELVKVMGRHKPENIVIEMARENQTTQKGQKNSRERMKRIEEGIKELGSQILKEHPVENTQLQNEKLYLYYLQNGRDMYVDQELDINRLSDYDVDHIVPQSFLKDDSIDNKVLTRSDKARGKSDNVPSEEVVKKMKNYWRQLLNAKLITQRKFDNLTKAERGGLSELDKAGFIKRQLVETRQITKHVAQILDSRMNTKYDENDKLIREVKVITLKSKLVSDFRKDFQFYKVREINNYHHAHDAYLNAVVGTALIKKYPKLESEFVYGDYKVYDVRKMIAKSEQEIGKATAKYFFYSNIMNFFKTEITLANGEIRKRPLIETNGETGEIVWDKGRDFATVRKVLSMPQVNIVKKTEVQTGGFSKESILPKRNSDKLIARKKDWDPKKYGGFDSPTVAYSVLVVAKVEKGKSKKLKSVKELLGITIMERSSFEKNPIDFLEAKGYKEVKKDLIIKLPKYSLFELENGRKRMLASAGELQKGNELALPSKYVNFLYLASHYEKLKGSPEDNEQKQLFVEQHKHYLDEIIEQISEFSKRVILADANLDKVLSAYNKHRDKPIREQAENIIHLFTLTNLGAPAAFKYFDTTIDRKRYTSTKEVLDATLIHQSITGLYETRIDLSQLGGDGGGSSGGGGGSGGTLNIEDEYRLHETSKGPDVPLGSTWLSDFPQAWAETGGMGLAVRQAPLIIPLKATSTPVSIKQYPMSQEARLGIKPHIQRLLDQGILVPCQSPWNTPLLPVKKPGTNDYRPVQDLREVNKRVEDIHPTVPNPYNLLSGLPPSHQWYTVLDLKDAFFCLRLHPTSQSLFAFEWRDPEMGISGQLTWTRLPQGFKNSPTLFNEALHRDLADFRIQHPDLILLQYVDDLLLAATSELDCQQGTRALLQTLGDLGYRASAKKAQICQKQVKYLGYLLKEGQRWLTEARKETVMGQPTPKTPRQLREFLGKAGFCRLFIPGFAEMAAPLYPLTKPGTLFEWGPDQQKAYQEIKQALLTAPALGLPDLTKPFELFVDEKQGYAKGVLTQKLGPWRRPVAYLSKKLDPVAAGWPPCLRMVAAIAVLTKDAGKLTMGQPLVILAPHAVEALVKQPPDRWLSNARMTHYQALLLDTDRVQFGPIVALNPATLLPLPEEGLQHDCLDILAEAHGTRPDLTDQPLPDADHTWYTDGSSFLQEGQRKAGAAVTTETEVVWAKALPAGTSAQRAELIALTQALKMAEGKKLNVYTDSRYAFATAHIHGEIYRRRGWLTSEGKEIKNKDEILALLKALFLPKRLSIIHCPGHQKGNRAEARGNRMADQAAREVATRETPETSTLLAGKRTADGSEFEKRTADGSEFESPKKKAKVE

SEQ ID NO: 2566 - protein, 2115 aa, synthetic construct
MPAAKRVKLDGGDKKYSIGLDIGTNSVGWAVITDEYKVPSKKFKVLGNTDRHSIKKNLIGALLFDSGETAEATRLKRTARRRYTRRKNRICYLQEIFSNEMAKVDDSFFHRLEESFLVEEDKKHERHPIFGNIVDEVAYHEKYPTIYHLRKKLVDSTDKADLRLIYLALAHMIKFRGHFLIEGDLNPDNSDVDKLFIQLVQTYNQLFEENPINASGVDAKAILSARLSKSRRLENLIAQLPGEKKNGLFGNLIALSLGLTPNFKSNFDLAEDAKLQLSKDTYDDDLDNLLAQIGDQYADLFLAAKNLSDAILLSDILRVNTEITKAPLSASMIKRYDEHHQDLTLLKALVRQQLPEKYKEIFFDQSKNGYAGYIDGGASQEEFYKFIKPILEKMDGTEELLVKLNREDLLRKQRTFDNGSIPHQIHLGELHAILRRQEDFYPFLKDNREKIEKILTFRIPYYVGPLARGNSRFAWMTRKSEETITPWNFEEVVDKGASAQSFIERMTNFDKNLPNEKVLPKHSLLYEYFTVYNELTKVKYVTEGMRKPAFLSGEQKKAIVDLLFKTNRKVTVKQLKEDYFKKIECFDSVEISGVEDRFNASLGTYHDLLKIIKDKDFLDNEENEDILEDIVLTLTLFEDREMIEERLKTYAHLFDDKVMKQLKRRRYTGWGRLSRKLINGIRDKQSGKTILDFLKSDGFANRNFMQLIHDDSLTFKEDIQKAQVSGQGDSLHEHIANLAGSPAIKKGILQTVKVVDELVKVMGRHKPENIVIEMARENQTTQKGQKNSRERMKRIEEGIKELGSQILKEHPVENTQLQNEKLYLYYLQNGRDMYVDQELDINRLSDYDVDHIVPQSFLKDDSIDNKVLTRSDKARGKSDNVPSEEVVKKMKNYWRQLLNAKLITQRKFDNLTKAERGGLSELDKAGFIKRQLVETRQITKHVAQILDSRMNTKYDENDKLIREVKVITLKSKLVSDFRKDFQFYKVREINNYHHAHDAYLNAVVGTALIKKYPKLESEFVYGDYKVYDVRKMIAKSEQEIGKATAKYFFYSNIMNFFKTEITLANGEIRKRPLIETNGETGEIVWDKGRDFATVRKVLSMPQVNIVKKTEVQTGGFSKESILPKRNSDKLIARKKDWDPKKYGGFDSPTVAYSVLVVAKVEKGKSKKLKSVKELLGITIMERSSFEKNPIDFLEAKGYKEVKKDLIIKLPKYSLFELENGRKRMLASAGELQKGNELALPSKYVNFLYLASHYEKLKGSPEDNEQKQLFVEQHKHYLDEIIEQISEFSKRVILADANLDKVLSAYNKHRDKPIREQAENIIHLFTLTNLGAPAAFKYFDTTIDRKRYTSTKEVLDATLIHQSITGLYETRIDLSQLGGDGGGGGGSGGGGSGGGGSGGGGSGGGGSGGGGSGGTLNIEDEYRLHETSKGPDVPLGSTWLSDFPQAWAETGGMGLAVRQAPLIIPLKATSTPVSIKQYPMSQEARLGIKPHIQRLLDQGILVPCQSPWNTPLLPVKKPGTNDYRPVQDLREVNKRVEDIHPTVPNPYNLLSGLPPSHQWYTVLDLKDAFFCLRLHPTSQSLFAFEWRDPEMGISGQLTWTRLPQGFKNSPTLFNEALHRDLADFRIQHPDLILLQYVDDLLLAATSELDCQQGTRALLQTLGDLGYRASAKKAQICQKQVKYLGYLLKEGQRWLTEARKETVMGQPTPKTPRQLREFLGKAGFCRLFIPGFAEMAAPLYPLTKPGTLFEWGPDQQKAYQEIKQALLTAPALGLPDLTKPFELFVDEKQGYAKGVLTQKLGPWRRPVAYLSKKLDPVAAGWPPCLRMVAAIAVLTKDAGKLTMGQPLVILAPHAVEALVKQPPDRWLSNARMTHYQALLLDTDRVQFGPIVALNPATLLPLPEEGLQHDCLDILAEAHGTRPDLTDQPLPDADHTWYTDGSSFLQEGQRKAGAAVTTETEVVWAKALPAGTSAQRAELIALTQALKMAEGKKLNVYTDSRYAFATAHIHGEIYRRRGWLTSEGKEIKNKDEILALLKALFLPKRLSIIHCPGHQKGNRAEARGNRMADQAAREVATRETPETSTLLAGKRTADGSEFEKRTADGSEFESPKKKAKVE

SEQ ID NO: 2567 - protein, 2094 aa, synthetic construct
MPAAKRVKLDGGDKKYSIGLDIGTNSVGWAVITDEYKVPSKKFKVLGNTDRHSIKKNLIGALLFDSGETAEATRLKRTARRRYTRRKNRICYLQEIFSNEMAKVDDSFFHRLEESFLVEEDKKHERHPIFGNIVDEVAYHEKYPTIYHLRKKLVDSTDKADLRLIYLALAHMIKFRGHFLIEGDLNPDNSDVDKLFIQLVQTYNQLFEENPINASGVDAKAILSARLSKSRRLENLIAQLPGEKKNGLFGNLIALSLGLTPNFKSNFDLAEDAKLQLSKDTYDDDLDNLLAQIGDQYADLFLAAKNLSDAILLSDILRVNTEITKAPLSASMIKRYDEHHQDLTLLKALVRQQLPEKYKEIFFDQSKNGYAGYIDGGASQEEFYKFIKPILEKMDGTEELLVKLNREDLLRKQRTFDNGSIPHQIHLGELHAILRRQEDFYPFLKDNREKIEKILTFRIPYYVGPLARGNSRFAWMTRKSEETITPWNFEEVVDKGASAQSFIERMTNFDKNLPNEKVLPKHSLLYEYFTVYNELTKVKYVTEGMRKPAFLSGEQKKAIVDLLFKTNRKVTVKQLKEDYFKKIECFDSVEISGVEDRFNASLGTYHDLLKIIKDKDFLDNEENEDILEDIVLTLTLFEDREMIEERLKTYAHLFDDKVMKQLKRRRYTGWGRLSRKLINGIRDKQSGKTILDFLKSDGFANRNFMQLIHDDSLTFKEDIQKAQVSGQGDSLHEHIANLAGSPAIKKGILQTVKVVDELVKVMGRHKPENIVIEMARENQTTQKGQKNSRERMKRIEEGIKELGSQILKEHPVENTQLQNEKLYLYYLQNGRDMYVDQELDINRLSDYDVDHIVPQSFLKDDSIDNKVLTRSDKARGKSDNVPSEEVVKKMKNYWRQLLNAKLITQRKFDNLTKAERGGLSELDKAGFIKRQLVETRQITKHVAQILDSRMNTKYDENDKLIREVKVITLKSKLVSDFRKDFQFYKVREINNYHHAHDAYLNAVVGTALIKKYPKLESEFVYGDYKVYDVRKMIAKSEQEIGKATAKYFFYSNIMNFFKTEITLANGEIRKRPLIETNGETGEIVWDKGRDFATVRKVLSMPQVNIVKKTEVQTGGFSKESILPKRNSDKLIARKKDWDPKKYGGFDSPTVAYSVLVVAKVEKGKSKKLKSVKELLGITIMERSSFEKNPIDFLEAKGYKEVKKDLIIKLPKYSLFELENGRKRMLASAGELQKGNELALPSKYVNFLYLASHYEKLKGSPEDNEQKQLFVEQHKHYLDEIIEQISEFSKRVILADANLDKVLSAYNKHRDKPIREQAENIIHLFTLTNLGAPAAFKYFDTTIDRKRYTSTKEVLDATLIHQSITGLYETRIDLSQLGGDGGGSSGGSGGGGGTLNIEDEYRLHETSKGPDVPLGSTWLSDFPQAWAETGGMGLAVRQAPLIIPLKATSTPVSIKQYPMSQEARLGIKPHIQRLLDQGILVPCQSPWNTPLLPVKKPGTNDYRPVQDLREVNKRVEDIHPTVPNPYNLLSGLPPSHQWYTVLDLKDAFFCLRLHPTSQSLFAFEWRDPEMGISGQLTWTRLPQGFKNSPTLFNEALHRDLADFRIQHPDLILLQYVDDLLLAATSELDCQQGTRALLQTLGDLGYRASAKKAQICQKQVKYLGYLLKEGQRWLTEARKETVMGQPTPKTPRQLREFLGKAGFCRLFIPGFAEMAAPLYPLTKPGTLFEWGPDQQKAYQEIKQALLTAPALGLPDLTKPFELFVDEKQGYAKGVLTQKLGPWRRPVAYLSKKLDPVAAGWPPCLRMVAAIAVLTKDAGKLTMGQPLVILAPHAVEALVKQPPDRWLSNARMTHYQALLLDTDRVQFGPIVALNPATLLPLPEEGLQHDCLDILAEAHGTRPDLTDQPLPDADHTWYTDGSSFLQEGQRKAGAAVTTETEVVWAKALPAGTSAQRAELIALTQALKMAEGKKLNVYTDSRYAFATAHIHGEIYRRRGWLTSEGKEIKNKDEILALLKALFLPKRLSIIHCPGHQKGNRAEARGNRMADQAAREVATRETPETSTLLAGKRTADGSEFEKRTADGSEFESPKKKAKVE

SEQ ID NO: 2568 - protein, 2090 aa, synthetic construct
MPAAKRVKLDGGDKKYSIGLDIGTNSVGWAVITDEYKVPSKKFKVLGNTDRHSIKKNLIGALLFDSGETAEATRLKRTARRRYTRRKNRICYLQEIFSNEMAKVDDSFFHRLEESFLVEEDKKHERHPIFGNIVDEVAYHEKYPTIYHLRKKLVDSTDKADLRLIYLALAHMIKFRGHFLIEGDLNPDNSDVDKLFIQLVQTYNQLFEENPINASGVDAKAILSARLSKSRRLENLIAQLPGEKKNGLFGNLIALSLGLTPNFKSNFDLAEDAKLQLSKDTYDDDLDNLLAQIGDQYADLFLAAKNLSDAILLSDILRVNTEITKAPLSASMIKRYDEHHQDLTLLKALVRQQLPEKYKEIFFDQSKNGYAGYIDGGASQEEFYKFIKPILEKMDGTEELLVKLNREDLLRKQRTFDNGSIPHQIHLGELHAILRRQEDFYPFLKDNREKIEKILTFRIPYYVGPLARGNSRFAWMTRKSEETITPWNFEEVVDKGASAQSFIERMTNFDKNLPNEKVLPKHSLLYEYFTVYNELTKVKYVTEGMRKPAFLSGEQKKAIVDLLFKTNRKVTVKQLKEDYFKKIECFDSVEISGVEDRFNASLGTYHDLLKIIKDKDFLDNEENEDILEDIVLTLTLFEDREMIEERLKTYAHLFDDKVMKQLKRRRYTGWGRLSRKLINGIRDKQSGKTILDFLKSDGFANRNFMQLIHDDSLTFKEDIQKAQVSGQGDSLHEHIANLAGSPAIKKGILQTVKVVDELVKVMGRHKPENIVIEMARENQTTQKGQKNSRERMKRIEEGIKELGSQILKEHPVENTQLQNEKLYLYYLQNGRDMYVDQELDINRLSDYDVDHIVPQSFLKDDSIDNKVLTRSDKARGKSDNVPSEEVVKKMKNYWRQLLNAKLITQRKFDNLTKAERGGLSELDKAGFIKRQLVETRQITKHVAQILDSRMNTKYDENDKLIREVKVITLKSKLVSDFRKDFQFYKVREINNYHHAHDAYLNAVVGTALIKKYPKLESEFVYGDYKVYDVRKMIAKSEQEIGKATAKYFFYSNIMNFFKTEITLANGEIRKRPLIETNGETGEIVWDKGRDFATVRKVLSMPQVNIVKKTEVQTGGFSKESILPKRNSDKLIARKKDWDPKKYGGFDSPTVAYSVLVVAKVEKGKSKKLKSVKELLGITIMERSSFEKNPIDFLEAKGYKEVKKDLIIKLPKYSLFELENGRKRMLASAGELQKGNELALPSKYVNFLYLASHYEKLKGSPEDNEQKQLFVEQHKHYLDEIIEQISEFSKRVILADANLDKVLSAYNKHRDKPIREQAENIIHLFTLTNLGAPAAFKYFDTTIDRKRYTSTKEVLDATLIHQSITGLYETRIDLSQLGGDGGPAPAPGGTLNIEDEYRLHETSKGPDVPLGSTWLSDFPQAWAETGGMGLAVRQAPLIIPLKATSTPVSIKQYPMSQEARLGIKPHIQRLLDQGILVPCQSPWNTPLLPVKKPGTNDYRPVQDLREVNKRVEDIHPTVPNPYNLLSGLPPSHQWYTVLDLKDAFFCLRLHPTSQSLFAFEWRDPEMGISGQLTWTRLPQGFKNSPTLFNEALHRDLADFRIQHPDLILLQYVDDLLLAATSELDCQQGTRALLQTLGDLGYRASAKKAQICQKQVKYLGYLLKEGQRWLTEARKETVMGQPTPKTPRQLREFLGKAGFCRLFIPGFAEMAAPLYPLTKPGTLFEWGPDQQKAYQEIKQALLTAPALGLPDLTKPFELFVDEKQGYAKGVLTQKLGPWRRPVAYLSKKLDPVAAGWPPCLRMVAAIAVLTKDAGKLTMGQPLVILAPHAVEALVKQPPDRWLSNARMTHYQALLLDTDRVQFGPIVALNPATLLPLPEEGLQHDCLDILAEAHGTRPDLTDQPLPDADHTWYTDGSSFLQEGQRKAGAAVTTETEVVWAKALPAGTSAQRAELIALTQALKMAEGKKLNVYTDSRYAFATAHIHGEIYRRRGWLTSEGKEIKNKDEILALLKALFLPKRLSIIHCPGHQKGNRAEARGNRMADQAAREVATRETPETSTLLAGKRTADGSEFEKRTADGSEFESPKKKAKVE

SEQ ID NO: 2569 - protein, 2095 aa, synthetic construct
MPAAKRVKLDGGDKKYSIGLDIGTNSVGWAVITDEYKVPSKKFKVLGNTDRHSIKKNLIGALLFDSGETAEATRLKRTARRRYTRRKNRICYLQEIFSNEMAKVDDSFFHRLEESFLVEEDKKHERHPIFGNIVDEVAYHEKYPTIYHLRKKLVDSTDKADLRLIYLALAHMIKFRGHFLIEGDLNPDNSDVDKLFIQLVQTYNQLFEENPINASGVDAKAILSARLSKSRRLENLIAQLPGEKKNGLFGNLIALSLGLTPNFKSNFDLAEDAKLQLSKDTYDDDLDNLLAQIGDQYADLFLAAKNLSDAILLSDILRVNTEITKAPLSASMIKRYDEHHQDLTLLKALVRQQLPEKYKEIFFDQSKNGYAGYIDGGASQEEFYKFIKPILEKMDGTEELLVKLNREDLLRKQRTFDNGSIPHQIHLGELHAILRRQEDFYPFLKDNREKIEKILTFRIPYYVGPLARGNSRFAWMTRKSEETITPWNFEEVVDKGASAQSFIERMTNFDKNLPNEKVLPKHSLLYEYFTVYNELTKVKYVTEGMRKPAFLSGEQKKAIVDLLFKTNRKVTVKQLKEDYFKKIECFDSVEISGVEDRFNASLGTYHDLLKIIKDKDFLDNEENEDILEDIVLTLTLFEDREMIEERLKTYAHLFDDKVMKQLKRRRYTGWGRLSRKLINGIRDKQSGKTILDFLKSDGFANRNFMQLIHDDSLTFKEDIQKAQVSGQGDSLHEHIANLAGSPAIKKGILQTVKVVDELVKVMGRHKPENIVIEMARENQTTQKGQKNSRERMKRIEEGIKELGSQILKEHPVENTQLQNEKLYLYYLQNGRDMYVDQELDINRLSDYDVDHIVPQSFLKDDSIDNKVLTRSDKARGKSDNVPSEEVVKKMKNYWRQLLNAKLITQRKFDNLTKAERGGLSELDKAGFIKRQLVETRQITKHVAQILDSRMNTKYDENDKLIREVKVITLKSKLVSDFRKDFQFYKVREINNYHHAHDAYLNAVVGTALIKKYPKLESEFVYGDYKVYDVRKMIAKSEQEIGKATAKYFFYSNIMNFFKTEITLANGEIRKRPLIETNGETGEIVWDKGRDFATVRKVLSMPQVNIVKKTEVQTGGFSKESILPKRNSDKLIARKKDWDPKKYGGFDSPTVAYSVLVVAKVEKGKSKKLKSVKELLGITIMERSSFEKNPIDFLEAKGYKEVKKDLIIKLPKYSLFELENGRKRMLASAGELQKGNELALPSKYVNFLYLASHYEKLKGSPEDNEQKQLFVEQHKHYLDEIIEQISEFSKRVILADANLDKVLSAYNKHRDKPIREQAENIIHLFTLTNLGAPAAFKYFDTTIDRKRYTSTKEVLDATLIHQSITGLYETRIDLSQLGGDGGEAAAKEAAAKGGTLNIEDEYRLHETSKGPDVPLGSTWLSDFPQAWAETGGMGLAVRQAPLIIPLKATSTPVSIKQYPMSQEARLGIKPHIQRLLDQGILVPCQSPWNTPLLPVKKPGTNDYRPVQDLREVNKRVEDIHPTVPNPYNLLSGLPPSHQWYTVLDLKDAFFCLRLHPTSQSLFAFEWRDPEMGISGQLTWTRLPQGFKNSPTLFNEALHRDLADFRIQHPDLILLQYVDDLLLAATSELDCQQGTRALLQTLGDLGYRASAKKAQICQKQVKYLGYLLKEGQRWLTEARKETVMGQPTPKTPRQLREFLGKAGFCRLFIPGFAEMAAPLYPLTKPGTLFEWGPDQQKAYQEIKQALLTAPALGLPDLTKPFELFVDEKQGYAKGVLTQKLGPWRRPVAYLSKKLDPVAAGWPPCLRMVAAIAVLTKDAGKLTMGQPLVILAPHAVEALVKQPPDRWLSNARMTHYQALLLDTDRVQFGPIVALNPATLLPLPEEGLQHDCLDILAEAHGTRPDLTDQPLPDADHTWYTDGSSFLQEGQRKAGAAVTTETEVVWAKALPAGTSAQRAELIALTQALKMAEGKKLNVYTDSRYAFATAHIHGEIYRRRGWLTSEGKEIKNKDEILALLKALFLPKRLSIIHCPGHQKGNRAEARGNRMADQAAREVATRETPETSTLLAGKRTADGSEFEKRTADGSEFESPKKKAKVE

SEQ ID NO: 2570 - protein, 2096 aa, synthetic construct
MPAAKRVKLDGGDKKYSIGLDIGTNSVGWAVITDEYKVPSKKFKVLGNTDRHSIKKNLIGALLFDSGETAEATRLKRTARRRYTRRKNRICYLQEIFSNEMAKVDDSFFHRLEESFLVEEDKKHERHPIFGNIVDEVAYHEKYPTIYHLRKKLVDSTDKADLRLIYLALAHMIKFRGHFLIEGDLNPDNSDVDKLFIQLVQTYNQLFEENPINASGVDAKAILSARLSKSRRLENLIAQLPGEKKNGLFGNLIALSLGLTPNFKSNFDLAEDAKLQLSKDTYDDDLDNLLAQIGDQYADLFLAAKNLSDAILLSDILRVNTEITKAPLSASMIKRYDEHHQDLTLLKALVRQQLPEKYKEIFFDQSKNGYAGYIDGGASQEEFYKFIKPILEKMDGTEELLVKLNREDLLRKQRTFDNGSIPHQIHLGELHAILRRQEDFYPFLKDNREKIEKILTFRIPYYVGPLARGNSRFAWMTRKSEETITPWNFEEVVDKGASAQSFIERMTNFDKNLPNEKVLPKHSLLYEYFTVYNELTKVKYVTEGMRKPAFLSGEQKKAIVDLLFKTNRKVTVKQLKEDYFKKIECFDSVEISGVEDRFNASLGTYHDLLKIIKDKDFLDNEENEDILEDIVLTLTLFEDREMIEERLKTYAHLFDDKVMKQLKRRRYTGWGRLSRKLINGIRDKQSGKTILDFLKSDGFANRNFMQLIHDDSLTFKEDIQKAQVSGQGDSLHEHIANLAGSPAIKKGILQTVKVVDELVKVMGRHKPENIVIEMARENQTTQKGQKNSRERMKRIEEGIKELGSQILKEHPVENTQLQNEKLYLYYLQNGRDMYVDQELDINRLSDYDVDHIVPQSFLKDDSIDNKVLTRSDKARGKSDNVPSEEVVKKMKNYWRQLLNAKLITQRKFDNLTKAERGGLSELDKAGFIKRQLVETRQITKHVAQILDSRMNTKYDENDKLIREVKVITLKSKLVSDFRKDFQFYKVREINNYHHAHDAYLNAVVGTALIKKYPKLESEFVYGDYKVYDVRKMIAKSEQEIGKATAKYFFYSNIMNFFKTEITLANGEIRKRPLIETNGETGEIVWDKGRDFATVRKVLSMPQVNIVKKTEVQTGGFSKESILPKRNSDKLIARKKDWDPKKYGGFDSPTVAYSVLVVAKVEKGKSKKLKSVKELLGITIMERSSFEKNPIDFLEAKGYKEVKKDLIIKLPKYSLFELENGRKRMLASAGELQKGNELALPSKYVNFLYLASHYEKLKGSPEDNEQKQLFVEQHKHYLDEIIEQISEFSKRVILADANLDKVLSAYNKHRDKPIREQAENIIHLFTLTNLGAPAAFKYFDTTIDRKRYTSTKEVLDATLIHQSITGLYETRIDLSQLGGDGGGSSGGSEAAAKGGTLNIEDEYRLHETSKGPDVPLGSTWLSDFPQAWAETGGMGLAVRQAPLIIPLKATSTPVSIKQYPMSQEARLGIKPHIQRLLDQGILVPCQSPWNTPLLPVKKPGTNDYRPVQDLREVNKRVEDIHPTVPNPYNLLSGLPPSHQWYTVLDLKDAFFCLRLHPTSQSLFAFEWRDPEMGISGQLTWTRLPQGFKNSPTLFNEALHRDLADFRIQHPDLILLQYVDDLLLAATSELDCQQGTRALLQTLGDLGYRASAKKAQICQKQVKYLGYLLKEGQRWLTEARKETVMGQPTPKTPRQLREFLGKAGFCRLFIPGFAEMAAPLYPLTKPGTLFEWGPDQQKAYQEIKQALLTAPALGLPDLTKPFELFVDEKQGYAKGVLTQKLGPWRRPVAYLSKKLDPVAAGWPPCLRMVAAIAVLTKDAGKLTMGQPLVILAPHAVEALVKQPPDRWLSNARMTHYQALLLDTDRVQFGPIVALNPATLLPLPEEGLQHDCLDILAEAHGTRPDLTDQPLPDADHTWYTDGSSFLQEGQRKAGAAVTTETEVVWAKALPAGTSAQRAELIALTQALKMAEGKKLNVYTDSRYAFATAHIHGEIYRRRGWLTSEGKEIKNKDEILALLKALFLPKRLSIIHCPGHQKGNRAEARGNRMADQAAREVATRETPETSTLLAGKRTADGSEFEKRTADGSEFESPKKKAKVE

SEQ ID NO: 2571 - protein, 2094 aa, synthetic construct
MPAAKRVKLDGGDKKYSIGLDIGTNSVGWAVITDEYKVPSKKFKVLGNTDRHSIKKNLIGALLFDSGETAEATRLKRTARRRYTRRKNRICYLQEIFSNEMAKVDDSFFHRLEESFLVEEDKKHERHPIFGNIVDEVAYHEKYPTIYHLRKKLVDSTDKADLRLIYLALAHMIKFRGHFLIEGDLNPDNSDVDKLFIQLVQTYNQLFEENPINASGVDAKAILSARLSKSRRLENLIAQLPGEKKNGLFGNLIALSLGLTPNFKSNFDLAEDAKLQLSKDTYDDDLDNLLAQIGDQYADLFLAAKNLSDAILLSDILRVNTEITKAPLSASMIKRYDEHHQDLTLLKALVRQQLPEKYKEIFFDQSKNGYAGYIDGGASQEEFYKFIKPILEKMDGTEELLVKLNREDLLRKQRTFDNGSIPHQIHLGELHAILRRQEDFYPFLKDNREKIEKILTFRIPYYVGPLARGNSRFAWMTRKSEETITPWNFEEVVDKGASAQSFIERMTNFDKNLPNEKVLPKHSLLYEYFTVYNELTKVKYVTEGMRKPAFLSGEQKKAIVDLLFKTNRKVTVKQLKEDYFKKIECFDSVEISGVEDRFNASLGTYHDLLKIIKDKDFLDNEENEDILEDIVLTLTLFEDREMIEERLKTYAHLFDDKVMKQLKRRRYTGWGRLSRKLINGIRDKQSGKTILDFLKSDGFANRNFMQLIHDDSLTFKEDIQKAQVSGQGDSLHEHIANLAGSPAIKKGILQTVKVVDELVKVMGRHKPENIVIEMARENQTTQKGQKNSRERMKRIEEGIKELGSQILKEHPVENTQLQNEKLYLYYLQNGRDMYVDQELDINRLSDYDVDHIVPQSFLKDDSIDNKVLTRSDKARGKSDNVPSEEVVKKMKNYWRQLLNAKLITQRKFDNLTKAERGGLSELDKAGFIKRQLVETRQITKHVAQILDSRMNTKYDENDKLIREVKVITLKSKLVSDFRKDFQFYKVREINNYHHAHDAYLNAVVGTALIKKYPKLESEFVYGDYKVYDVRKMIAKSEQEIGKATAKYFFYSNIMNFFKTEITLANGEIRKRPLIETNGETGEIVWDKGRDFATVRKVLSMPQVNIVKKTEVQTGGFSKESILPKRNSDKLIARKKDWDPKKYGGFDSPTVAYSVLVVAKVEKGKSKKLKSVKELLGITIMERSSFEKNPIDFLEAKGYKEVKKDLIIKLPKYSLFELENGRKRMLASAGELQKGNELALPSKYVNFLYLASHYEKLKGSPEDNEQKQLFVEQHKHYLDEIIEQISEFSKRVILADANLDKVLSAYNKHRDKPIREQAENIIHLFTLTNLGAPAAFKYFDTTIDRKRYTSTKEVLDATLIHQSITGLYETRIDLSQLGGDGGGGGGSSGGSGGTLNIEDEYRLHETSKGPDVPLGSTWLSDFPQAWAETGGMGLAVRQAPLIIPLKATSTPVSIKQYPMSQEARLGIKPHIQRLLDQGILVPCQSPWNTPLLPVKKPGTNDYRPVQDLREVNKRVEDIHPTVPNPYNLLSGLPPSHQWYTVLDLKDAFFCLRLHPTSQSLFAFEWRDPEMGISGQLTWTRLPQGFKNSPTLFNEALHRDLADFRIQHPDLILLQYVDDLLLAATSELDCQQGTRALLQTLGDLGYRASAKKAQICQKQVKYLGYLLKEGQRWLTEARKETVMGQPTPKTPRQLREFLGKAGFCRLFIPGFAEMAAPLYPLTKPGTLFEWGPDQQKAYQEIKQALLTAPALGLPDLTKPFELFVDEKQGYAKGVLTQKLGPWRRPVAYLSKKLDPVAAGWPPCLRMVAAIAVLTKDAGKLTMGQPLVILAPHAVEALVKQPPDRWLSNARMTHYQALLLDTDRVQFGPIVALNPATLLPLPEEGLQHDCLDILAEAHGTRPDLTDQPLPDADHTWYTDGSSFLQEGQRKAGAAVTTETEVVWAKALPAGTSAQRAELIALTQALKMAEGKKLNVYTDSRYAFATAHIHGEIYRRRGWLTSEGKEIKNKDEILALLKALFLPKRLSIIHCPGHQKGNRAEARGNRMADQAAREVATRETPETSTLLAGKRTADGSEFEKRTADGSEFESPKKKAKVE

SEQ ID NO: 2572 - protein, 2091 aa, synthetic construct
MPAAKRVKLDGGDKKYSIGLDIGTNSVGWAVITDEYKVPSKKFKVLGNTDRHSIKKNLIGALLFDSGETAEATRLKRTARRRYTRRKNRICYLQEIFSNEMAKVDDSFFHRLEESFLVEEDKKHERHPIFGNIVDEVAYHEKYPTIYHLRKKLVDSTDKADLRLIYLALAHMIKFRGHFLIEGDLNPDNSDVDKLFIQLVQTYNQLFEENPINASGVDAKAILSARLSKSRRLENLIAQLPGEKKNGLFGNLIALSLGLTPNFKSNFDLAEDAKLQLSKDTYDDDLDNLLAQIGDQYADLFLAAKNLSDAILLSDILRVNTEITKAPLSASMIKRYDEHHQDLTLLKALVRQQLPEKYKEIFFDQSKNGYAGYIDGGASQEEFYKFIKPILEKMDGTEELLVKLNREDLLRKQRTFDNGSIPHQIHLGELHAILRRQEDFYPFLKDNREKIEKILTFRIPYYVGPLARGNSRFAWMTRKSEETITPWNFEEVVDKGASAQSFIERMTNFDKNLPNEKVLPKHSLLYEYFTVYNELTKVKYVTEGMRKPAFLSGEQKKAIVDLLFKTNRKVTVKQLKEDYFKKIECFDSVEISGVEDRFNASLGTYHDLLKIIKDKDFLDNEENEDILEDIVLTLTLFEDREMIEERLKTYAHLFDDKVMKQLKRRRYTGWGRLSRKLINGIRDKQSGKTILDFLKSDGFANRNFMQLIHDDSLTFKEDIQKAQVSGQGDSLHEHIANLAGSPAIKKGILQTVKVVDELVKVMGRHKPENIVIEMARENQTTQKGQKNSRERMKRIEEGIKELGSQILKEHPVENTQLQNEKLYLYYLQNGRDMYVDQELDINRLSDYDVDHIVPQSFLKDDSIDNKVLTRSDKARGKSDNVPSEEVVKKMKNYWRQLLNAKLITQRKFDNLTKAERGGLSELDKAGFIKRQLVETRQITKHVAQILDSRMNTKYDENDKLIREVKVITLKSKLVSDFRKDFQFYKVREINNYHHAHDAYLNAVVGTALIKKYPKLESEFVYGDYKVYDVRKMIAKSEQEIGKATAKYFFYSNIMNFFKTEITLANGEIRKRPLIETNGETGEIVWDKGRDFATVRKVLSMPQVNIVKKTEVQTGGFSKESILPKRNSDKLIARKKDWDPKKYGGFDSPTVAYSVLVVAKVEKGKSKKLKSVKELLGITIMERSSFEKNPIDFLEAKGYKEVKKDLIIKLPKYSLFELENGRKRMLASAGELQKGNELALPSKYVNFLYLASHYEKLKGSPEDNEQKQLFVEQHKHYLDEIIEQISEFSKRVILADANLDKVLSAYNKHRDKPIREQAENIIHLFTLTNLGAPAAFKYFDTTIDRKRYTSTKEVLDATLIHQSITGLYETRIDLSQLGGDGGGSSPAPGGTLNIEDEYRLHETSKGPDVPLGSTWLSDFPQAWAETGGMGLAVRQAPLIIPLKATSTPVSIKQYPMSQEARLGIKPHIQRLLDQGILVPCQSPWNTPLLPVKKPGTNDYRPVQDLREVNKRVEDIHPTVPNPYNLLSGLPPSHQWYTVLDLKDAFFCLRLHPTSQSLFAFEWRDPEMGISGQLTWTRLPQGFKNSPTLFNEALHRDLADFRIQHPDLILLQYVDDLLLAATSELDCQQGTRALLQTLGDLGYRASAKKAQICQKQVKYLGYLLKEGQRWLTEARKETVMGQPTPKTPRQLREFLGKAGFCRLFIPGFAEMAAPLYPLTKPGTLFEWGPDQQKAYQEIKQALLTAPALGLPDLTKPFELFVDEKQGYAKGVLTQKLGPWRRPVAYLSKKLDPVAAGWPPCLRMVAAIAVLTKDAGKLTMGQPLVILAPHAVEALVKQPPDRWLSNARMTHYQALLLDTDRVQFGPIVALNPATLLPLPEEGLQHDCLDILAEAHGTRPDLTDQPLPDADHTWYTDGSSFLQEGQRKAGAAVTTETEVVWAKALPAGTSAQRAELIALTQALKMAEGKKLNVYTDSRYAFATAHIHGEIYRRRGWLTSEGKEIKNKDEILALLKALFLPKRLSIIHCPGHQKGNRAEARGNRMADQAAREVATRETPETSTLLAGKRTADGSEFEKRTADGSEFESPKKKAKVE

SEQ ID NO: 2573 - protein, 2094 aa, synthetic construct
MPAAKRVKLDGGDKKYSIGLDIGTNSVGWAVITDEYKVPSKKFKVLGNTDRHSIKKNLIGALLFDSGETAEATRLKRTARRRYTRRKNRICYLQEIFSNEMAKVDDSFFHRLEESFLVEEDKKHERHPIFGNIVDEVAYHEKYPTIYHLRKKLVDSTDKADLRLIYLALAHMIKFRGHFLIEGDLNPDNSDVDKLFIQLVQTYNQLFEENPINASGVDAKAILSARLSKSRRLENLIAQLPGEKKNGLFGNLIALSLGLTPNFKSNFDLAEDAKLQLSKDTYDDDLDNLLAQIGDQYADLFLAAKNLSDAILLSDILRVNTEITKAPLSASMIKRYDEHHQDLTLLKALVRQQLPEKYKEIFFDQSKNGYAGYIDGGASQEEFYKFIKPILEKMDGTEELLVKLNREDLLRKQRTFDNGSIPHQIHLGELHAILRRQEDFYPFLKDNREKIEKILTFRIPYYVGPLARGNSRFAWMTRKSEETITPWNFEEVVDKGASAQSFIERMTNFDKNLPNEKVLPKHSLLYEYFTVYNELTKVKYVTEGMRKPAFLSGEQKKAIVDLLFKTNRKVTVKQLKEDYFKKIECFDSVEISGVEDRFNASLGTYHDLLKIIKDKDFLDNEENEDILEDIVLTLTLFEDREMIEERLKTYAHLFDDKVMKQLKRRRYTGWGRLSRKLINGIRDKQSGKTILDFLKSDGFANRNFMQLIHDDSLTFKEDIQKAQVSGQGDSLHEHIANLAGSPAIKKGILQTVKVVDELVKVMGRHKPENIVIEMARENQTTQKGQKNSRERMKRIEEGIKELGSQILKEHPVENTQLQNEKLYLYYLQNGRDMYVDQELDINRLSDYDVDHIVPQSFLKDDSIDNKVLTRSDKARGKSDNVPSEEVVKKMKNYWRQLLNAKLITQRKFDNLTKAERGGLSELDKAGFIKRQLVETRQITKHVAQILDSRMNTKYDENDKLIREVKVITLKSKLVSDFRKDFQFYKVREINNYHHAHDAYLNAVVGTALIKKYPKLESEFVYGDYKVYDVRKMIAKSEQEIGKATAKYFFYSNIMNFFKTEITLANGEIRKRPLIETNGETGEIVWDKGRDFATVRKVLSMPQVNIVKKTEVQTGGFSKESILPKRNSDKLIARKKDWDPKKYGGFDSPTVAYSVLVVAKVEKGKSKKLKSVKELLGITIMERSSFEKNPIDFLEAKGYKEVKKDLIIKLPKYSLFELENGRKRMLASAGELQKGNELALPSKYVNFLYLASHYEKLKGSPEDNEQKQLFVEQHKHYLDEIIEQISEFSKRVILADANLDKVLSAYNKHRDKPIREQAENIIHLFTLTNLGAPAAFKYFDTTIDRKRYTSTKEVLDATLIHQSITGLYETRIDLSQLGGDGGGGSPAPGGGGGTLNIEDEYRLHETSKGPDVPLGSTWLSDFPQAWAETGGMGLAVRQAPLIIPLKATSTPVSIKQYPMSQEARLGIKPHIQRLLDQGILVPCQSPWNTPLLPVKKPGTNDYRPVQDLREVNKRVEDIHPTVPNPYNLLSGLPPSHQWYTVLDLKDAFFCLRLHPTSQSLFAFEWRDPEMGISGQLTWTRLPQGFKNSPTLFNEALHRDLADFRIQHPDLILLQYVDDLLLAATSELDCQQGTRALLQTLGDLGYRASAKKAQICQKQVKYLGYLLKEGQRWLTEARKETVMGQPTPKTPRQLREFLGKAGFCRLFIPGFAEMAAPLYPLTKPGTLFEWGPDQQKAYQEIKQALLTAPALGLPDLTKPFELFVDEKQGYAKGVLTQKLGPWRRPVAYLSKKLDPVAAGWPPCLRMVAAIAVLTKDAGKLTMGQPLVILAPHAVEALVKQPPDRWLSNARMTHYQALLLDTDRVQFGPIVALNPATLLPLPEEGLQHDCLDILAEAHGTRPDLTDQPLPDADHTWYTDGSSFLQEGQRKAGAAVTTETEVVWAKALPAGTSAQRAELIALTQALKMAEGKKLNVYTDSRYAFATAHIHGEIYRRRGWLTSEGKEIKNKDEILALLKALFLPKRLSIIHCPGHQKGNRAEARGNRMADQAAREVATRETPETSTLLAGKRTADGSEFEKRTADGSEFESPKKKAKVE

SEQ ID NO: 2574 - protein, 2094 aa, synthetic construct
MPAAKRVKLDGGDKKYSIGLDIGTNSVGWAVITDEYKVPSKKFKVLGNTDRHSIKKNLIGALLFDSGETAEATRLKRTARRRYTRRKNRICYLQEIFSNEMAKVDDSFFHRLEESFLVEEDKKHERHPIFGNIVDEVAYHEKYPTIYHLRKKLVDSTDKADLRLIYLALAHMIKFRGHFLIEGDLNPDNSDVDKLFIQLVQTYNQLFEENPINASGVDAKAILSARLSKSRRLENLIAQLPGEKKNGLFGNLIALSLGLTPNFKSNFDLAEDAKLQLSKDTYDDDLDNLLAQIGDQYADLFLAAKNLSDAILLSDILRVNTEITKAPLSASMIKRYDEHHQDLTLLKALVRQQLPEKYKEIFFDQSKNGYAGYIDGGASQEEFYKFIKPILEKMDGTEELLVKLNREDLLRKQRTFDNGSIPHQIHLGELHAILRRQEDFYPFLKDNREKIEKILTFRIPYYVGPLARGNSRFAWMTRKSEETITPWNFEEVVDKGASAQSFIERMTNFDKNLPNEKVLPKHSLLYEYFTVYNELTKVKYVTEGMRKPAFLSGEQKKAIVDLLFKTNRKVTVKQLKEDYFKKIECFDSVEISGVEDRFNASLGTYHDLLKIIKDKDFLDNEENEDILEDIVLTLTLFEDREMIEERLKTYAHLFDDKVMKQLKRRRYTGWGRLSRKLINGIRDKQSGKTILDFLKSDGFANRNFMQLIHDDSLTFKEDIQKAQVSGQGDSLHEHIANLAGSPAIKKGILQTVKVVDELVKVMGRHKPENIVIEMARENQTTQKGQKNSRERMKRIEEGIKELGSQILKEHPVENTQLQNEKLYLYYLQNGRDMYVDQELDINRLSDYDVDHIVPQSFLKDDSIDNKVLTRSDKARGKSDNVPSEEVVKKMKNYWRQLLNAKLITQRKFDNLTKAERGGLSELDKAGFIKRQLVETRQITKHVAQILDSRMNTKYDENDKLIREVKVITLKSKLVSDFRKDFQFYKVREINNYHHAHDAYLNAVVGTALIKKYPKLESEFVYGDYKVYDVRKMIAKSEQEIGKATAKYFFYSNIMNFFKTEITLANGEIRKRPLIETNGETGEIVWDKGRDFATVRKVLSMPQVNIVKKTEVQTGGFSKESILPKRNSDKLIARKKDWDPKKYGGFDSPTVAYSVLVVAKVEKGKSKKLKSVKELLGITIMERSSFEKNPIDFLEAKGYKEVKKDLIIKLPKYSLFELENGRKRMLASAGELQKGNELALPSKYVNFLYLASHYEKLKGSPEDNEQKQLFVEQHKHYLDEIIEQISEFSKRVILADANLDKVLSAYNKHRDKPIREQAENIIHLFTLTNLGAPAAFKYFDTTIDRKRYTSTKEVLDATLIHQSITGLYETRIDLSQLGGDGGPAPGGSGGGGGTLNIEDEYRLHETSKGPDVPLGSTWLSDFPQAWAETGGMGLAVRQAPLIIPLKATSTPVSIKQYPMSQEARLGIKPHIQRLLDQGILVPCQSPWNTPLLPVKKPGTNDYRPVQDLREVNKRVEDIHPTVPNPYNLLSGLPPSHQWYTVLDLKDAFFCLRLHPTSQSLFAFEWRDPEMGISGQLTWTRLPQGFKNSPTLFNEALHRDLADFRIQHPDLILLQYVDDLLLAATSELDCQQGTRALLQTLGDLGYRASAKKAQICQKQVKYLGYLLKEGQRWLTEARKETVMGQPTPKTPRQLREFLGKAGFCRLFIPGFAEMAAPLYPLTKPGTLFEWGPDQQKAYQEIKQALLTAPALGLPDLTKPFELFVDEKQGYAKGVLTQKLGPWRRPVAYLSKKLDPVAAGWPPCLRMVAAIAVLTKDAGKLTMGQPLVILAPHAVEALVKQPPDRWLSNARMTHYQALLLDTDRVQFGPIVALNPATLLPLPEEGLQHDCLDILAEAHGTRPDLTDQPLPDADHTWYTDGSSFLQEGQRKAGAAVTTETEVVWAKALPAGTSAQRAELIALTQALKMAEGKKLNVYTDSRYAFATAHIHGEIYRRRGWLTSEGKEIKNKDEILALLKALFLPKRLSIIHCPGHQKGNRAEARGNRMADQAAREVATRETPETSTLLAGKRTADGSEFEKRTADGSEFESPKKKAKVE

SEQ ID NO: 2575 - protein, 2096 aa, synthetic construct
MPAAKRVKLDGGDKKYSIGLDIGTNSVGWAVITDEYKVPSKKFKVLGNTDRHSIKKNLIGALLFDSGETAEATRLKRTARRRYTRRKNRICYLQEIFSNEMAKVDDSFFHRLEESFLVEEDKKHERHPIFGNIVDEVAYHEKYPTIYHLRKKLVDSTDKADLRLIYLALAHMIKFRGHFLIEGDLNPDNSDVDKLFIQLVQTYNQLFEENPINASGVDAKAILSARLSKSRRLENLIAQLPGEKKNGLFGNLIALSLGLTPNFKSNFDLAEDAKLQLSKDTYDDDLDNLLAQIGDQYADLFLAAKNLSDAILLSDILRVNTEITKAPLSASMIKRYDEHHQDLTLLKALVRQQLPEKYKEIFFDQSKNGYAGYIDGGASQEEFYKFIKPILEKMDGTEELLVKLNREDLLRKQRTFDNGSIPHQIHLGELHAILRRQEDFYPFLKDNREKIEKILTFRIPYYVGPLARGNSRFAWMTRKSEETITPWNFEEVVDKGASAQSFIERMTNFDKNLPNEKVLPKHSLLYEYFTVYNELTKVKYVTEGMRKPAFLSGEQKKAIVDLLFKTNRKVTVKQLKEDYFKKIECFDSVEISGVEDRFNASLGTYHDLLKIIKDKDFLDNEENEDILEDIVLTLTLFEDREMIEERLKTYAHLFDDKVMKQLKRRRYTGWGRLSRKLINGIRDKQSGKTILDFLKSDGFANRNFMQLIHDDSLTFKEDIQKAQVSGQGDSLHEHIANLAGSPAIKKGILQTVKVVDELVKVMGRHKPENIVIEMARENQTTQKGQKNSRERMKRIEEGIKELGSQILKEHPVENTQLQNEKLYLYYLQNGRDMYVDQELDINRLSDYDVDHIVPQSFLKDDSIDNKVLTRSDKARGKSDNVPSEEVVKKMKNYWRQLLNAKLITQRKFDNLTKAERGGLSELDKAGFIKRQLVETRQITKHVAQILDSRMNTKYDENDKLIREVKVITLKSKLVSDFRKDFQFYKVREINNYHHAHDAYLNAVVGTALIKKYPKLESEFVYGDYKVYDVRKMIAKSEQEIGKATAKYFFYSNIMNFFKTEITLANGEIRKRPLIETNGETGEIVWDKGRDFATVRKVLSMPQVNIVKKTEVQTGGFSKESILPKRNSDKLIARKKDWDPKKYGGFDSPTVAYSVLVVAKVEKGKSKKLKSVKELLGITIMERSSFEKNPIDFLEAKGYKEVKKDLIIKLPKYSLFELENGRKRMLASAGELQKGNELALPSKYVNFLYLASHYEKLKGSPEDNEQKQLFVEQHKHYLDEIIEQISEFSKRVILADANLDKVLSAYNKHRDKPIREQAENIIHLFTLTNLGAPAAFKYFDTTIDRKRYTSTKEVLDATLIHQSITGLYETRIDLSQLGGDGGGGGGSSEAAAKGGTLNIEDEYRLHETSKGPDVPLGSTWLSDFPQAWAETGGMGLAVRQAPLIIPLKATSTPVSIKQYPMSQEARLGIKPHIQRLLDQGILVPCQSPWNTPLLPVKKPGTNDYRPVQDLREVNKRVEDIHPTVPNPYNLLSGLPPSHQWYTVLDLKDAFFCLRLHPTSQSLFAFEWRDPEMGISGQLTWTRLPQGFKNSPTLFNEALHRDLADFRIQHPDLILLQYVDDLLLAATSELDCQQGTRALLQTLGDLGYRASAKKAQICQKQVKYLGYLLKEGQRWLTEARKETVMGQPTPKTPRQLREFLGKAGFCRLFIPGFAEMAAPLYPLTKPGTLFEWGPDQQKAYQEIKQALLTAPALGLPDLTKPFELFVDEKQGYAKGVLTQKLGPWRRPVAYLSKKLDPVAAGWPPCLRMVAAIAVLTKDAGKLTMGQPLVILAPHAVEALVKQPPDRWLSNARMTHYQALLLDTDRVQFGPIVALNPATLLPLPEEGLQHDCLDILAEAHGTRPDLTDQPLPDADHTWYTDGSSFLQEGQRKAGAAVTTETEVVWAKALPAGTSAQRAELIALTQALKMAEGKKLNVYTDSRYAFATAHIHGEIYRRRGWLTSEGKEIKNKDEILALLKALFLPKRLSIIHCPGHQKGNRAEARGNRMADQAAREVATRETPETSTLLAGKRTADGSEFEKRTADGSEFESPKKKAKVE

SEQ ID NO: 2576 - protein, 2096 aa, synthetic construct
MPAAKRVKLDGGDKKYSIGLDIGTNSVGWAVITDEYKVPSKKFKVLGNTDRHSIKKNLIGALLFDSGETAEATRLKRTARRRYTRRKNRICYLQEIFSNEMAKVDDSFFHRLEESFLVEEDKKHERHPIFGNIVDEVAYHEKYPTIYHLRKKLVDSTDKADLRLIYLALAHMIKFRGHFLIEGDLNPDNSDVDKLFIQLVQTYNQLFEENPINASGVDAKAILSARLSKSRRLENLIAQLPGEKKNGLFGNLIALSLGLTPNFKSNFDLAEDAKLQLSKDTYDDDLDNLLAQIGDQYADLFLAAKNLSDAILLSDILRVNTEITKAPLSASMIKRYDEHHQDLTLLKALVRQQLPEKYKEIFFDQSKNGYAGYIDGGASQEEFYKFIKPILEKMDGTEELLVKLNREDLLRKQRTFDNGSIPHQIHLGELHAILRRQEDFYPFLKDNREKIEKILTFRIPYYVGPLARGNSRFAWMTRKSEETITPWNFEEVVDKGASAQSFIERMTNFDKNLPNEKVLPKHSLLYEYFTVYNELTKVKYVTEGMRKPAFLSGEQKKAIVDLLFKTNRKVTVKQLKEDYFKKIECFDSVEISGVEDRFNASLGTYHDLLKIIKDKDFLDNEENEDILEDIVLTLTLFEDREMIEERLKTYAHLFDDKVMKQLKRRRYTGWGRLSRKLINGIRDKQSGKTILDFLKSDGFANRNFMQLIHDDSLTFKEDIQKAQVSGQGDSLHEHIANLAGSPAIKKGILQTVKVVDELVKVMGRHKPENIVIEMARENQTTQKGQKNSRERMKRIEEGIKELGSQILKEHPVENTQLQNEKLYLYYLQNGRDMYVDQELDINRLSDYDVDHIVPQSFLKDDSIDNKVLTRSDKARGKSDNVPSEEVVKKMKNYWRQLLNAKLITQRKFDNLTKAERGGLSELDKAGFIKRQLVETRQITKHVAQILDSRMNTKYDENDKLIREVKVITLKSKLVSDFRKDFQFYKVREINNYHHAHDAYLNAVVGTALIKKYPKLESEFVYGDYKVYDVRKMIAKSEQEIGKATAKYFFYSNIMNFFKTEITLANGEIRKRPLIETNGETGEIVWDKGRDFATVRKVLSMPQVNIVKKTEVQTGGFSKESILPKRNSDKLIARKKDWDPKKYGGFDSPTVAYSVLVVAKVEKGKSKKLKSVKELLGITIMERSSFEKNPIDFLEAKGYKEVKKDLIIKLPKYSLFELENGRKRMLASAGELQKGNELALPSKYVNFLYLASHYEKLKGSPEDNEQKQLFVEQHKHYLDEIIEQISEFSKRVILADANLDKVLSAYNKHRDKPIREQAENIIHLFTLTNLGAPAAFKYFDTTIDRKRYTSTKEVLDATLIHQSITGLYETRIDLSQLGGDGGGGGEAAAKGSSGGTLNIEDEYRLHETSKGPDVPLGSTWLSDFPQAWAETGGMGLAVRQAPLIIPLKATSTPVSIKQYPMSQEARLGIKPHIQRLLDQGILVPCQSPWNTPLLPVKKPGTNDYRPVQDLREVNKRVEDIHPTVPNPYNLLSGLPPSHQWYTVLDLKDAFFCLRLHPTSQSLFAFEWRDPEMGISGQLTWTRLPQGFKNSPTLFNEALHRDLADFRIQHPDLILLQYVDDLLLAATSELDCQQGTRALLQTLGDLGYRASAKKAQICQKQVKYLGYLLKEGQRWLTEARKETVMGQPTPKTPRQLREFLGKAGFCRLFIPGFAEMAAPLYPLTKPGTLFEWGPDQQKAYQEIKQALLTAPALGLPDLTKPFELFVDEKQGYAKGVLTQKLGPWRRPVAYLSKKLDPVAAGWPPCLRMVAAIAVLTKDAGKLTMGQPLVILAPHAVEALVKQPPDRWLSNARMTHYQALLLDTDRVQFGPIVALNPATLLPLPEEGLQHDCLDILAEAHGTRPDLTDQPLPDADHTWYTDGSSFLQEGQRKAGAAVTTETEVVWAKALPAGTSAQRAELIALTQALKMAEGKKLNVYTDSRYAFATAHIHGEIYRRRGWLTSEGKEIKNKDEILALLKALFLPKRLSIIHCPGHQKGNRAEARGNRMADQAAREVATRETPETSTLLAGKRTADGSEFEKRTADGSEFESPKKKAKVE

SEQ ID NO: 2577 - protein, 2096 aa, synthetic construct
MPAAKRVKLDGGDKKYSIGLDIGTNSVGWAVITDEYKVPSKKFKVLGNTDRHSIKKNLIGALLFDSGETAEATRLKRTARRRYTRRKNRICYLQEIFSNEMAKVDDSFFHRLEESFLVEEDKKHERHPIFGNIVDEVAYHEKYPTIYHLRKKLVDSTDKADLRLIYLALAHMIKFRGHFLIEGDLNPDNSDVDKLFIQLVQTYNQLFEENPINASGVDAKAILSARLSKSRRLENLIAQLPGEKKNGLFGNLIALSLGLTPNFKSNFDLAEDAKLQLSKDTYDDDLDNLLAQIGDQYADLFLAAKNLSDAILLSDILRVNTEITKAPLSASMIKRYDEHHQDLTLLKALVRQQLPEKYKEIFFDQSKNGYAGYIDGGASQEEFYKFIKPILEKMDGTEELLVKLNREDLLRKQRTFDNGSIPHQIHLGELHAILRRQEDFYPFLKDNREKIEKILTFRIPYYVGPLARGNSRFAWMTRKSEETITPWNFEEVVDKGASAQSFIERMTNFDKNLPNEKVLPKHSLLYEYFTVYNELTKVKYVTEGMRKPAFLSGEQKKAIVDLLFKTNRKVTVKQLKEDYFKKIECFDSVEISGVEDRFNASLGTYHDLLKIIKDKDFLDNEENEDILEDIVLTLTLFEDREMIEERLKTYAHLFDDKVMKQLKRRRYTGWGRLSRKLINGIRDKQSGKTILDFLKSDGFANRNFMQLIHDDSLTFKEDIQKAQVSGQGDSLHEHIANLAGSPAIKKGILQTVKVVDELVKVMGRHKPENIVIEMARENQTTQKGQKNSRERMKRIEEGIKELGSQILKEHPVENTQLQNEKLYLYYLQNGRDMYVDQELDINRLSDYDVDHIVPQSFLKDDSIDNKVLTRSDKARGKSDNVPSEEVVKKMKNYWRQLLNAKLITQRKFDNLTKAERGGLSELDKAGFIKRQLVETRQITKHVAQILDSRMNTKYDENDKLIREVKVITLKSKLVSDFRKDFQFYKVREINNYHHAHDAYLNAVVGTALIKKYPKLESEFVYGDYKVYDVRKMIAKSEQEIGKATAKYFFYSNIMNFFKTEITLANGEIRKRPLIETNGETGEIVWDKGRDFATVRKVLSMPQVNIVKKTEVQTGGFSKESILPKRNSDKLIARKKDWDPKKYGGFDSPTVAYSVLVVAKVEKGKSKKLKSVKELLGITIMERSSFEKNPIDFLEAKGYKEVKKDLIIKLPKYSLFELENGRKRMLASAGELQKGNELALPSKYVNFLYLASHYEKLKGSPEDNEQKQLFVEQHKHYLDEIIEQISEFSKRVILADANLDKVLSAYNKHRDKPIREQAENIIHLFTLTNLGAPAAFKYFDTTIDRKRYTSTKEVLDATLIHQSITGLYETRIDLSQLGGDGGPAPEAAAKGGSGGTLNIEDEYRLHETSKGPDVPLGSTWLSDFPQAWAETGGMGLAVRQAPLIIPLKATSTPVSIKQYPMSQEARLGIKPHIQRLLDQGILVPCQSPWNTPLLPVKKPGTNDYRPVQDLREVNKRVEDIHPTVPNPYNLLSGLPPSHQWYTVLDLKDAFFCLRLHPTSQSLFAFEWRDPEMGISGQLTWTRLPQGFKNSPTLFNEALHRDLADFRIQHPDLILLQYVDDLLLAATSELDCQQGTRALLQTLGDLGYRASAKKAQICQKQVKYLGYLLKEGQRWLTEARKETVMGQPTPKTPRQLREFLGKAGFCRLFIPGFAEMAAPLYPLTKPGTLFEWGPDQQKAYQEIKQALLTAPALGLPDLTKPFELFVDEKQGYAKGVLTQKLGPWRRPVAYLSKKLDPVAAGWPPCLRMVAAIAVLTKDAGKLTMGQPLVILAPHAVEALVKQPPDRWLSNARMTHYQALLLDTDRVQFGPIVALNPATLLPLPEEGLQHDCLDILAEAHGTRPDLTDQPLPDADHTWYTDGSSFLQEGQRKAGAAVTTETEVVWAKALPAGTSAQRAELIALTQALKMAEGKKLNVYTDSRYAFATAHIHGEIYRRRGWLTSEGKEIKNKDEILALLKALFLPKRLSIIHCPGHQKGNRAEARGNRMADQAAREVATRETPETSTLLAGKRTADGSEFEKRTADGSEFESPKKKAKVE

SEQ ID NO: 2578 - protein, 2096 aa, synthetic construct
MPAAKRVKLDGGDKKYSIGLDIGTNSVGWAVITDEYKVPSKKFKVLGNTDRHSIKKNLIGALLFDSGETAEATRLKRTARRRYTRRKNRICYLQEIFSNEMAKVDDSFFHRLEESFLVEEDKKHERHPIFGNIVDEVAYHEKYPTIYHLRKKLVDSTDKADLRLIYLALAHMIKFRGHFLIEGDLNPDNSDVDKLFIQLVQTYNQLFEENPINASGVDAKAILSARLSKSRRLENLIAQLPGEKKNGLFGNLIALSLGLTPNFKSNFDLAEDAKLQLSKDTYDDDLDNLLAQIGDQYADLFLAAKNLSDAILLSDILRVNTEITKAPLSASMIKRYDEHHQDLTLLKALVRQQLPEKYKEIFFDQSKNGYAGYIDGGASQEEFYKFIKPILEKMDGTEELLVKLNREDLLRKQRTFDNGSIPHQIHLGELHAILRRQEDFYPFLKDNREKIEKILTFRIPYYVGPLARGNSRFAWMTRKSEETITPWNFEEVVDKGASAQSFIERMTNFDKNLPNEKVLPKHSLLYEYFTVYNELTKVKYVTEGMRKPAFLSGEQKKAIVDLLFKTNRKVTVKQLKEDYFKKIECFDSVEISGVEDRFNASLGTYHDLLKIIKDKDFLDNEENEDILEDIVLTLTLFEDREMIEERLKTYAHLFDDKVMKQLKRRRYTGWGRLSRKLINGIRDKQSGKTILDFLKSDGFANRNFMQLIHDDSLTFKEDIQKAQVSGQGDSLHEHIANLAGSPAIKKGILQTVKVVDELVKVMGRHKPENIVIEMARENQTTQKGQKNSRERMKRIEEGIKELGSQILKEHPVENTQLQNEKLYLYYLQNGRDMYVDQELDINRLSDYDVDHIVPQSFLKDDSIDNKVLTRSDKARGKSDNVPSEEVVKKMKNYWRQLLNAKLITQRKFDNLTKAERGGLSELDKAGFIKRQLVETRQITKHVAQILDSRMNTKYDENDKLIREVKVITLKSKLVSDFRKDFQFYKVREINNYHHAHDAYLNAVVGTALIKKYPKLESEFVYGDYKVYDVRKMIAKSEQEIGKATAKYFFYSNIMNFFKTEITLANGEIRKRPLIETNGETGEIVWDKGRDFATVRKVLSMPQVNIVKKTEVQTGGFSKESILPKRNSDKLIARKKDWDPKKYGGFDSPTVAYSVLVVAKVEKGKSKKLKSVKELLGITIMERSSFEKNPIDFLEAKGYKEVKKDLIIKLPKYSLFELENGRKRMLASAGELQKGNELALPSKYVNFLYLASHYEKLKGSPEDNEQKQLFVEQHKHYLDEIIEQISEFSKRVILADANLDKVLSAYNKHRDKPIREQAENIIHLFTLTNLGAPAAFKYFDTTIDRKRYTSTKEVLDATLIHQSITGLYETRIDLSQLGGDGGGGSEAAAKGGGGGTLNIEDEYRLHETSKGPDVPLGSTWLSDFPQAWAETGGMGLAVRQAPLIIPLKATSTPVSIKQYPMSQEARLGIKPHIQRLLDQGILVPCQSPWNTPLLPVKKPGTNDYRPVQDLREVNKRVEDIHPTVPNPYNLLSGLPPSHQWYTVLDLKDAFFCLRLHPTSQSLFAFEWRDPEMGISGQLTWTRLPQGFKNSPTLFNEALHRDLADFRIQHPDLILLQYVDDLLLAATSELDCQQGTRALLQTLGDLGYRASAKKAQICQKQVKYLGYLLKEGQRWLTEARKETVMGQPTPKTPRQLREFLGKAGFCRLFIPGFAEMAAPLYPLTKPGTLFEWGPDQQKAYQEIKQALLTAPALGLPDLTKPFELFVDEKQGYAKGVLTQKLGPWRRPVAYLSKKLDPVAAGWPPCLRMVAAIAVLTKDAGKLTMGQPLVILAPHAVEALVKQPPDRWLSNARMTHYQALLLDTDRVQFGPIVALNPATLLPLPEEGLQHDCLDILAEAHGTRPDLTDQPLPDADHTWYTDGSSFLQEGQRKAGAAVTTETEVVWAKALPAGTSAQRAELIALTQALKMAEGKKLNVYTDSRYAFATAHIHGEIYRRRGWLTSEGKEIKNKDEILALLKALFLPKRLSIIHCPGHQKGNRAEARGNRMADQAAREVATRETPETSTLLAGKRTADGSEFEKRTADGSEFESPKKKAKVE

SEQ ID NO: 2579 - protein, 2090 aa, synthetic construct
MPAAKRVKLDGGDKKYSIGLDIGTNSVGWAVITDEYKVPSKKFKVLGNTDRHSIKKNLIGALLFDSGETAEATRLKRTARRRYTRRKNRICYLQEIFSNEMAKVDDSFFHRLEESFLVEEDKKHERHPIFGNIVDEVAYHEKYPTIYHLRKKLVDSTDKADLRLIYLALAHMIKFRGHFLIEGDLNPDNSDVDKLFIQLVQTYNQLFEENPINASGVDAKAILSARLSKSRRLENLIAQLPGEKKNGLFGNLIALSLGLTPNFKSNFDLAEDAKLQLSKDTYDDDLDNLLAQIGDQYADLFLAAKNLSDAILLSDILRVNTEITKAPLSASMIKRYDEHHQDLTLLKALVRQQLPEKYKEIFFDQSKNGYAGYIDGGASQEEFYKFIKPILEKMDGTEELLVKLNREDLLRKQRTFDNGSIPHQIHLGELHAILRRQEDFYPFLKDNREKIEKILTFRIPYYVGPLARGNSRFAWMTRKSEETITPWNFEEVVDKGASAQSFIERMTNFDKNLPNEKVLPKHSLLYEYFTVYNELTKVKYVTEGMRKPAFLSGEQKKAIVDLLFKTNRKVTVKQLKEDYFKKIECFDSVEISGVEDRFNASLGTYHDLLKIIKDKDFLDNEENEDILEDIVLTLTLFEDREMIEERLKTYAHLFDDKVMKQLKRRRYTGWGRLSRKLINGIRDKQSGKTILDFLKSDGFANRNFMQLIHDDSLTFKEDIQKAQVSGQGDSLHEHIANLAGSPAIKKGILQTVKVVDELVKVMGRHKPENIVIEMARENQTTQKGQKNSRERMKRIEEGIKELGSQILKEHPVENTQLQNEKLYLYYLQNGRDMYVDQELDINRLSDYDVDHIVPQSFLKDDSIDNKVLTRSDKARGKSDNVPSEEVVKKMKNYWRQLLNAKLITQRKFDNLTKAERGGLSELDKAGFIKRQLVETRQITKHVAQILDSRMNTKYDENDKLIREVKVITLKSKLVSDFRKDFQFYKVREINNYHHAHDAYLNAVVGTALIKKYPKLESEFVYGDYKVYDVRKMIAKSEQEIGKATAKYFFYSNIMNFFKTEITLANGEIRKRPLIETNGETGEIVWDKGRDFATVRKVLSMPQVNIVKKTEVQTGGFSKESILPKRNSDKLIARKKDWDPKKYGGFDSPTVAYSVLVVAKVEKGKSKKLKSVKELLGITIMERSSFEKNPIDFLEAKGYKEVKKDLIIKLPKYSLFELENGRKRMLASAGELQKGNELALPSKYVNFLYLASHYEKLKGSPEDNEQKQLFVEQHKHYLDEIIEQISEFSKRVILADANLDKVLSAYNKHRDKPIREQAENIIHLFTLTNLGAPAAFKYFDTTIDRKRYTSTKEVLDATLIHQSITGLYETRIDLSQLGGDGGGGGGGGGTLNIEDEYRLHETSKGPDVPLGSTWLSDFPQAWAETGGMGLAVRQAPLIIPLKATSTPVSIKQYPMSQEARLGIKPHIQRLLDQGILVPCQSPWNTPLLPVKKPGTNDYRPVQDLREVNKRVEDIHPTVPNPYNLLSGLPPSHQWYTVLDLKDAFFCLRLHPTSQSLFAFEWRDPEMGISGQLTWTRLPQGFKNSPTLFNEALHRDLADFRIQHPDLILLQYVDDLLLAATSELDCQQGTRALLQTLGDLGYRASAKKAQICQKQVKYLGYLLKEGQRWLTEARKETVMGQPTPKTPRQLREFLGKAGFCRLFIPGFAEMAAPLYPLTKPGTLFEWGPDQQKAYQEIKQALLTAPALGLPDLTKPFELFVDEKQGYAKGVLTQKLGPWRRPVAYLSKKLDPVAAGWPPCLRMVAAIAVLTKDAGKLTMGQPLVILAPHAVEALVKQPPDRWLSNARMTHYQALLLDTDRVQFGPIVALNPATLLPLPEEGLQHDCLDILAEAHGTRPDLTDQPLPDADHTWYTDGSSFLQEGQRKAGAAVTTETEVVWAKALPAGTSAQRAELIALTQALKMAEGKKLNVYTDSRYAFATAHIHGEIYRRRGWLTSEGKEIKNKDEILALLKALFLPKRLSIIHCPGHQKGNRAEARGNRMADQAAREVATRETPETSTLLAGKRTADGSEFEKRTADGSEFESPKKKAKVE

SEQ ID NO: 2580 - protein, 2094 aa, synthetic construct
MPAAKRVKLDGGDKKYSIGLDIGTNSVGWAVITDEYKVPSKKFKVLGNTDRHSIKKNLIGALLFDSGETAEATRLKRTARRRYTRRKNRICYLQEIFSNEMAKVDDSFFHRLEESFLVEEDKKHERHPIFGNIVDEVAYHEKYPTIYHLRKKLVDSTDKADLRLIYLALAHMIKFRGHFLIEGDLNPDNSDVDKLFIQLVQTYNQLFEENPINASGVDAKAILSARLSKSRRLENLIAQLPGEKKNGLFGNLIALSLGLTPNFKSNFDLAEDAKLQLSKDTYDDDLDNLLAQIGDQYADLFLAAKNLSDAILLSDILRVNTEITKAPLSASMIKRYDEHHQDLTLLKALVRQQLPEKYKEIFFDQSKNGYAGYIDGGASQEEFYKFIKPILEKMDGTEELLVKLNREDLLRKQRTFDNGSIPHQIHLGELHAILRRQEDFYPFLKDNREKIEKILTFRIPYYVGPLARGNSRFAWMTRKSEETITPWNFEEVVDKGASAQSFIERMTNFDKNLPNEKVLPKHSLLYEYFTVYNELTKVKYVTEGMRKPAFLSGEQKKAIVDLLFKTNRKVTVKQLKEDYFKKIECFDSVEISGVEDRFNASLGTYHDLLKIIKDKDFLDNEENEDILEDIVLTLTLFEDREMIEERLKTYAHLFDDKVMKQLKRRRYTGWGRLSRKLINGIRDKQSGKTILDFLKSDGFANRNFMQLIHDDSLTFKEDIQKAQVSGQGDSLHEHIANLAGSPAIKKGILQTVKVVDELVKVMGRHKPENIVIEMARENQTTQKGQKNSRERMKRIEEGIKELGSQILKEHPVENTQLQNEKLYLYYLQNGRDMYVDQELDINRLSDYDVDHIVPQSFLKDDSIDNKVLTRSDKARGKSDNVPSEEVVKKMKNYWRQLLNAKLITQRKFDNLTKAERGGLSELDKAGFIKRQLVETRQITKHVAQILDSRMNTKYDENDKLIREVKVITLKSKLVSDFRKDFQFYKVREINNYHHAHDAYLNAVVGTALIKKYPKLESEFVYGDYKVYDVRKMIAKSEQEIGKATAKYFFYSNIMNFFKTEITLANGEIRKRPLIETNGETGEIVWDKGRDFATVRKVLSMPQVNIVKKTEVQTGGFSKESILPKRNSDKLIARKKDWDPKKYGGFDSPTVAYSVLVVAKVEKGKSKKLKSVKELLGITIMERSSFEKNPIDFLEAKGYKEVKKDLIIKLPKYSLFELENGRKRMLASAGELQKGNELALPSKYVNFLYLASHYEKLKGSPEDNEQKQLFVEQHKHYLDEIIEQISEFSKRVILADANLDKVLSAYNKHRDKPIREQAENIIHLFTLTNLGAPAAFKYFDTTIDRKRYTSTKEVLDATLIHQSITGLYETRIDLSQLGGDGGGSSPAPGGGGGTLNIEDEYRLHETSKGPDVPLGSTWLSDFPQAWAETGGMGLAVRQAPLIIPLKATSTPVSIKQYPMSQEARLGIKPHIQRLLDQGILVPCQSPWNTPLLPVKKPGTNDYRPVQDLREVNKRVEDIHPTVPNPYNLLSGLPPSHQWYTVLDLKDAFFCLRLHPTSQSLFAFEWRDPEMGISGQLTWTRLPQGFKNSPTLFNEALHRDLADFRIQHPDLILLQYVDDLLLAATSELDCQQGTRALLQTLGDLGYRASAKKAQICQKQVKYLGYLLKEGQRWLTEARKETVMGQPTPKTPRQLREFLGKAGFCRLFIPGFAEMAAPLYPLTKPGTLFEWGPDQQKAYQEIKQALLTAPALGLPDLTKPFELFVDEKQGYAKGVLTQKLGPWRRPVAYLSKKLDPVAAGWPPCLRMVAAIAVLTKDAGKLTMGQPLVILAPHAVEALVKQPPDRWLSNARMTHYQALLLDTDRVQFGPIVALNPATLLPLPEEGLQHDCLDILAEAHGTRPDLTDQPLPDADHTWYTDGSSFLQEGQRKAGAAVTTETEVVWAKALPAGTSAQRAELIALTQALKMAEGKKLNVYTDSRYAFATAHIHGEIYRRRGWLTSEGKEIKNKDEILALLKALFLPKRLSIIHCPGHQKGNRAEARGNRMADQAAREVATRETPETSTLLAGKRTADGSEFEKRTADGSEFESPKKKAKVE

SEQ ID NO: 2581 - protein, 2094 aa, synthetic construct
MPAAKRVKLDGGDKKYSIGLDIGTNSVGWAVITDEYKVPSKKFKVLGNTDRHSIKKNLIGALLFDSGETAEATRLKRTARRRYTRRKNRICYLQEIFSNEMAKVDDSFFHRLEESFLVEEDKKHERHPIFGNIVDEVAYHEKYPTIYHLRKKLVDSTDKADLRLIYLALAHMIKFRGHFLIEGDLNPDNSDVDKLFIQLVQTYNQLFEENPINASGVDAKAILSARLSKSRRLENLIAQLPGEKKNGLFGNLIALSLGLTPNFKSNFDLAEDAKLQLSKDTYDDDLDNLLAQIGDQYADLFLAAKNLSDAILLSDILRVNTEITKAPLSASMIKRYDEHHQDLTLLKALVRQQLPEKYKEIFFDQSKNGYAGYIDGGASQEEFYKFIKPILEKMDGTEELLVKLNREDLLRKQRTFDNGSIPHQIHLGELHAILRRQEDFYPFLKDNREKIEKILTFRIPYYVGPLARGNSRFAWMTRKSEETITPWNFEEVVDKGASAQSFIERMTNFDKNLPNEKVLPKHSLLYEYFTVYNELTKVKYVTEGMRKPAFLSGEQKKAIVDLLFKTNRKVTVKQLKEDYFKKIECFDSVEISGVEDRFNASLGTYHDLLKIIKDKDFLDNEENEDILEDIVLTLTLFEDREMIEERLKTYAHLFDDKVMKQLKRRRYTGWGRLSRKLINGIRDKQSGKTILDFLKSDGFANRNFMQLIHDDSLTFKEDIQKAQVSGQGDSLHEHIANLAGSPAIKKGILQTVKVVDELVKVMGRHKPENIVIEMARENQTTQKGQKNSRERMKRIEEGIKELGSQILKEHPVENTQLQNEKLYLYYLQNGRDMYVDQELDINRLSDYDVDHIVPQSFLKDDSIDNKVLTRSDKARGKSDNVPSEEVVKKMKNYWRQLLNAKLITQRKFDNLTKAERGGLSELDKAGFIKRQLVETRQITKHVAQILDSRMNTKYDENDKLIREVKVITLKSKLVSDFRKDFQFYKVREINNYHHAHDAYLNAVVGTALIKKYPKLESEFVYGDYKVYDVRKMIAKSEQEIGKATAKYFFYSNIMNFFKTEITLANGEIRKRPLIETNGETGEIVWDKGRDFATVRKVLSMPQVNIVKKTEVQTGGFSKESILPKRNSDKLIARKKDWDPKKYGGFDSPTVAYSVLVVAKVEKGKSKKLKSVKELLGITIMERSSFEKNPIDFLEAKGYKEVKKDLIIKLPKYSLFELENGRKRMLASAGELQKGNELALPSKYVNFLYLASHYEKLKGSPEDNEQKQLFVEQHKHYLDEIIEQISEFSKRVILADANLDKVLSAYNKHRDKPIREQAENIIHLFTLTNLGAPAAFKYFDTTIDRKRYTSTKEVLDATLIHQSITGLYETRIDLSQLGGDGGPAPGSSGGSGGTLNIEDEYRLHETSKGPDVPLGSTWLSDFPQAWAETGGMGLAVRQAPLIIPLKATSTPVSIKQYPMSQEARLGIKPHIQRLLDQGILVPCQSPWNTPLLPVKKPGTNDYRPVQDLREVNKRVEDIHPTVPNPYNLLSGLPPSHQWYTVLDLKDAFFCLRLHPTSQSLFAFEWRDPEMGISGQLTWTRLPQGFKNSPTLFNEALHRDLADFRIQHPDLILLQYVDDLLLAATSELDCQQGTRALLQTLGDLGYRASAKKAQICQKQVKYLGYLLKEGQRWLTEARKETVMGQPTPKTPRQLREFLGKAGFCRLFIPGFAEMAAPLYPLTKPGTLFEWGPDQQKAYQEIKQALLTAPALGLPDLTKPFELFVDEKQGYAKGVLTQKLGPWRRPVAYLSKKLDPVAAGWPPCLRMVAAIAVLTKDAGKLTMGQPLVILAPHAVEALVKQPPDRWLSNARMTHYQALLLDTDRVQFGPIVALNPATLLPLPEEGLQHDCLDILAEAHGTRPDLTDQPLPDADHTWYTDGSSFLQEGQRKAGAAVTTETEVVWAKALPAGTSAQRAELIALTQALKMAEGKKLNVYTDSRYAFATAHIHGEIYRRRGWLTSEGKEIKNKDEILALLKALFLPKRLSIIHCPGHQKGNRAEARGNRMADQAAREVATRETPETSTLLAGKRTADGSEFEKRTADGSEFESPKKKAKVE

SEQ ID NO: 2582 - protein, 2096 aa, synthetic construct
MPAAKRVKLDGGDKKYSIGLDIGTNSVGWAVITDEYKVPSKKFKVLGNTDRHSIKKNLIGALLFDSGETAEATRLKRTARRRYTRRKNRICYLQEIFSNEMAKVDDSFFHRLEESFLVEEDKKHERHPIFGNIVDEVAYHEKYPTIYHLRKKLVDSTDKADLRLIYLALAHMIKFRGHFLIEGDLNPDNSDVDKLFIQLVQTYNQLFEENPINASGVDAKAILSARLSKSRRLENLIAQLPGEKKNGLFGNLIALSLGLTPNFKSNFDLAEDAKLQLSKDTYDDDLDNLLAQIGDQYADLFLAAKNLSDAILLSDILRVNTEITKAPLSASMIKRYDEHHQDLTLLKALVRQQLPEKYKEIFFDQSKNGYAGYIDGGASQEEFYKFIKPILEKMDGTEELLVKLNREDLLRKQRTFDNGSIPHQIHLGELHAILRRQEDFYPFLKDNREKIEKILTFRIPYYVGPLARGNSRFAWMTRKSEETITPWNFEEVVDKGASAQSFIERMTNFDKNLPNEKVLPKHSLLYEYFTVYNELTKVKYVTEGMRKPAFLSGEQKKAIVDLLFKTNRKVTVKQLKEDYFKKIECFDSVEISGVEDRFNASLGTYHDLLKIIKDKDFLDNEENEDILEDIVLTLTLFEDREMIEERLKTYAHLFDDKVMKQLKRRRYTGWGRLSRKLINGIRDKQSGKTILDFLKSDGFANRNFMQLIHDDSLTFKEDIQKAQVSGQGDSLHEHIANLAGSPAIKKGILQTVKVVDELVKVMGRHKPENIVIEMARENQTTQKGQKNSRERMKRIEEGIKELGSQILKEHPVENTQLQNEKLYLYYLQNGRDMYVDQELDINRLSDYDVDHIVPQSFLKDDSIDNKVLTRSDKARGKSDNVPSEEVVKKMKNYWRQLLNAKLITQRKFDNLTKAERGGLSELDKAGFIKRQLVETRQITKHVAQILDSRMNTKYDENDKLIREVKVITLKSKLVSDFRKDFQFYKVREINNYHHAHDAYLNAVVGTALIKKYPKLESEFVYGDYKVYDVRKMIAKSEQEIGKATAKYFFYSNIMNFFKTEITLANGEIRKRPLIETNGETGEIVWDKGRDFATVRKVLSMPQVNIVKKTEVQTGGFSKESILPKRNSDKLIARKKDWDPKKYGGFDSPTVAYSVLVVAKVEKGKSKKLKSVKELLGITIMERSSFEKNPIDFLEAKGYKEVKKDLIIKLPKYSLFELENGRKRMLASAGELQKGNELALPSKYVNFLYLASHYEKLKGSPEDNEQKQLFVEQHKHYLDEIIEQISEFSKRVILADANLDKVLSAYNKHRDKPIREQAENIIHLFTLTNLGAPAAFKYFDTTIDRKRYTSTKEVLDATLIHQSITGLYETRIDLSQLGGDGGEAAAKGGGGGSGGTLNIEDEYRLHETSKGPDVPLGSTWLSDFPQAWAETGGMGLAVRQAPLIIPLKATSTPVSIKQYPMSQEARLGIKPHIQRLLDQGILVPCQSPWNTPLLPVKKPGTNDYRPVQDLREVNKRVEDIHPTVPNPYNLLSGLPPSHQWYTVLDLKDAFFCLRLHPTSQSLFAFEWRDPEMGISGQLTWTRLPQGFKNSPTLFNEALHRDLADFRIQHPDLILLQYVDDLLLAATSELDCQQGTRALLQTLGDLGYRASAKKAQICQKQVKYLGYLLKEGQRWLTEARKETVMGQPTPKTPRQLREFLGKAGFCRLFIPGFAEMAAPLYPLTKPGTLFEWGPDQQKAYQEIKQALLTAPALGLPDLTKPFELFVDEKQGYAKGVLTQKLGPWRRPVAYLSKKLDPVAAGWPPCLRMVAAIAVLTKDAGKLTMGQPLVILAPHAVEALVKQPPDRWLSNARMTHYQALLLDTDRVQFGPIVALNPATLLPLPEEGLQHDCLDILAEAHGTRPDLTDQPLPDADHTWYTDGSSFLQEGQRKAGAAVTTETEVVWAKALPAGTSAQRAELIALTQALKMAEGKKLNVYTDSRYAFATAHIHGEIYRRRGWLTSEGKEIKNKDEILALLKALFLPKRLSIIHCPGHQKGNRAEARGNRMADQAAREVATRETPETSTLLAGKRTADGSEFEKRTADGSEFESPKKKAKVE

SEQ ID NO: 2583 - protein, 2097 aa, synthetic construct
MPAAKRVKLDGGDKKYSIGLDIGTNSVGWAVITDEYKVPSKKFKVLGNTDRHSIKKNLIGALLFDSGETAEATRLKRTARRRYTRRKNRICYLQEIFSNEMAKVDDSFFHRLEESFLVEEDKKHERHPIFGNIVDEVAYHEKYPTIYHLRKKLVDSTDKADLRLIYLALAHMIKFRGHFLIEGDLNPDNSDVDKLFIQLVQTYNQLFEENPINASGVDAKAILSARLSKSRRLENLIAQLPGEKKNGLFGNLIALSLGLTPNFKSNFDLAEDAKLQLSKDTYDDDLDNLLAQIGDQYADLFLAAKNLSDAILLSDILRVNTEITKAPLSASMIKRYDEHHQDLTLLKALVRQQLPEKYKEIFFDQSKNGYAGYIDGGASQEEFYKFIKPILEKMDGTEELLVKLNREDLLRKQRTFDNGSIPHQIHLGELHAILRRQEDFYPFLKDNREKIEKILTFRIPYYVGPLARGNSRFAWMTRKSEETITPWNFEEVVDKGASAQSFIERMTNFDKNLPNEKVLPKHSLLYEYFTVYNELTKVKYVTEGMRKPAFLSGEQKKAIVDLLFKTNRKVTVKQLKEDYFKKIECFDSVEISGVEDRFNASLGTYHDLLKIIKDKDFLDNEENEDILEDIVLTLTLFEDREMIEERLKTYAHLFDDKVMKQLKRRRYTGWGRLSRKLINGIRDKQSGKTILDFLKSDGFANRNFMQLIHDDSLTFKEDIQKAQVSGQGDSLHEHIANLAGSPAIKKGILQTVKVVDELVKVMGRHKPENIVIEMARENQTTQKGQKNSRERMKRIEEGIKELGSQILKEHPVENTQLQNEKLYLYYLQNGRDMYVDQELDINRLSDYDVDHIVPQSFLKDDSIDNKVLTRSDKARGKSDNVPSEEVVKKMKNYWRQLLNAKLITQRKFDNLTKAERGGLSELDKAGFIKRQLVETRQITKHVAQILDSRMNTKYDENDKLIREVKVITLKSKLVSDFRKDFQFYKVREINNYHHAHDAYLNAVVGTALIKKYPKLESEFVYGDYKVYDVRKMIAKSEQEIGKATAKYFFYSNIMNFFKTEITLANGEIRKRPLIETNGETGEIVWDKGRDFATVRKVLSMPQVNIVKKTEVQTGGFSKESILPKRNSDKLIARKKDWDPKKYGGFDSPTVAYSVLVVAKVEKGKSKKLKSVKELLGITIMERSSFEKNPIDFLEAKGYKEVKKDLIIKLPKYSLFELENGRKRMLASAGELQKGNELALPSKYVNFLYLASHYEKLKGSPEDNEQKQLFVEQHKHYLDEIIEQISEFSKRVILADANLDKVLSAYNKHRDKPIREQAENIIHLFTLTNLGAPAAFKYFDTTIDRKRYTSTKEVLDATLIHQSITGLYETRIDLSQLGGDGGGSAGSAAGSGEFGGTLNIEDEYRLHETSKGPDVPLGSTWLSDFPQAWAETGGMGLAVRQAPLIIPLKATSTPVSIKQYPMSQEARLGIKPHIQRLLDQGILVPCQSPWNTPLLPVKKPGTNDYRPVQDLREVNKRVEDIHPTVPNPYNLLSGLPPSHQWYTVLDLKDAFFCLRLHPTSQSLFAFEWRDPEMGISGQLTWTRLPQGFKNSPTLFNEALHRDLADFRIQHPDLILLQYVDDLLLAATSELDCQQGTRALLQTLGDLGYRASAKKAQICQKQVKYLGYLLKEGQRWLTEARKETVMGQPTPKTPRQLREFLGKAGFCRLFIPGFAEMAAPLYPLTKPGTLFEWGPDQQKAYQEIKQALLTAPALGLPDLTKPFELFVDEKQGYAKGVLTQKLGPWRRPVAYLSKKLDPVAAGWPPCLRMVAAIAVLTKDAGKLTMGQPLVILAPHAVEALVKQPPDRWLSNARMTHYQALLLDTDRVQFGPIVALNPATLLPLPEEGLQHDCLDILAEAHGTRPDLTDQPLPDADHTWYTDGSSFLQEGQRKAGAAVTTETEVVWAKALPAGTSAQRAELIALTQALKMAEGKKLNVYTDSRYAFATAHIHGEIYRRRGWLTSEGKEIKNKDEILALLKALFLPKRLSIIHCPGHQKGNRAEARGNRMADQAAREVATRETPETSTLLAGKRTADGSEFEKRTADGSEFESPKKKAKVE

SEQ ID NO: 2584 - protein, 2093 aa, synthetic construct
MPAAKRVKLDGGDKKYSIGLDIGTNSVGWAVITDEYKVPSKKFKVLGNTDRHSIKKNLIGALLFDSGETAEATRLKRTARRRYTRRKNRICYLQEIFSNEMAKVDDSFFHRLEESFLVEEDKKHERHPIFGNIVDEVAYHEKYPTIYHLRKKLVDSTDKADLRLIYLALAHMIKFRGHFLIEGDLNPDNSDVDKLFIQLVQTYNQLFEENPINASGVDAKAILSARLSKSRRLENLIAQLPGEKKNGLFGNLIALSLGLTPNFKSNFDLAEDAKLQLSKDTYDDDLDNLLAQIGDQYADLFLAAKNLSDAILLSDILRVNTEITKAPLSASMIKRYDEHHQDLTLLKALVRQQLPEKYKEIFFDQSKNGYAGYIDGGASQEEFYKFIKPILEKMDGTEELLVKLNREDLLRKQRTFDNGSIPHQIHLGELHAILRRQEDFYPFLKDNREKIEKILTFRIPYYVGPLARGNSRFAWMTRKSEETITPWNFEEVVDKGASAQSFIERMTNFDKNLPNEKVLPKHSLLYEYFTVYNELTKVKYVTEGMRKPAFLSGEQKKAIVDLLFKTNRKVTVKQLKEDYFKKIECFDSVEISGVEDRFNASLGTYHDLLKIIKDKDFLDNEENEDILEDIVLTLTLFEDREMIEERLKTYAHLFDDKVMKQLKRRRYTGWGRLSRKLINGIRDKQSGKTILDFLKSDGFANRNFMQLIHDDSLTFKEDIQKAQVSGQGDSLHEHIANLAGSPAIKKGILQTVKVVDELVKVMGRHKPENIVIEMARENQTTQKGQKNSRERMKRIEEGIKELGSQILKEHPVENTQLQNEKLYLYYLQNGRDMYVDQELDINRLSDYDVDHIVPQSFLKDDSIDNKVLTRSDKARGKSDNVPSEEVVKKMKNYWRQLLNAKLITQRKFDNLTKAERGGLSELDKAGFIKRQLVETRQITKHVAQILDSRMNTKYDENDKLIREVKVITLKSKLVSDFRKDFQFYKVREINNYHHAHDAYLNAVVGTALIKKYPKLESEFVYGDYKVYDVRKMIAKSEQEIGKATAKYFFYSNIMNFFKTEITLANGEIRKRPLIETNGETGEIVWDKGRDFATVRKVLSMPQVNIVKKTEVQTGGFSKESILPKRNSDKLIARKKDWDPKKYGGFDSPTVAYSVLVVAKVEKGKSKKLKSVKELLGITIMERSSFEKNPIDFLEAKGYKEVKKDLIIKLPKYSLFELENGRKRMLASAGELQKGNELALPSKYVNFLYLASHYEKLKGSPEDNEQKQLFVEQHKHYLDEIIEQISEFSKRVILADANLDKVLSAYNKHRDKPIREQAENIIHLFTLTNLGAPAAFKYFDTTIDRKRYTSTKEVLDATLIHQSITGLYETRIDLSQLGGDGGEAAAKGGSGGTLNIEDEYRLHETSKGPDVPLGSTWLSDFPQAWAETGGMGLAVRQAPLIIPLKATSTPVSIKQYPMSQEARLGIKPHIQRLLDQGILVPCQSPWNTPLLPVKKPGTNDYRPVQDLREVNKRVEDIHPTVPNPYNLLSGLPPSHQWYTVLDLKDAFFCLRLHPTSQSLFAFEWRDPEMGISGQLTWTRLPQGFKNSPTLFNEALHRDLADFRIQHPDLILLQYVDDLLLAATSELDCQQGTRALLQTLGDLGYRASAKKAQICQKQVKYLGYLLKEGQRWLTEARKETVMGQPTPKTPRQLREFLGKAGFCRLFIPGFAEMAAPLYPLTKPGTLFEWGPDQQKAYQEIKQALLTAPALGLPDLTKPFELFVDEKQGYAKGVLTQKLGPWRRPVAYLSKKLDPVAAGWPPCLRMVAAIAVLTKDAGKLTMGQPLVILAPHAVEALVKQPPDRWLSNARMTHYQALLLDTDRVQFGPIVALNPATLLPLPEEGLQHDCLDILAEAHGTRPDLTDQPLPDADHTWYTDGSSFLQEGQRKAGAAVTTETEVVWAKALPAGTSAQRAELIALTQALKMAEGKKLNVYTDSRYAFATAHIHGEIYRRRGWLTSEGKEIKNKDEILALLKALFLPKRLSIIHCPGHQKGNRAEARGNRMADQAAREVATRETPETSTLLAGKRTADGSEFEKRTADGSEFESPKKKAKVE

SEQ ID NO: 2585 - protein, 2093 aa, synthetic construct
MPAAKRVKLDGGDKKYSIGLDIGTNSVGWAVITDEYKVPSKKFKVLGNTDRHSIKKNLIGALLFDSGETAEATRLKRTARRRYTRRKNRICYLQEIFSNEMAKVDDSFFHRLEESFLVEEDKKHERHPIFGNIVDEVAYHEKYPTIYHLRKKLVDSTDKADLRLIYLALAHMIKFRGHFLIEGDLNPDNSDVDKLFIQLVQTYNQLFEENPINASGVDAKAILSARLSKSRRLENLIAQLPGEKKNGLFGNLIALSLGLTPNFKSNFDLAEDAKLQLSKDTYDDDLDNLLAQIGDQYADLFLAAKNLSDAILLSDILRVNTEITKAPLSASMIKRYDEHHQDLTLLKALVRQQLPEKYKEIFFDQSKNGYAGYIDGGASQEEFYKFIKPILEKMDGTEELLVKLNREDLLRKQRTFDNGSIPHQIHLGELHAILRRQEDFYPFLKDNREKIEKILTFRIPYYVGPLARGNSRFAWMTRKSEETITPWNFEEVVDKGASAQSFIERMTNFDKNLPNEKVLPKHSLLYEYFTVYNELTKVKYVTEGMRKPAFLSGEQKKAIVDLLFKTNRKVTVKQLKEDYFKKIECFDSVEISGVEDRFNASLGTYHDLLKIIKDKDFLDNEENEDILEDIVLTLTLFEDREMIEERLKTYAHLFDDKVMKQLKRRRYTGWGRLSRKLINGIRDKQSGKTILDFLKSDGFANRNFMQLIHDDSLTFKEDIQKAQVSGQGDSLHEHIANLAGSPAIKKGILQTVKVVDELVKVMGRHKPENIVIEMARENQTTQKGQKNSRERMKRIEEGIKELGSQILKEHPVENTQLQNEKLYLYYLQNGRDMYVDQELDINRLSDYDVDHIVPQSFLKDDSIDNKVLTRSDKARGKSDNVPSEEVVKKMKNYWRQLLNAKLITQRKFDNLTKAERGGLSELDKAGFIKRQLVETRQITKHVAQILDSRMNTKYDENDKLIREVKVITLKSKLVSDFRKDFQFYKVREINNYHHAHDAYLNAVVGTALIKKYPKLESEFVYGDYKVYDVRKMIAKSEQEIGKATAKYFFYSNIMNFFKTEITLANGEIRKRPLIETNGETGEIVWDKGRDFATVRKVLSMPQVNIVKKTEVQTGGFSKESILPKRNSDKLIARKKDWDPKKYGGFDSPTVAYSVLVVAKVEKGKSKKLKSVKELLGITIMERSSFEKNPIDFLEAKGYKEVKKDLIIKLPKYSLFELENGRKRMLASAGELQKGNELALPSKYVNFLYLASHYEKLKGSPEDNEQKQLFVEQHKHYLDEIIEQISEFSKRVILADANLDKVLSAYNKHRDKPIREQAENIIHLFTLTNLGAPAAFKYFDTTIDRKRYTSTKEVLDATLIHQSITGLYETRIDLSQLGGDGGEAAAKGSSGGTLNIEDEYRLHETSKGPDVPLGSTWLSDFPQAWAETGGMGLAVRQAPLIIPLKATSTPVSIKQYPMSQEARLGIKPHIQRLLDQGILVPCQSPWNTPLLPVKKPGTNDYRPVQDLREVNKRVEDIHPTVPNPYNLLSGLPPSHQWYTVLDLKDAFFCLRLHPTSQSLFAFEWRDPEMGISGQLTWTRLPQGFKNSPTLFNEALHRDLADFRIQHPDLILLQYVDDLLLAATSELDCQQGTRALLQTLGDLGYRASAKKAQICQKQVKYLGYLLKEGQRWLTEARKETVMGQPTPKTPRQLREFLGKAGFCRLFIPGFAEMAAPLYPLTKPGTLFEWGPDQQKAYQEIKQALLTAPALGLPDLTKPFELFVDEKQGYAKGVLTQKLGPWRRPVAYLSKKLDPVAAGWPPCLRMVAAIAVLTKDAGKLTMGQPLVILAPHAVEALVKQPPDRWLSNARMTHYQALLLDTDRVQFGPIVALNPATLLPLPEEGLQHDCLDILAEAHGTRPDLTDQPLPDADHTWYTDGSSFLQEGQRKAGAAVTTETEVVWAKALPAGTSAQRAELIALTQALKMAEGKKLNVYTDSRYAFATAHIHGEIYRRRGWLTSEGKEIKNKDEILALLKALFLPKRLSIIHCPGHQKGNRAEARGNRMADQAAREVATRETPETSTLLAGKRTADGSEFEKRTADGSEFESPKKKAKVE

SEQ ID NO: 2586 - protein, 2091 aa, synthetic construct
MPAAKRVKLDGGDKKYSIGLDIGTNSVGWAVITDEYKVPSKKFKVLGNTDRHSIKKNLIGALLFDSGETAEATRLKRTARRRYTRRKNRICYLQEIFSNEMAKVDDSFFHRLEESFLVEEDKKHERHPIFGNIVDEVAYHEKYPTIYHLRKKLVDSTDKADLRLIYLALAHMIKFRGHFLIEGDLNPDNSDVDKLFIQLVQTYNQLFEENPINASGVDAKAILSARLSKSRRLENLIAQLPGEKKNGLFGNLIALSLGLTPNFKSNFDLAEDAKLQLSKDTYDDDLDNLLAQIGDQYADLFLAAKNLSDAILLSDILRVNTEITKAPLSASMIKRYDEHHQDLTLLKALVRQQLPEKYKEIFFDQSKNGYAGYIDGGASQEEFYKFIKPILEKMDGTEELLVKLNREDLLRKQRTFDNGSIPHQIHLGELHAILRRQEDFYPFLKDNREKIEKILTFRIPYYVGPLARGNSRFAWMTRKSEETITPWNFEEVVDKGASAQSFIERMTNFDKNLPNEKVLPKHSLLYEYFTVYNELTKVKYVTEGMRKPAFLSGEQKKAIVDLLFKTNRKVTVKQLKEDYFKKIECFDSVEISGVEDRFNASLGTYHDLLKIIKDKDFLDNEENEDILEDIVLTLTLFEDREMIEERLKTYAHLFDDKVMKQLKRRRYTGWGRLSRKLINGIRDKQSGKTILDFLKSDGFANRNFMQLIHDDSLTFKEDIQKAQVSGQGDSLHEHIANLAGSPAIKKGILQTVKVVDELVKVMGRHKPENIVIEMARENQTTQKGQKNSRERMKRIEEGIKELGSQILKEHPVENTQLQNEKLYLYYLQNGRDMYVDQELDINRLSDYDVDHIVPQSFLKDDSIDNKVLTRSDKARGKSDNVPSEEVVKKMKNYWRQLLNAKLITQRKFDNLTKAERGGLSELDKAGFIKRQLVETRQITKHVAQILDSRMNTKYDENDKLIREVKVITLKSKLVSDFRKDFQFYKVREINNYHHAHDAYLNAVVGTALIKKYPKLESEFVYGDYKVYDVRKMIAKSEQEIGKATAKYFFYSNIMNFFKTEITLANGEIRKRPLIETNGETGEIVWDKGRDFATVRKVLSMPQVNIVKKTEVQTGGFSKESILPKRNSDKLIARKKDWDPKKYGGFDSPTVAYSVLVVAKVEKGKSKKLKSVKELLGITIMERSSFEKNPIDFLEAKGYKEVKKDLIIKLPKYSLFELENGRKRMLASAGELQKGNELALPSKYVNFLYLASHYEKLKGSPEDNEQKQLFVEQHKHYLDEIIEQISEFSKRVILADANLDKVLSAYNKHRDKPIREQAENIIHLFTLTNLGAPAAFKYFDTTIDRKRYTSTKEVLDATLIHQSITGLYETRIDLSQLGGDGGGGGGSSGGTLNIEDEYRLHETSKGPDVPLGSTWLSDFPQAWAETGGMGLAVRQAPLIIPLKATSTPVSIKQYPMSQEARLGIKPHIQRLLDQGILVPCQSPWNTPLLPVKKPGTNDYRPVQDLREVNKRVEDIHPTVPNPYNLLSGLPPSHQWYTVLDLKDAFFCLRLHPTSQSLFAFEWRDPEMGISGQLTWTRLPQGFKNSPTLFNEALHRDLADFRIQHPDLILLQYVDDLLLAATSELDCQQGTRALLQTLGDLGYRASAKKAQICQKQVKYLGYLLKEGQRWLTEARKETVMGQPTPKTPRQLREFLGKAGFCRLFIPGFAEMAAPLYPLTKPGTLFEWGPDQQKAYQEIKQALLTAPALGLPDLTKPFELFVDEKQGYAKGVLTQKLGPWRRPVAYLSKKLDPVAAGWPPCLRMVAAIAVLTKDAGKLTMGQPLVILAPHAVEALVKQPPDRWLSNARMTHYQALLLDTDRVQFGPIVALNPATLLPLPEEGLQHDCLDILAEAHGTRPDLTDQPLPDADHTWYTDGSSFLQEGQRKAGAAVTTETEVVWAKALPAGTSAQRAELIALTQALKMAEGKKLNVYTDSRYAFATAHIHGEIYRRRGWLTSEGKEIKNKDEILALLKALFLPKRLSIIHCPGHQKGNRAEARGNRMADQAAREVATRETPETSTLLAGKRTADGSEFEKRTADGSEFESPKKKAKVE

SEQ ID NO: 2587 - protein, 2093 aa, synthetic construct
MPAAKRVKLDGGDKKYSIGLDIGTNSVGWAVITDEYKVPSKKFKVLGNTDRHSIKKNLIGALLFDSGETAEATRLKRTARRRYTRRKNRICYLQEIFSNEMAKVDDSFFHRLEESFLVEEDKKHERHPIFGNIVDEVAYHEKYPTIYHLRKKLVDSTDKADLRLIYLALAHMIKFRGHFLIEGDLNPDNSDVDKLFIQLVQTYNQLFEENPINASGVDAKAILSARLSKSRRLENLIAQLPGEKKNGLFGNLIALSLGLTPNFKSNFDLAEDAKLQLSKDTYDDDLDNLLAQIGDQYADLFLAAKNLSDAILLSDILRVNTEITKAPLSASMIKRYDEHHQDLTLLKALVRQQLPEKYKEIFFDQSKNGYAGYIDGGASQEEFYKFIKPILEKMDGTEELLVKLNREDLLRKQRTFDNGSIPHQIHLGELHAILRRQEDFYPFLKDNREKIEKILTFRIPYYVGPLARGNSRFAWMTRKSEETITPWNFEEVVDKGASAQSFIERMTNFDKNLPNEKVLPKHSLLYEYFTVYNELTKVKYVTEGMRKPAFLSGEQKKAIVDLLFKTNRKVTVKQLKEDYFKKIECFDSVEISGVEDRFNASLGTYHDLLKIIKDKDFLDNEENEDILEDIVLTLTLFEDREMIEERLKTYAHLFDDKVMKQLKRRRYTGWGRLSRKLINGIRDKQSGKTILDFLKSDGFANRNFMQLIHDDSLTFKEDIQKAQVSGQGDSLHEHIANLAGSPAIKKGILQTVKVVDELVKVMGRHKPENIVIEMARENQTTQKGQKNSRERMKRIEEGIKELGSQILKEHPVENTQLQNEKLYLYYLQNGRDMYVDQELDINRLSDYDVDHIVPQSFLKDDSIDNKVLTRSDKARGKSDNVPSEEVVKKMKNYWRQLLNAKLITQRKFDNLTKAERGGLSELDKAGFIKRQLVETRQITKHVAQILDSRMNTKYDENDKLIREVKVITLKSKLVSDFRKDFQFYKVREINNYHHAHDAYLNAVVGTALIKKYPKLESEFVYGDYKVYDVRKMIAKSEQEIGKATAKYFFYSNIMNFFKTEITLANGEIRKRPLIETNGETGEIVWDKGRDFATVRKVLSMPQVNIVKKTEVQTGGFSKESILPKRNSDKLIARKKDWDPKKYGGFDSPTVAYSVLVVAKVEKGKSKKLKSVKELLGITIMERSSFEKNPIDFLEAKGYKEVKKDLIIKLPKYSLFELENGRKRMLASAGELQKGNELALPSKYVNFLYLASHYEKLKGSPEDNEQKQLFVEQHKHYLDEIIEQISEFSKRVILADANLDKVLSAYNKHRDKPIREQAENIIHLFTLTNLGAPAAFKYFDTTIDRKRYTSTKEVLDATLIHQSITGLYETRIDLSQLGGDGGEAAAKPAPGGTLNIEDEYRLHETSKGPDVPLGSTWLSDFPQAWAETGGMGLAVRQAPLIIPLKATSTPVSIKQYPMSQEARLGIKPHIQRLLDQGILVPCQSPWNTPLLPVKKPGTNDYRPVQDLREVNKRVEDIHPTVPNPYNLLSGLPPSHQWYTVLDLKDAFFCLRLHPTSQSLFAFEWRDPEMGISGQLTWTRLPQGFKNSPTLFNEALHRDLADFRIQHPDLILLQYVDDLLLAATSELDCQQGTRALLQTLGDLGYRASAKKAQICQKQVKYLGYLLKEGQRWLTEARKETVMGQPTPKTPRQLREFLGKAGFCRLFIPGFAEMAAPLYPLTKPGTLFEWGPDQQKAYQEIKQALLTAPALGLPDLTKPFELFVDEKQGYAKGVLTQKLGPWRRPVAYLSKKLDPVAAGWPPCLRMVAAIAVLTKDAGKLTMGQPLVILAPHAVEALVKQPPDRWLSNARMTHYQALLLDTDRVQFGPIVALNPATLLPLPEEGLQHDCLDILAEAHGTRPDLTDQPLPDADHTWYTDGSSFLQEGQRKAGAAVTTETEVVWAKALPAGTSAQRAELIALTQALKMAEGKKLNVYTDSRYAFATAHIHGEIYRRRGWLTSEGKEIKNKDEILALLKALFLPKRLSIIHCPGHQKGNRAEARGNRMADQAAREVATRETPETSTLLAGKRTADGSEFEKRTADGSEFESPKKKAKVE

SEQ ID NO: 2588 - protein, 2094 aa, synthetic construct
MPAAKRVKLDGGDKKYSIGLDIGTNSVGWAVITDEYKVPSKKFKVLGNTDRHSIKKNLIGALLFDSGETAEATRLKRTARRRYTRRKNRICYLQEIFSNEMAKVDDSFFHRLEESFLVEEDKKHERHPIFGNIVDEVAYHEKYPTIYHLRKKLVDSTDKADLRLIYLALAHMIKFRGHFLIEGDLNPDNSDVDKLFIQLVQTYNQLFEENPINASGVDAKAILSARLSKSRRLENLIAQLPGEKKNGLFGNLIALSLGLTPNFKSNFDLAEDAKLQLSKDTYDDDLDNLLAQIGDQYADLFLAAKNLSDAILLSDILRVNTEITKAPLSASMIKRYDEHHQDLTLLKALVRQQLPEKYKEIFFDQSKNGYAGYIDGGASQEEFYKFIKPILEKMDGTEELLVKLNREDLLRKQRTFDNGSIPHQIHLGELHAILRRQEDFYPFLKDNREKIEKILTFRIPYYVGPLARGNSRFAWMTRKSEETITPWNFEEVVDKGASAQSFIERMTNFDKNLPNEKVLPKHSLLYEYFTVYNELTKVKYVTEGMRKPAFLSGEQKKAIVDLLFKTNRKVTVKQLKEDYFKKIECFDSVEISGVEDRFNASLGTYHDLLKIIKDKDFLDNEENEDILEDIVLTLTLFEDREMIEERLKTYAHLFDDKVMKQLKRRRYTGWGRLSRKLINGIRDKQSGKTILDFLKSDGFANRNFMQLIHDDSLTFKEDIQKAQVSGQGDSLHEHIANLAGSPAIKKGILQTVKVVDELVKVMGRHKPENIVIEMARENQTTQKGQKNSRERMKRIEEGIKELGSQILKEHPVENTQLQNEKLYLYYLQNGRDMYVDQELDINRLSDYDVDHIVPQSFLKDDSIDNKVLTRSDKARGKSDNVPSEEVVKKMKNYWRQLLNAKLITQRKFDNLTKAERGGLSELDKAGFIKRQLVETRQITKHVAQILDSRMNTKYDENDKLIREVKVITLKSKLVSDFRKDFQFYKVREINNYHHAHDAYLNAVVGTALIKKYPKLESEFVYGDYKVYDVRKMIAKSEQEIGKATAKYFFYSNIMNFFKTEITLANGEIRKRPLIETNGETGEIVWDKGRDFATVRKVLSMPQVNIVKKTEVQTGGFSKESILPKRNSDKLIARKKDWDPKKYGGFDSPTVAYSVLVVAKVEKGKSKKLKSVKELLGITIMERSSFEKNPIDFLEAKGYKEVKKDLIIKLPKYSLFELENGRKRMLASAGELQKGNELALPSKYVNFLYLASHYEKLKGSPEDNEQKQLFVEQHKHYLDEIIEQISEFSKRVILADANLDKVLSAYNKHRDKPIREQAENIIHLFTLTNLGAPAAFKYFDTTIDRKRYTSTKEVLDATLIHQSITGLYETRIDLSQLGGDGGGGGGGSPAPGGTLNIEDEYRLHETSKGPDVPLGSTWLSDFPQAWAETGGMGLAVRQAPLIIPLKATSTPVSIKQYPMSQEARLGIKPHIQRLLDQGILVPCQSPWNTPLLPVKKPGTNDYRPVQDLREVNKRVEDIHPTVPNPYNLLSGLPPSHQWYTVLDLKDAFFCLRLHPTSQSLFAFEWRDPEMGISGQLTWTRLPQGFKNSPTLFNEALHRDLADFRIQHPDLILLQYVDDLLLAATSELDCQQGTRALLQTLGDLGYRASAKKAQICQKQVKYLGYLLKEGQRWLTEARKETVMGQPTPKTPRQLREFLGKAGFCRLFIPGFAEMAAPLYPLTKPGTLFEWGPDQQKAYQEIKQALLTAPALGLPDLTKPFELFVDEKQGYAKGVLTQKLGPWRRPVAYLSKKLDPVAAGWPPCLRMVAAIAVLTKDAGKLTMGQPLVILAPHAVEALVKQPPDRWLSNARMTHYQALLLDTDRVQFGPIVALNPATLLPLPEEGLQHDCLDILAEAHGTRPDLTDQPLPDADHTWYTDGSSFLQEGQRKAGAAVTTETEVVWAKALPAGTSAQRAELIALTQALKMAEGKKLNVYTDSRYAFATAHIHGEIYRRRGWLTSEGKEIKNKDEILALLKALFLPKRLSIIHCPGHQKGNRAEARGNRMADQAAREVATRETPETSTLLAGKRTADGSEFEKRTADGSEFESPKKKAKVE

SEQ ID NO: 2589 - protein, 2094 aa, synthetic construct
MPAAKRVKLDGGDKKYSIGLDIGTNSVGWAVITDEYKVPSKKFKVLGNTDRHSIKKNLIGALLFDSGETAEATRLKRTARRRYTRRKNRICYLQEIFSNEMAKVDDSFFHRLEESFLVEEDKKHERHPIFGNIVDEVAYHEKYPTIYHLRKKLVDSTDKADLRLIYLALAHMIKFRGHFLIEGDLNPDNSDVDKLFIQLVQTYNQLFEENPINASGVDAKAILSARLSKSRRLENLIAQLPGEKKNGLFGNLIALSLGLTPNFKSNFDLAEDAKLQLSKDTYDDDLDNLLAQIGDQYADLFLAAKNLSDAILLSDILRVNTEITKAPLSASMIKRYDEHHQDLTLLKALVRQQLPEKYKEIFFDQSKNGYAGYIDGGASQEEFYKFIKPILEKMDGTEELLVKLNREDLLRKQRTFDNGSIPHQIHLGELHAILRRQEDFYPFLKDNREKIEKILTFRIPYYVGPLARGNSRFAWMTRKSEETITPWNFEEVVDKGASAQSFIERMTNFDKNLPNEKVLPKHSLLYEYFTVYNELTKVKYVTEGMRKPAFLSGEQKKAIVDLLFKTNRKVTVKQLKEDYFKKIECFDSVEISGVEDRFNASLGTYHDLLKIIKDKDFLDNEENEDILEDIVLTLTLFEDREMIEERLKTYAHLFDDKVMKQLKRRRYTGWGRLSRKLINGIRDKQSGKTILDFLKSDGFANRNFMQLIHDDSLTFKEDIQKAQVSGQGDSLHEHIANLAGSPAIKKGILQTVKVVDELVKVMGRHKPENIVIEMARENQTTQKGQKNSRERMKRIEEGIKELGSQILKEHPVENTQLQNEKLYLYYLQNGRDMYVDQELDINRLSDYDVDHIVPQSFLKDDSIDNKVLTRSDKARGKSDNVPSEEVVKKMKNYWRQLLNAKLITQRKFDNLTKAERGGLSELDKAGFIKRQLVETRQITKHVAQILDSRMNTKYDENDKLIREVKVITLKSKLVSDFRKDFQFYKVREINNYHHAHDAYLNAVVGTALIKKYPKLESEFVYGDYKVYDVRKMIAKSEQEIGKATAKYFFYSNIMNFFKTEITLANGEIRKRPLIETNGETGEIVWDKGRDFATVRKVLSMPQVNIVKKTEVQTGGFSKESILPKRNSDKLIARKKDWDPKKYGGFDSPTVAYSVLVVAKVEKGKSKKLKSVKELLGITIMERSSFEKNPIDFLEAKGYKEVKKDLIIKLPKYSLFELENGRKRMLASAGELQKGNELALPSKYVNFLYLASHYEKLKGSPEDNEQKQLFVEQHKHYLDEIIEQISEFSKRVILADANLDKVLSAYNKHRDKPIREQAENIIHLFTLTNLGAPAAFKYFDTTIDRKRYTSTKEVLDATLIHQSITGLYETRIDLSQLGGDGGGGGGSSPAPGGTLNIEDEYRLHETSKGPDVPLGSTWLSDFPQAWAETGGMGLAVRQAPLIIPLKATSTPVSIKQYPMSQEARLGIKPHIQRLLDQGILVPCQSPWNTPLLPVKKPGTNDYRPVQDLREVNKRVEDIHPTVPNPYNLLSGLPPSHQWYTVLDLKDAFFCLRLHPTSQSLFAFEWRDPEMGISGQLTWTRLPQGFKNSPTLFNEALHRDLADFRIQHPDLILLQYVDDLLLAATSELDCQQGTRALLQTLGDLGYRASAKKAQICQKQVKYLGYLLKEGQRWLTEARKETVMGQPTPKTPRQLREFLGKAGFCRLFIPGFAEMAAPLYPLTKPGTLFEWGPDQQKAYQEIKQALLTAPALGLPDLTKPFELFVDEKQGYAKGVLTQKLGPWRRPVAYLSKKLDPVAAGWPPCLRMVAAIAVLTKDAGKLTMGQPLVILAPHAVEALVKQPPDRWLSNARMTHYQALLLDTDRVQFGPIVALNPATLLPLPEEGLQHDCLDILAEAHGTRPDLTDQPLPDADHTWYTDGSSFLQEGQRKAGAAVTTETEVVWAKALPAGTSAQRAELIALTQALKMAEGKKLNVYTDSRYAFATAHIHGEIYRRRGWLTSEGKEIKNKDEILALLKALFLPKRLSIIHCPGHQKGNRAEARGNRMADQAAREVATRETPETSTLLAGKRTADGSEFEKRTADGSEFESPKKKAKVE

SEQ ID NO: 2590 - protein, 2091 aa, synthetic construct
MPAAKRVKLDGGDKKYSIGLDIGTNSVGWAVITDEYKVPSKKFKVLGNTDRHSIKKNLIGALLFDSGETAEATRLKRTARRRYTRRKNRICYLQEIFSNEMAKVDDSFFHRLEESFLVEEDKKHERHPIFGNIVDEVAYHEKYPTIYHLRKKLVDSTDKADLRLIYLALAHMIKFRGHFLIEGDLNPDNSDVDKLFIQLVQTYNQLFEENPINASGVDAKAILSARLSKSRRLENLIAQLPGEKKNGLFGNLIALSLGLTPNFKSNFDLAEDAKLQLSKDTYDDDLDNLLAQIGDQYADLFLAAKNLSDAILLSDILRVNTEITKAPLSASMIKRYDEHHQDLTLLKALVRQQLPEKYKEIFFDQSKNGYAGYIDGGASQEEFYKFIKPILEKMDGTEELLVKLNREDLLRKQRTFDNGSIPHQIHLGELHAILRRQEDFYPFLKDNREKIEKILTFRIPYYVGPLARGNSRFAWMTRKSEETITPWNFEEVVDKGASAQSFIERMTNFDKNLPNEKVLPKHSLLYEYFTVYNELTKVKYVTEGMRKPAFLSGEQKKAIVDLLFKTNRKVTVKQLKEDYFKKIECFDSVEISGVEDRFNASLGTYHDLLKIIKDKDFLDNEENEDILEDIVLTLTLFEDREMIEERLKTYAHLFDDKVMKQLKRRRYTGWGRLSRKLINGIRDKQSGKTILDFLKSDGFANRNFMQLIHDDSLTFKEDIQKAQVSGQGDSLHEHIANLAGSPAIKKGILQTVKVVDELVKVMGRHKPENIVIEMARENQTTQKGQKNSRERMKRIEEGIKELGSQILKEHPVENTQLQNEKLYLYYLQNGRDMYVDQELDINRLSDYDVDHIVPQSFLKDDSIDNKVLTRSDKARGKSDNVPSEEVVKKMKNYWRQLLNAKLITQRKFDNLTKAERGGLSELDKAGFIKRQLVETRQITKHVAQILDSRMNTKYDENDKLIREVKVITLKSKLVSDFRKDFQFYKVREINNYHHAHDAYLNAVVGTALIKKYPKLESEFVYGDYKVYDVRKMIAKSEQEIGKATAKYFFYSNIMNFFKTEITLANGEIRKRPLIETNGETGEIVWDKGRDFATVRKVLSMPQVNIVKKTEVQTGGFSKESILPKRNSDKLIARKKDWDPKKYGGFDSPTVAYSVLVVAKVEKGKSKKLKSVKELLGITIMERSSFEKNPIDFLEAKGYKEVKKDLIIKLPKYSLFELENGRKRMLASAGELQKGNELALPSKYVNFLYLASHYEKLKGSPEDNEQKQLFVEQHKHYLDEIIEQISEFSKRVILADANLDKVLSAYNKHRDKPIREQAENIIHLFTLTNLGAPAAFKYFDTTIDRKRYTSTKEVLDATLIHQSITGLYETRIDLSQLGGDGGGSSGGSGGTLNIEDEYRLHETSKGPDVPLGSTWLSDFPQAWAETGGMGLAVRQAPLIIPLKATSTPVSIKQYPMSQEARLGIKPHIQRLLDQGILVPCQSPWNTPLLPVKKPGTNDYRPVQDLREVNKRVEDIHPTVPNPYNLLSGLPPSHQWYTVLDLKDAFFCLRLHPTSQSLFAFEWRDPEMGISGQLTWTRLPQGFKNSPTLFNEALHRDLADFRIQHPDLILLQYVDDLLLAATSELDCQQGTRALLQTLGDLGYRASAKKAQICQKQVKYLGYLLKEGQRWLTEARKETVMGQPTPKTPRQLREFLGKAGFCRLFIPGFAEMAAPLYPLTKPGTLFEWGPDQQKAYQEIKQALLTAPALGLPDLTKPFELFVDEKQGYAKGVLTQKLGPWRRPVAYLSKKLDPVAAGWPPCLRMVAAIAVLTKDAGKLTMGQPLVILAPHAVEALVKQPPDRWLSNARMTHYQALLLDTDRVQFGPIVALNPATLLPLPEEGLQHDCLDILAEAHGTRPDLTDQPLPDADHTWYTDGSSFLQEGQRKAGAAVTTETEVVWAKALPAGTSAQRAELIALTQALKMAEGKKLNVYTDSRYAFATAHIHGEIYRRRGWLTSEGKEIKNKDEILALLKALFLPKRLSIIHCPGHQKGNRAEARGNRMADQAAREVATRETPETSTLLAGKRTADGSEFEKRTADGSEFESPKKKAKVE

SEQ ID NO: 2591 - protein, 2094 aa, synthetic construct
MPAAKRVKLDGGDKKYSIGLDIGTNSVGWAVITDEYKVPSKKFKVLGNTDRHSIKKNLIGALLFDSGETAEATRLKRTARRRYTRRKNRICYLQEIFSNEMAKVDDSFFHRLEESFLVEEDKKHERHPIFGNIVDEVAYHEKYPTIYHLRKKLVDSTDKADLRLIYLALAHMIKFRGHFLIEGDLNPDNSDVDKLFIQLVQTYNQLFEENPINASGVDAKAILSARLSKSRRLENLIAQLPGEKKNGLFGNLIALSLGLTPNFKSNFDLAEDAKLQLSKDTYDDDLDNLLAQIGDQYADLFLAAKNLSDAILLSDILRVNTEITKAPLSASMIKRYDEHHQDLTLLKALVRQQLPEKYKEIFFDQSKNGYAGYIDGGASQEEFYKFIKPILEKMDGTEELLVKLNREDLLRKQRTFDNGSIPHQIHLGELHAILRRQEDFYPFLKDNREKIEKILTFRIPYYVGPLARGNSRFAWMTRKSEETITPWNFEEVVDKGASAQSFIERMTNFDKNLPNEKVLPKHSLLYEYFTVYNELTKVKYVTEGMRKPAFLSGEQKKAIVDLLFKTNRKVTVKQLKEDYFKKIECFDSVEISGVEDRFNASLGTYHDLLKIIKDKDFLDNEENEDILEDIVLTLTLFEDREMIEERLKTYAHLFDDKVMKQLKRRRYTGWGRLSRKLINGIRDKQSGKTILDFLKSDGFANRNFMQLIHDDSLTFKEDIQKAQVSGQGDSLHEHIANLAGSPAIKKGILQTVKVVDELVKVMGRHKPENIVIEMARENQTTQKGQKNSRERMKRIEEGIKELGSQILKEHPVENTQLQNEKLYLYYLQNGRDMYVDQELDINRLSDYDVDHIVPQSFLKDDSIDNKVLTRSDKARGKSDNVPSEEVVKKMKNYWRQLLNAKLITQRKFDNLTKAERGGLSELDKAGFIKRQLVETRQITKHVAQILDSRMNTKYDENDKLIREVKVITLKSKLVSDFRKDFQFYKVREINNYHHAHDAYLNAVVGTALIKKYPKLESEFVYGDYKVYDVRKMIAKSEQEIGKATAKYFFYSNIMNFFKTEITLANGEIRKRPLIETNGETGEIVWDKGRDFATVRKVLSMPQVNIVKKTEVQTGGFSKESILPKRNSDKLIARKKDWDPKKYGGFDSPTVAYSVLVVAKVEKGKSKKLKSVKELLGITIMERSSFEKNPIDFLEAKGYKEVKKDLIIKLPKYSLFELENGRKRMLASAGELQKGNELALPSKYVNFLYLASHYEKLKGSPEDNEQKQLFVEQHKHYLDEIIEQISEFSKRVILADANLDKVLSAYNKHRDKPIREQAENIIHLFTLTNLGAPAAFKYFDTTIDRKRYTSTKEVLDATLIHQSITGLYETRIDLSQLGGDGGGSSGGSPAPGGTLNIEDEYRLHETSKGPDVPLGSTWLSDFPQAWAETGGMGLAVRQAPLIIPLKATSTPVSIKQYPMSQEARLGIKPHIQRLLDQGILVPCQSPWNTPLLPVKKPGTNDYRPVQDLREVNKRVEDIHPTVPNPYNLLSGLPPSHQWYTVLDLKDAFFCLRLHPTSQSLFAFEWRDPEMGISGQLTWTRLPQGFKNSPTLFNEALHRDLADFRIQHPDLILLQYVDDLLLAATSELDCQQGTRALLQTLGDLGYRASAKKAQICQKQVKYLGYLLKEGQRWLTEARKETVMGQPTPKTPRQLREFLGKAGFCRLFIPGFAEMAAPLYPLTKPGTLFEWGPDQQKAYQEIKQALLTAPALGLPDLTKPFELFVDEKQGYAKGVLTQKLGPWRRPVAYLSKKLDPVAAGWPPCLRMVAAIAVLTKDAGKLTMGQPLVILAPHAVEALVKQPPDRWLSNARMTHYQALLLDTDRVQFGPIVALNPATLLPLPEEGLQHDCLDILAEAHGTRPDLTDQPLPDADHTWYTDGSSFLQEGQRKAGAAVTTETEVVWAKALPAGTSAQRAELIALTQALKMAEGKKLNVYTDSRYAFATAHIHGEIYRRRGWLTSEGKEIKNKDEILALLKALFLPKRLSIIHCPGHQKGNRAEARGNRMADQAAREVATRETPETSTLLAGKRTADGSEFEKRTADGSEFESPKKKAKVE

SEQ ID NO: 2592 - protein, 2096 aa, synthetic construct
MPAAKRVKLDGGDKKYSIGLDIGTNSVGWAVITDEYKVPSKKFKVLGNTDRHSIKKNLIGALLFDSGETAEATRLKRTARRRYTRRKNRICYLQEIFSNEMAKVDDSFFHRLEESFLVEEDKKHERHPIFGNIVDEVAYHEKYPTIYHLRKKLVDSTDKADLRLIYLALAHMIKFRGHFLIEGDLNPDNSDVDKLFIQLVQTYNQLFEENPINASGVDAKAILSARLSKSRRLENLIAQLPGEKKNGLFGNLIALSLGLTPNFKSNFDLAEDAKLQLSKDTYDDDLDNLLAQIGDQYADLFLAAKNLSDAILLSDILRVNTEITKAPLSASMIKRYDEHHQDLTLLKALVRQQLPEKYKEIFFDQSKNGYAGYIDGGASQEEFYKFIKPILEKMDGTEELLVKLNREDLLRKQRTFDNGSIPHQIHLGELHAILRRQEDFYPFLKDNREKIEKILTFRIPYYVGPLARGNSRFAWMTRKSEETITPWNFEEVVDKGASAQSFIERMTNFDKNLPNEKVLPKHSLLYEYFTVYNELTKVKYVTEGMRKPAFLSGEQKKAIVDLLFKTNRKVTVKQLKEDYFKKIECFDSVEISGVEDRFNASLGTYHDLLKIIKDKDFLDNEENEDILEDIVLTLTLFEDREMIEERLKTYAHLFDDKVMKQLKRRRYTGWGRLSRKLINGIRDKQSGKTILDFLKSDGFANRNFMQLIHDDSLTFKEDIQKAQVSGQGDSLHEHIANLAGSPAIKKGILQTVKVVDELVKVMGRHKPENIVIEMARENQTTQKGQKNSRERMKRIEEGIKELGSQILKEHPVENTQLQNEKLYLYYLQNGRDMYVDQELDINRLSDYDVDHIVPQSFLKDDSIDNKVLTRSDKARGKSDNVPSEEVVKKMKNYWRQLLNAKLITQRKFDNLTKAERGGLSELDKAGFIKRQLVETRQITKHVAQILDSRMNTKYDENDKLIREVKVITLKSKLVSDFRKDFQFYKVREINNYHHAHDAYLNAVVGTALIKKYPKLESEFVYGDYKVYDVRKMIAKSEQEIGKATAKYFFYSNIMNFFKTEITLANGEIRKRPLIETNGETGEIVWDKGRDFATVRKVLSMPQVNIVKKTEVQTGGFSKESILPKRNSDKLIARKKDWDPKKYGGFDSPTVAYSVLVVAKVEKGKSKKLKSVKELLGITIMERSSFEKNPIDFLEAKGYKEVKKDLIIKLPKYSLFELENGRKRMLASAGELQKGNELALPSKYVNFLYLASHYEKLKGSPEDNEQKQLFVEQHKHYLDEIIEQISEFSKRVILADANLDKVLSAYNKHRDKPIREQAENIIHLFTLTNLGAPAAFKYFDTTIDRKRYTSTKEVLDATLIHQSITGLYETRIDLSQLGGDGGGGGPAPEAAAKGGTLNIEDEYRLHETSKGPDVPLGSTWLSDFPQAWAETGGMGLAVRQAPLIIPLKATSTPVSIKQYPMSQEARLGIKPHIQRLLDQGILVPCQSPWNTPLLPVKKPGTNDYRPVQDLREVNKRVEDIHPTVPNPYNLLSGLPPSHQWYTVLDLKDAFFCLRLHPTSQSLFAFEWRDPEMGISGQLTWTRLPQGFKNSPTLFNEALHRDLADFRIQHPDLILLQYVDDLLLAATSELDCQQGTRALLQTLGDLGYRASAKKAQICQKQVKYLGYLLKEGQRWLTEARKETVMGQPTPKTPRQLREFLGKAGFCRLFIPGFAEMAAPLYPLTKPGTLFEWGPDQQKAYQEIKQALLTAPALGLPDLTKPFELFVDEKQGYAKGVLTQKLGPWRRPVAYLSKKLDPVAAGWPPCLRMVAAIAVLTKDAGKLTMGQPLVILAPHAVEALVKQPPDRWLSNARMTHYQALLLDTDRVQFGPIVALNPATLLPLPEEGLQHDCLDILAEAHGTRPDLTDQPLPDADHTWYTDGSSFLQEGQRKAGAAVTTETEVVWAKALPAGTSAQRAELIALTQALKMAEGKKLNVYTDSRYAFATAHIHGEIYRRRGWLTSEGKEIKNKDEILALLKALFLPKRLSIIHCPGHQKGNRAEARGNRMADQAAREVATRETPETSTLLAGKRTADGSEFEKRTADGSEFESPKKKAKVE

SEQ ID NO: 2593 - protein, 2094 aa, synthetic construct
MPAAKRVKLDGGDKKYSIGLDIGTNSVGWAVITDEYKVPSKKFKVLGNTDRHSIKKNLIGALLFDSGETAEATRLKRTARRRYTRRKNRICYLQEIFSNEMAKVDDSFFHRLEESFLVEEDKKHERHPIFGNIVDEVAYHEKYPTIYHLRKKLVDSTDKADLRLIYLALAHMIKFRGHFLIEGDLNPDNSDVDKLFIQLVQTYNQLFEENPINASGVDAKAILSARLSKSRRLENLIAQLPGEKKNGLFGNLIALSLGLTPNFKSNFDLAEDAKLQLSKDTYDDDLDNLLAQIGDQYADLFLAAKNLSDAILLSDILRVNTEITKAPLSASMIKRYDEHHQDLTLLKALVRQQLPEKYKEIFFDQSKNGYAGYIDGGASQEEFYKFIKPILEKMDGTEELLVKLNREDLLRKQRTFDNGSIPHQIHLGELHAILRRQEDFYPFLKDNREKIEKILTFRIPYYVGPLARGNSRFAWMTRKSEETITPWNFEEVVDKGASAQSFIERMTNFDKNLPNEKVLPKHSLLYEYFTVYNELTKVKYVTEGMRKPAFLSGEQKKAIVDLLFKTNRKVTVKQLKEDYFKKIECFDSVEISGVEDRFNASLGTYHDLLKIIKDKDFLDNEENEDILEDIVLTLTLFEDREMIEERLKTYAHLFDDKVMKQLKRRRYTGWGRLSRKLINGIRDKQSGKTILDFLKSDGFANRNFMQLIHDDSLTFKEDIQKAQVSGQGDSLHEHIANLAGSPAIKKGILQTVKVVDELVKVMGRHKPENIVIEMARENQTTQKGQKNSRERMKRIEEGIKELGSQILKEHPVENTQLQNEKLYLYYLQNGRDMYVDQELDINRLSDYDVDHIVPQSFLKDDSIDNKVLTRSDKARGKSDNVPSEEVVKKMKNYWRQLLNAKLITQRKFDNLTKAERGGLSELDKAGFIKRQLVETRQITKHVAQILDSRMNTKYDENDKLIREVKVITLKSKLVSDFRKDFQFYKVREINNYHHAHDAYLNAVVGTALIKKYPKLESEFVYGDYKVYDVRKMIAKSEQEIGKATAKYFFYSNIMNFFKTEITLANGEIRKRPLIETNGETGEIVWDKGRDFATVRKVLSMPQVNIVKKTEVQTGGFSKESILPKRNSDKLIARKKDWDPKKYGGFDSPTVAYSVLVVAKVEKGKSKKLKSVKELLGITIMERSSFEKNPIDFLEAKGYKEVKKDLIIKLPKYSLFELENGRKRMLASAGELQKGNELALPSKYVNFLYLASHYEKLKGSPEDNEQKQLFVEQHKHYLDEIIEQISEFSKRVILADANLDKVLSAYNKHRDKPIREQAENIIHLFTLTNLGAPAAFKYFDTTIDRKRYTSTKEVLDATLIHQSITGLYETRIDLSQLGGDGGGGGPAPGSSGGTLNIEDEYRLHETSKGPDVPLGSTWLSDFPQAWAETGGMGLAVRQAPLIIPLKATSTPVSIKQYPMSQEARLGIKPHIQRLLDQGILVPCQSPWNTPLLPVKKPGTNDYRPVQDLREVNKRVEDIHPTVPNPYNLLSGLPPSHQWYTVLDLKDAFFCLRLHPTSQSLFAFEWRDPEMGISGQLTWTRLPQGFKNSPTLFNEALHRDLADFRIQHPDLILLQYVDDLLLAATSELDCQQGTRALLQTLGDLGYRASAKKAQICQKQVKYLGYLLKEGQRWLTEARKETVMGQPTPKTPRQLREFLGKAGFCRLFIPGFAEMAAPLYPLTKPGTLFEWGPDQQKAYQEIKQALLTAPALGLPDLTKPFELFVDEKQGYAKGVLTQKLGPWRRPVAYLSKKLDPVAAGWPPCLRMVAAIAVLTKDAGKLTMGQPLVILAPHAVEALVKQPPDRWLSNARMTHYQALLLDTDRVQFGPIVALNPATLLPLPEEGLQHDCLDILAEAHGTRPDLTDQPLPDADHTWYTDGSSFLQEGQRKAGAAVTTETEVVWAKALPAGTSAQRAELIALTQALKMAEGKKLNVYTDSRYAFATAHIHGEIYRRRGWLTSEGKEIKNKDEILALLKALFLPKRLSIIHCPGHQKGNRAEARGNRMADQAAREVATRETPETSTLLAGKRTADGSEFEKRTADGSEFESPKKKAKVE

SEQ ID NO: 2594 - protein, 2091 aa, synthetic construct
MPAAKRVKLDGGDKKYSIGLDIGTNSVGWAVITDEYKVPSKKFKVLGNTDRHSIKKNLIGALLFDSGETAEATRLKRTARRRYTRRKNRICYLQEIFSNEMAKVDDSFFHRLEESFLVEEDKKHERHPIFGNIVDEVAYHEKYPTIYHLRKKLVDSTDKADLRLIYLALAHMIKFRGHFLIEGDLNPDNSDVDKLFIQLVQTYNQLFEENPINASGVDAKAILSARLSKSRRLENLIAQLPGEKKNGLFGNLIALSLGLTPNFKSNFDLAEDAKLQLSKDTYDDDLDNLLAQIGDQYADLFLAAKNLSDAILLSDILRVNTEITKAPLSASMIKRYDEHHQDLTLLKALVRQQLPEKYKEIFFDQSKNGYAGYIDGGASQEEFYKFIKPILEKMDGTEELLVKLNREDLLRKQRTFDNGSIPHQIHLGELHAILRRQEDFYPFLKDNREKIEKILTFRIPYYVGPLARGNSRFAWMTRKSEETITPWNFEEVVDKGASAQSFIERMTNFDKNLPNEKVLPKHSLLYEYFTVYNELTKVKYVTEGMRKPAFLSGEQKKAIVDLLFKTNRKVTVKQLKEDYFKKIECFDSVEISGVEDRFNASLGTYHDLLKIIKDKDFLDNEENEDILEDIVLTLTLFEDREMIEERLKTYAHLFDDKVMKQLKRRRYTGWGRLSRKLINGIRDKQSGKTILDFLKSDGFANRNFMQLIHDDSLTFKEDIQKAQVSGQGDSLHEHIANLAGSPAIKKGILQTVKVVDELVKVMGRHKPENIVIEMARENQTTQKGQKNSRERMKRIEEGIKELGSQILKEHPVENTQLQNEKLYLYYLQNGRDMYVDQELDINRLSDYDVDHIVPQSFLKDDSIDNKVLTRSDKARGKSDNVPSEEVVKKMKNYWRQLLNAKLITQRKFDNLTKAERGGLSELDKAGFIKRQLVETRQITKHVAQILDSRMNTKYDENDKLIREVKVITLKSKLVSDFRKDFQFYKVREINNYHHAHDAYLNAVVGTALIKKYPKLESEFVYGDYKVYDVRKMIAKSEQEIGKATAKYFFYSNIMNFFKTEITLANGEIRKRPLIETNGETGEIVWDKGRDFATVRKVLSMPQVNIVKKTEVQTGGFSKESILPKRNSDKLIARKKDWDPKKYGGFDSPTVAYSVLVVAKVEKGKSKKLKSVKELLGITIMERSSFEKNPIDFLEAKGYKEVKKDLIIKLPKYSLFELENGRKRMLASAGELQKGNELALPSKYVNFLYLASHYEKLKGSPEDNEQKQLFVEQHKHYLDEIIEQISEFSKRVILADANLDKVLSAYNKHRDKPIREQAENIIHLFTLTNLGAPAAFKYFDTTIDRKRYTSTKEVLDATLIHQSITGLYETRIDLSQLGGDGGGSSGGGGGTLNIEDEYRLHETSKGPDVPLGSTWLSDFPQAWAETGGMGLAVRQAPLIIPLKATSTPVSIKQYPMSQEARLGIKPHIQRLLDQGILVPCQSPWNTPLLPVKKPGTNDYRPVQDLREVNKRVEDIHPTVPNPYNLLSGLPPSHQWYTVLDLKDAFFCLRLHPTSQSLFAFEWRDPEMGISGQLTWTRLPQGFKNSPTLFNEALHRDLADFRIQHPDLILLQYVDDLLLAATSELDCQQGTRALLQTLGDLGYRASAKKAQICQKQVKYLGYLLKEGQRWLTEARKETVMGQPTPKTPRQLREFLGKAGFCRLFIPGFAEMAAPLYPLTKPGTLFEWGPDQQKAYQEIKQALLTAPALGLPDLTKPFELFVDEKQGYAKGVLTQKLGPWRRPVAYLSKKLDPVAAGWPPCLRMVAAIAVLTKDAGKLTMGQPLVILAPHAVEALVKQPPDRWLSNARMTHYQALLLDTDRVQFGPIVALNPATLLPLPEEGLQHDCLDILAEAHGTRPDLTDQPLPDADHTWYTDGSSFLQEGQRKAGAAVTTETEVVWAKALPAGTSAQRAELIALTQALKMAEGKKLNVYTDSRYAFATAHIHGEIYRRRGWLTSEGKEIKNKDEILALLKALFLPKRLSIIHCPGHQKGNRAEARGNRMADQAAREVATRETPETSTLLAGKRTADGSEFEKRTADGSEFESPKKKAKVE

SEQ ID NO: 2595 - protein, 2103 aa, synthetic construct
MPAAKRVKLDGGDKKYSIGLDIGTNSVGWAVITDEYKVPSKKFKVLGNTDRHSIKKNLIGALLFDSGETAEATRLKRTARRRYTRRKNRICYLQEIFSNEMAKVDDSFFHRLEESFLVEEDKKHERHPIFGNIVDEVAYHEKYPTIYHLRKKLVDSTDKADLRLIYLALAHMIKFRGHFLIEGDLNPDNSDVDKLFIQLVQTYNQLFEENPINASGVDAKAILSARLSKSRRLENLIAQLPGEKKNGLFGNLIALSLGLTPNFKSNFDLAEDAKLQLSKDTYDDDLDNLLAQIGDQYADLFLAAKNLSDAILLSDILRVNTEITKAPLSASMIKRYDEHHQDLTLLKALVRQQLPEKYKEIFFDQSKNGYAGYIDGGASQEEFYKFIKPILEKMDGTEELLVKLNREDLLRKQRTFDNGSIPHQIHLGELHAILRRQEDFYPFLKDNREKIEKILTFRIPYYVGPLARGNSRFAWMTRKSEETITPWNFEEVVDKGASAQSFIERMTNFDKNLPNEKVLPKHSLLYEYFTVYNELTKVKYVTEGMRKPAFLSGEQKKAIVDLLFKTNRKVTVKQLKEDYFKKIECFDSVEISGVEDRFNASLGTYHDLLKIIKDKDFLDNEENEDILEDIVLTLTLFEDREMIEERLKTYAHLFDDKVMKQLKRRRYTGWGRLSRKLINGIRDKQSGKTILDFLKSDGFANRNFMQLIHDDSLTFKEDIQKAQVSGQGDSLHEHIANLAGSPAIKKGILQTVKVVDELVKVMGRHKPENIVIEMARENQTTQKGQKNSRERMKRIEEGIKELGSQILKEHPVENTQLQNEKLYLYYLQNGRDMYVDQELDINRLSDYDVDHIVPQSFLKDDSIDNKVLTRSDKARGKSDNVPSEEVVKKMKNYWRQLLNAKLITQRKFDNLTKAERGGLSELDKAGFIKRQLVETRQITKHVAQILDSRMNTKYDENDKLIREVKVITLKSKLVSDFRKDFQFYKVREINNYHHAHDAYLNAVVGTALIKKYPKLESEFVYGDYKVYDVRKMIAKSEQEIGKATAKYFFYSNIMNFFKTEITLANGEIRKRPLIETNGETGEIVWDKGRDFATVRKVLSMPQVNIVKKTEVQTGGFSKESILPKRNSDKLIARKKDWDPKKYGGFDSPTVAYSVLVVAKVEKGKSKKLKSVKELLGITIMERSSFEKNPIDFLEAKGYKEVKKDLIIKLPKYSLFELENGRKRMLASAGELQKGNELALPSKYVNFLYLASHYEKLKGSPEDNEQKQLFVEQHKHYLDEIIEQISEFSKRVILADANLDKVLSAYNKHRDKPIREQAENIIHLFTLTNLGAPAAFKYFDTTIDRKRYTSTKEVLDATLIHQSITGLYETRIDLSQLGGDGGGSSGSSGSSGSSGSSGSSGGTLNIEDEYRLHETSKGPDVPLGSTWLSDFPQAWAETGGMGLAVRQAPLIIPLKATSTPVSIKQYPMSQEARLGIKPHIQRLLDQGILVPCQSPWNTPLLPVKKPGTNDYRPVQDLREVNKRVEDIHPTVPNPYNLLSGLPPSHQWYTVLDLKDAFFCLRLHPTSQSLFAFEWRDPEMGISGQLTWTRLPQGFKNSPTLFNEALHRDLADFRIQHPDLILLQYVDDLLLAATSELDCQQGTRALLQTLGDLGYRASAKKAQICQKQVKYLGYLLKEGQRWLTEARKETVMGQPTPKTPRQLREFLGKAGFCRLFIPGFAEMAAPLYPLTKPGTLFEWGPDQQKAYQEIKQALLTAPALGLPDLTKPFELFVDEKQGYAKGVLTQKLGPWRRPVAYLSKKLDPVAAGWPPCLRMVAAIAVLTKDAGKLTMGQPLVILAPHAVEALVKQPPDRWLSNARMTHYQALLLDTDRVQFGPIVALNPATLLPLPEEGLQHDCLDILAEAHGTRPDLTDQPLPDADHTWYTDGSSFLQEGQRKAGAAVTTETEVVWAKALPAGTSAQRAELIALTQALKMAEGKKLNVYTDSRYAFATAHIHGEIYRRRGWLTSEGKEIKNKDEILALLKALFLPKRLSIIHCPGHQKGNRAEARGNRMADQAAREVATRETPETSTLLAGKRTADGSEFEKRTADGSEFESPKKKAKVE

SEQ ID NO: 2596 - protein, 2088 aa, synthetic construct
MPAAKRVKLDGGDKKYSIGLDIGTNSVGWAVITDEYKVPSKKFKVLGNTDRHSIKKNLIGALLFDSGETAEATRLKRTARRRYTRRKNRICYLQEIFSNEMAKVDDSFFHRLEESFLVEEDKKHERHPIFGNIVDEVAYHEKYPTIYHLRKKLVDSTDKADLRLIYLALAHMIKFRGHFLIEGDLNPDNSDVDKLFIQLVQTYNQLFEENPINASGVDAKAILSARLSKSRRLENLIAQLPGEKKNGLFGNLIALSLGLTPNFKSNFDLAEDAKLQLSKDTYDDDLDNLLAQIGDQYADLFLAAKNLSDAILLSDILRVNTEITKAPLSASMIKRYDEHHQDLTLLKALVRQQLPEKYKEIFFDQSKNGYAGYIDGGASQEEFYKFIKPILEKMDGTEELLVKLNREDLLRKQRTFDNGSIPHQIHLGELHAILRRQEDFYPFLKDNREKIEKILTFRIPYYVGPLARGNSRFAWMTRKSEETITPWNFEEVVDKGASAQSFIERMTNFDKNLPNEKVLPKHSLLYEYFTVYNELTKVKYVTEGMRKPAFLSGEQKKAIVDLLFKTNRKVTVKQLKEDYFKKIECFDSVEISGVEDRFNASLGTYHDLLKIIKDKDFLDNEENEDILEDIVLTLTLFEDREMIEERLKTYAHLFDDKVMKQLKRRRYTGWGRLSRKLINGIRDKQSGKTILDFLKSDGFANRNFMQLIHDDSLTFKEDIQKAQVSGQGDSLHEHIANLAGSPAIKKGILQTVKVVDELVKVMGRHKPENIVIEMARENQTTQKGQKNSRERMKRIEEGIKELGSQILKEHPVENTQLQNEKLYLYYLQNGRDMYVDQELDINRLSDYDVDHIVPQSFLKDDSIDNKVLTRSDKARGKSDNVPSEEVVKKMKNYWRQLLNAKLITQRKFDNLTKAERGGLSELDKAGFIKRQLVETRQITKHVAQILDSRMNTKYDENDKLIREVKVITLKSKLVSDFRKDFQFYKVREINNYHHAHDAYLNAVVGTALIKKYPKLESEFVYGDYKVYDVRKMIAKSEQEIGKATAKYFFYSNIMNFFKTEITLANGEIRKRPLIETNGETGEIVWDKGRDFATVRKVLSMPQVNIVKKTEVQTGGFSKESILPKRNSDKLIARKKDWDPKKYGGFDSPTVAYSVLVVAKVEKGKSKKLKSVKELLGITIMERSSFEKNPIDFLEAKGYKEVKKDLIIKLPKYSLFELENGRKRMLASAGELQKGNELALPSKYVNFLYLASHYEKLKGSPEDNEQKQLFVEQHKHYLDEIIEQISEFSKRVILADANLDKVLSAYNKHRDKPIREQAENIIHLFTLTNLGAPAAFKYFDTTIDRKRYTSTKEVLDATLIHQSITGLYETRIDLSQLGGDGGGGGGGTLNIEDEYRLHETSKGPDVPLGSTWLSDFPQAWAETGGMGLAVRQAPLIIPLKATSTPVSIKQYPMSQEARLGIKPHIQRLLDQGILVPCQSPWNTPLLPVKKPGTNDYRPVQDLREVNKRVEDIHPTVPNPYNLLSGLPPSHQWYTVLDLKDAFFCLRLHPTSQSLFAFEWRDPEMGISGQLTWTRLPQGFKNSPTLFNEALHRDLADFRIQHPDLILLQYVDDLLLAATSELDCQQGTRALLQTLGDLGYRASAKKAQICQKQVKYLGYLLKEGQRWLTEARKETVMGQPTPKTPRQLREFLGKAGFCRLFIPGFAEMAAPLYPLTKPGTLFEWGPDQQKAYQEIKQALLTAPALGLPDLTKPFELFVDEKQGYAKGVLTQKLGPWRRPVAYLSKKLDPVAAGWPPCLRMVAAIAVLTKDAGKLTMGQPLVILAPHAVEALVKQPPDRWLSNARMTHYQALLLDTDRVQFGPIVALNPATLLPLPEEGLQHDCLDILAEAHGTRPDLTDQPLPDADHTWYTDGSSFLQEGQRKAGAAVTTETEVVWAKALPAGTSAQRAELIALTQALKMAEGKKLNVYTDSRYAFATAHIHGEIYRRRGWLTSEGKEIKNKDEILALLKALFLPKRLSIIHCPGHQKGNRAEARGNRMADQAAREVATRETPETSTLLAGKRTADGSEFEKRTADGSEFESPKKKAKVE

SEQ ID NO: 2597 - protein, 2096 aa, synthetic construct
MPAAKRVKLDGGDKKYSIGLDIGTNSVGWAVITDEYKVPSKKFKVLGNTDRHSIKKNLIGALLFDSGETAEATRLKRTARRRYTRRKNRICYLQEIFSNEMAKVDDSFFHRLEESFLVEEDKKHERHPIFGNIVDEVAYHEKYPTIYHLRKKLVDSTDKADLRLIYLALAHMIKFRGHFLIEGDLNPDNSDVDKLFIQLVQTYNQLFEENPINASGVDAKAILSARLSKSRRLENLIAQLPGEKKNGLFGNLIALSLGLTPNFKSNFDLAEDAKLQLSKDTYDDDLDNLLAQIGDQYADLFLAAKNLSDAILLSDILRVNTEITKAPLSASMIKRYDEHHQDLTLLKALVRQQLPEKYKEIFFDQSKNGYAGYIDGGASQEEFYKFIKPILEKMDGTEELLVKLNREDLLRKQRTFDNGSIPHQIHLGELHAILRRQEDFYPFLKDNREKIEKILTFRIPYYVGPLARGNSRFAWMTRKSEETITPWNFEEVVDKGASAQSFIERMTNFDKNLPNEKVLPKHSLLYEYFTVYNELTKVKYVTEGMRKPAFLSGEQKKAIVDLLFKTNRKVTVKQLKEDYFKKIECFDSVEISGVEDRFNASLGTYHDLLKIIKDKDFLDNEENEDILEDIVLTLTLFEDREMIEERLKTYAHLFDDKVMKQLKRRRYTGWGRLSRKLINGIRDKQSGKTILDFLKSDGFANRNFMQLIHDDSLTFKEDIQKAQVSGQGDSLHEHIANLAGSPAIKKGILQTVKVVDELVKVMGRHKPENIVIEMARENQTTQKGQKNSRERMKRIEEGIKELGSQILKEHPVENTQLQNEKLYLYYLQNGRDMYVDQELDINRLSDYDVDHIVPQSFLKDDSIDNKVLTRSDKARGKSDNVPSEEVVKKMKNYWRQLLNAKLITQRKFDNLTKAERGGLSELDKAGFIKRQLVETRQITKHVAQILDSRMNTKYDENDKLIREVKVITLKSKLVSDFRKDFQFYKVREINNYHHAHDAYLNAVVGTALIKKYPKLESEFVYGDYKVYDVRKMIAKSEQEIGKATAKYFFYSNIMNFFKTEITLANGEIRKRPLIETNGETGEIVWDKGRDFATVRKVLSMPQVNIVKKTEVQTGGFSKESILPKRNSDKLIARKKDWDPKKYGGFDSPTVAYSVLVVAKVEKGKSKKLKSVKELLGITIMERSSFEKNPIDFLEAKGYKEVKKDLIIKLPKYSLFELENGRKRMLASAGELQKGNELALPSKYVNFLYLASHYEKLKGSPEDNEQKQLFVEQHKHYLDEIIEQISEFSKRVILADANLDKVLSAYNKHRDKPIREQAENIIHLFTLTNLGAPAAFKYFDTTIDRKRYTSTKEVLDATLIHQSITGLYETRIDLSQLGGDGGGGGGGSEAAAKGGTLNIEDEYRLHETSKGPDVPLGSTWLSDFPQAWAETGGMGLAVRQAPLIIPLKATSTPVSIKQYPMSQEARLGIKPHIQRLLDQGILVPCQSPWNTPLLPVKKPGTNDYRPVQDLREVNKRVEDIHPTVPNPYNLLSGLPPSHQWYTVLDLKDAFFCLRLHPTSQSLFAFEWRDPEMGISGQLTWTRLPQGFKNSPTLFNEALHRDLADFRIQHPDLILLQYVDDLLLAATSELDCQQGTRALLQTLGDLGYRASAKKAQICQKQVKYLGYLLKEGQRWLTEARKETVMGQPTPKTPRQLREFLGKAGFCRLFIPGFAEMAAPLYPLTKPGTLFEWGPDQQKAYQEIKQALLTAPALGLPDLTKPFELFVDEKQGYAKGVLTQKLGPWRRPVAYLSKKLDPVAAGWPPCLRMVAAIAVLTKDAGKLTMGQPLVILAPHAVEALVKQPPDRWLSNARMTHYQALLLDTDRVQFGPIVALNPATLLPLPEEGLQHDCLDILAEAHGTRPDLTDQPLPDADHTWYTDGSSFLQEGQRKAGAAVTTETEVVWAKALPAGTSAQRAELIALTQALKMAEGKKLNVYTDSRYAFATAHIHGEIYRRRGWLTSEGKEIKNKDEILALLKALFLPKRLSIIHCPGHQKGNRAEARGNRMADQAAREVATRETPETSTLLAGKRTADGSEFEKRTADGSEFESPKKKAKVE

SEQ ID NO: 2598 - protein, 2110 aa, synthetic construct
MPAAKRVKLDGGDKKYSIGLDIGTNSVGWAVITDEYKVPSKKFKVLGNTDRHSIKKNLIGALLFDSGETAEATRLKRTARRRYTRRKNRICYLQEIFSNEMAKVDDSFFHRLEESFLVEEDKKHERHPIFGNIVDEVAYHEKYPTIYHLRKKLVDSTDKADLRLIYLALAHMIKFRGHFLIEGDLNPDNSDVDKLFIQLVQTYNQLFEENPINASGVDAKAILSARLSKSRRLENLIAQLPGEKKNGLFGNLIALSLGLTPNFKSNFDLAEDAKLQLSKDTYDDDLDNLLAQIGDQYADLFLAAKNLSDAILLSDILRVNTEITKAPLSASMIKRYDEHHQDLTLLKALVRQQLPEKYKEIFFDQSKNGYAGYIDGGASQEEFYKFIKPILEKMDGTEELLVKLNREDLLRKQRTFDNGSIPHQIHLGELHAILRRQEDFYPFLKDNREKIEKILTFRIPYYVGPLARGNSRFAWMTRKSEETITPWNFEEVVDKGASAQSFIERMTNFDKNLPNEKVLPKHSLLYEYFTVYNELTKVKYVTEGMRKPAFLSGEQKKAIVDLLFKTNRKVTVKQLKEDYFKKIECFDSVEISGVEDRFNASLGTYHDLLKIIKDKDFLDNEENEDILEDIVLTLTLFEDREMIEERLKTYAHLFDDKVMKQLKRRRYTGWGRLSRKLINGIRDKQSGKTILDFLKSDGFANRNFMQLIHDDSLTFKEDIQKAQVSGQGDSLHEHIANLAGSPAIKKGILQTVKVVDELVKVMGRHKPENIVIEMARENQTTQKGQKNSRERMKRIEEGIKELGSQILKEHPVENTQLQNEKLYLYYLQNGRDMYVDQELDINRLSDYDVDHIVPQSFLKDDSIDNKVLTRSDKARGKSDNVPSEEVVKKMKNYWRQLLNAKLITQRKFDNLTKAERGGLSELDKAGFIKRQLVETRQITKHVAQILDSRMNTKYDENDKLIREVKVITLKSKLVSDFRKDFQFYKVREINNYHHAHDAYLNAVVGTALIKKYPKLESEFVYGDYKVYDVRKMIAKSEQEIGKATAKYFFYSNIMNFFKTEITLANGEIRKRPLIETNGETGEIVWDKGRDFATVRKVLSMPQVNIVKKTEVQTGGFSKESILPKRNSDKLIARKKDWDPKKYGGFDSPTVAYSVLVVAKVEKGKSKKLKSVKELLGITIMERSSFEKNPIDFLEAKGYKEVKKDLIIKLPKYSLFELENGRKRMLASAGELQKGNELALPSKYVNFLYLASHYEKLKGSPEDNEQKQLFVEQHKHYLDEIIEQISEFSKRVILADANLDKVLSAYNKHRDKPIREQAENIIHLFTLTNLGAPAAFKYFDTTIDRKRYTSTKEVLDATLIHQSITGLYETRIDLSQLGGDGGGGGGSGGGGSGGGGSGGGGSGGGGSGGTLNIEDEYRLHETSKGPDVPLGSTWLSDFPQAWAETGGMGLAVRQAPLIIPLKATSTPVSIKQYPMSQEARLGIKPHIQRLLDQGILVPCQSPWNTPLLPVKKPGTNDYRPVQDLREVNKRVEDIHPTVPNPYNLLSGLPPSHQWYTVLDLKDAFFCLRLHPTSQSLFAFEWRDPEMGISGQLTWTRLPQGFKNSPTLFNEALHRDLADFRIQHPDLILLQYVDDLLLAATSELDCQQGTRALLQTLGDLGYRASAKKAQICQKQVKYLGYLLKEGQRWLTEARKETVMGQPTPKTPRQLREFLGKAGFCRLFIPGFAEMAAPLYPLTKPGTLFEWGPDQQKAYQEIKQALLTAPALGLPDLTKPFELFVDEKQGYAKGVLTQKLGPWRRPVAYLSKKLDPVAAGWPPCLRMVAAIAVLTKDAGKLTMGQPLVILAPHAVEALVKQPPDRWLSNARMTHYQALLLDTDRVQFGPIVALNPATLLPLPEEGLQHDCLDILAEAHGTRPDLTDQPLPDADHTWYTDGSSFLQEGQRKAGAAVTTETEVVWAKALPAGTSAQRAELIALTQALKMAEGKKLNVYTDSRYAFATAHIHGEIYRRRGWLTSEGKEIKNKDEILALLKALFLPKRLSIIHCPGHQKGNRAEARGNRMADQAAREVATRETPETSTLLAGKRTADGSEFEKRTADGSEFESPKKKAKVE

SEQ ID NO: 2599 - protein, 2096 aa, synthetic construct
MPAAKRVKLDGGDKKYSIGLDIGTNSVGWAVITDEYKVPSKKFKVLGNTDRHSIKKNLIGALLFDSGETAEATRLKRTARRRYTRRKNRICYLQEIFSNEMAKVDDSFFHRLEESFLVEEDKKHERHPIFGNIVDEVAYHEKYPTIYHLRKKLVDSTDKADLRLIYLALAHMIKFRGHFLIEGDLNPDNSDVDKLFIQLVQTYNQLFEENPINASGVDAKAILSARLSKSRRLENLIAQLPGEKKNGLFGNLIALSLGLTPNFKSNFDLAEDAKLQLSKDTYDDDLDNLLAQIGDQYADLFLAAKNLSDAILLSDILRVNTEITKAPLSASMIKRYDEHHQDLTLLKALVRQQLPEKYKEIFFDQSKNGYAGYIDGGASQEEFYKFIKPILEKMDGTEELLVKLNREDLLRKQRTFDNGSIPHQIHLGELHAILRRQEDFYPFLKDNREKIEKILTFRIPYYVGPLARGNSRFAWMTRKSEETITPWNFEEVVDKGASAQSFIERMTNFDKNLPNEKVLPKHSLLYEYFTVYNELTKVKYVTEGMRKPAFLSGEQKKAIVDLLFKTNRKVTVKQLKEDYFKKIECFDSVEISGVEDRFNASLGTYHDLLKIIKDKDFLDNEENEDILEDIVLTLTLFEDREMIEERLKTYAHLFDDKVMKQLKRRRYTGWGRLSRKLINGIRDKQSGKTILDFLKSDGFANRNFMQLIHDDSLTFKEDIQKAQVSGQGDSLHEHIANLAGSPAIKKGILQTVKVVDELVKVMGRHKPENIVIEMARENQTTQKGQKNSRERMKRIEEGIKELGSQILKEHPVENTQLQNEKLYLYYLQNGRDMYVDQELDINRLSDYDVDHIVPQSFLKDDSIDNKVLTRSDKARGKSDNVPSEEVVKKMKNYWRQLLNAKLITQRKFDNLTKAERGGLSELDKAGFIKRQLVETRQITKHVAQILDSRMNTKYDENDKLIREVKVITLKSKLVSDFRKDFQFYKVREINNYHHAHDAYLNAVVGTALIKKYPKLESEFVYGDYKVYDVRKMIAKSEQEIGKATAKYFFYSNIMNFFKTEITLANGEIRKRPLIETNGETGEIVWDKGRDFATVRKVLSMPQVNIVKKTEVQTGGFSKESILPKRNSDKLIARKKDWDPKKYGGFDSPTVAYSVLVVAKVEKGKSKKLKSVKELLGITIMERSSFEKNPIDFLEAKGYKEVKKDLIIKLPKYSLFELENGRKRMLASAGELQKGNELALPSKYVNFLYLASHYEKLKGSPEDNEQKQLFVEQHKHYLDEIIEQISEFSKRVILADANLDKVLSAYNKHRDKPIREQAENIIHLFTLTNLGAPAAFKYFDTTIDRKRYTSTKEVLDATLIHQSITGLYETRIDLSQLGGDGGGSSPAPEAAAKGGTLNIEDEYRLHETSKGPDVPLGSTWLSDFPQAWAETGGMGLAVRQAPLIIPLKATSTPVSIKQYPMSQEARLGIKPHIQRLLDQGILVPCQSPWNTPLLPVKKPGTNDYRPVQDLREVNKRVEDIHPTVPNPYNLLSGLPPSHQWYTVLDLKDAFFCLRLHPTSQSLFAFEWRDPEMGISGQLTWTRLPQGFKNSPTLFNEALHRDLADFRIQHPDLILLQYVDDLLLAATSELDCQQGTRALLQTLGDLGYRASAKKAQICQKQVKYLGYLLKEGQRWLTEARKETVMGQPTPKTPRQLREFLGKAGFCRLFIPGFAEMAAPLYPLTKPGTLFEWGPDQQKAYQEIKQALLTAPALGLPDLTKPFELFVDEKQGYAKGVLTQKLGPWRRPVAYLSKKLDPVAAGWPPCLRMVAAIAVLTKDAGKLTMGQPLVILAPHAVEALVKQPPDRWLSNARMTHYQALLLDTDRVQFGPIVALNPATLLPLPEEGLQHDCLDILAEAHGTRPDLTDQPLPDADHTWYTDGSSFLQEGQRKAGAAVTTETEVVWAKALPAGTSAQRAELIALTQALKMAEGKKLNVYTDSRYAFATAHIHGEIYRRRGWLTSEGKEIKNKDEILALLKALFLPKRLSIIHCPGHQKGNRAEARGNRMADQAAREVATRETPETSTLLAGKRTADGSEFEKRTADGSEFESPKKKAKVE

SEQ ID NO: 2600 - protein, 2093 aa, synthetic construct
MPAAKRVKLDGGDKKYSIGLDIGTNSVGWAVITDEYKVPSKKFKVLGNTDRHSIKKNLIGALLFDSGETAEATRLKRTARRRYTRRKNRICYLQEIFSNEMAKVDDSFFHRLEESFLVEEDKKHERHPIFGNIVDEVAYHEKYPTIYHLRKKLVDSTDKADLRLIYLALAHMIKFRGHFLIEGDLNPDNSDVDKLFIQLVQTYNQLFEENPINASGVDAKAILSARLSKSRRLENLIAQLPGEKKNGLFGNLIALSLGLTPNFKSNFDLAEDAKLQLSKDTYDDDLDNLLAQIGDQYADLFLAAKNLSDAILLSDILRVNTEITKAPLSASMIKRYDEHHQDLTLLKALVRQQLPEKYKEIFFDQSKNGYAGYIDGGASQEEFYKFIKPILEKMDGTEELLVKLNREDLLRKQRTFDNGSIPHQIHLGELHAILRRQEDFYPFLKDNREKIEKILTFRIPYYVGPLARGNSRFAWMTRKSEETITPWNFEEVVDKGASAQSFIERMTNFDKNLPNEKVLPKHSLLYEYFTVYNELTKVKYVTEGMRKPAFLSGEQKKAIVDLLFKTNRKVTVKQLKEDYFKKIECFDSVEISGVEDRFNASLGTYHDLLKIIKDKDFLDNEENEDILEDIVLTLTLFEDREMIEERLKTYAHLFDDKVMKQLKRRRYTGWGRLSRKLINGIRDKQSGKTILDFLKSDGFANRNFMQLIHDDSLTFKEDIQKAQVSGQGDSLHEHIANLAGSPAIKKGILQTVKVVDELVKVMGRHKPENIVIEMARENQTTQKGQKNSRERMKRIEEGIKELGSQILKEHPVENTQLQNEKLYLYYLQNGRDMYVDQELDINRLSDYDVDHIVPQSFLKDDSIDNKVLTRSDKARGKSDNVPSEEVVKKMKNYWRQLLNAKLITQRKFDNLTKAERGGLSELDKAGFIKRQLVETRQITKHVAQILDSRMNTKYDENDKLIREVKVITLKSKLVSDFRKDFQFYKVREINNYHHAHDAYLNAVVGTALIKKYPKLESEFVYGDYKVYDVRKMIAKSEQEIGKATAKYFFYSNIMNFFKTEITLANGEIRKRPLIETNGETGEIVWDKGRDFATVRKVLSMPQVNIVKKTEVQTGGFSKESILPKRNSDKLIARKKDWDPKKYGGFDSPTVAYSVLVVAKVEKGKSKKLKSVKELLGITIMERSSFEKNPIDFLEAKGYKEVKKDLIIKLPKYSLFELENGRKRMLASAGELQKGNELALPSKYVNFLYLASHYEKLKGSPEDNEQKQLFVEQHKHYLDEIIEQISEFSKRVILADANLDKVLSAYNKHRDKPIREQAENIIHLFTLTNLGAPAAFKYFDTTIDRKRYTSTKEVLDATLIHQSITGLYETRIDLSQLGGDGGGGSEAAAKGGTLNIEDEYRLHETSKGPDVPLGSTWLSDFPQAWAETGGMGLAVRQAPLIIPLKATSTPVSIKQYPMSQEARLGIKPHIQRLLDQGILVPCQSPWNTPLLPVKKPGTNDYRPVQDLREVNKRVEDIHPTVPNPYNLLSGLPPSHQWYTVLDLKDAFFCLRLHPTSQSLFAFEWRDPEMGISGQLTWTRLPQGFKNSPTLFNEALHRDLADFRIQHPDLILLQYVDDLLLAATSELDCQQGTRALLQTLGDLGYRASAKKAQICQKQVKYLGYLLKEGQRWLTEARKETVMGQPTPKTPRQLREFLGKAGFCRLFIPGFAEMAAPLYPLTKPGTLFEWGPDQQKAYQEIKQALLTAPALGLPDLTKPFELFVDEKQGYAKGVLTQKLGPWRRPVAYLSKKLDPVAAGWPPCLRMVAAIAVLTKDAGKLTMGQPLVILAPHAVEALVKQPPDRWLSNARMTHYQALLLDTDRVQFGPIVALNPATLLPLPEEGLQHDCLDILAEAHGTRPDLTDQPLPDADHTWYTDGSSFLQEGQRKAGAAVTTETEVVWAKALPAGTSAQRAELIALTQALKMAEGKKLNVYTDSRYAFATAHIHGEIYRRRGWLTSEGKEIKNKDEILALLKALFLPKRLSIIHCPGHQKGNRAEARGNRMADQAAREVATRETPETSTLLAGKRTADGSEFEKRTADGSEFESPKKKAKVE

SEQ ID NO: 2601 - protein, 2094 aa, synthetic construct
MPAAKRVKLDGGDKKYSIGLDIGTNSVGWAVITDEYKVPSKKFKVLGNTDRHSIKKNLIGALLFDSGETAEATRLKRTARRRYTRRKNRICYLQEIFSNEMAKVDDSFFHRLEESFLVEEDKKHERHPIFGNIVDEVAYHEKYPTIYHLRKKLVDSTDKADLRLIYLALAHMIKFRGHFLIEGDLNPDNSDVDKLFIQLVQTYNQLFEENPINASGVDAKAILSARLSKSRRLENLIAQLPGEKKNGLFGNLIALSLGLTPNFKSNFDLAEDAKLQLSKDTYDDDLDNLLAQIGDQYADLFLAAKNLSDAILLSDILRVNTEITKAPLSASMIKRYDEHHQDLTLLKALVRQQLPEKYKEIFFDQSKNGYAGYIDGGASQEEFYKFIKPILEKMDGTEELLVKLNREDLLRKQRTFDNGSIPHQIHLGELHAILRRQEDFYPFLKDNREKIEKILTFRIPYYVGPLARGNSRFAWMTRKSEETITPWNFEEVVDKGASAQSFIERMTNFDKNLPNEKVLPKHSLLYEYFTVYNELTKVKYVTEGMRKPAFLSGEQKKAIVDLLFKTNRKVTVKQLKEDYFKKIECFDSVEISGVEDRFNASLGTYHDLLKIIKDKDFLDNEENEDILEDIVLTLTLFEDREMIEERLKTYAHLFDDKVMKQLKRRRYTGWGRLSRKLINGIRDKQSGKTILDFLKSDGFANRNFMQLIHDDSLTFKEDIQKAQVSGQGDSLHEHIANLAGSPAIKKGILQTVKVVDELVKVMGRHKPENIVIEMARENQTTQKGQKNSRERMKRIEEGIKELGSQILKEHPVENTQLQNEKLYLYYLQNGRDMYVDQELDINRLSDYDVDHIVPQSFLKDDSIDNKVLTRSDKARGKSDNVPSEEVVKKMKNYWRQLLNAKLITQRKFDNLTKAERGGLSELDKAGFIKRQLVETRQITKHVAQILDSRMNTKYDENDKLIREVKVITLKSKLVSDFRKDFQFYKVREINNYHHAHDAYLNAVVGTALIKKYPKLESEFVYGDYKVYDVRKMIAKSEQEIGKATAKYFFYSNIMNFFKTEITLANGEIRKRPLIETNGETGEIVWDKGRDFATVRKVLSMPQVNIVKKTEVQTGGFSKESILPKRNSDKLIARKKDWDPKKYGGFDSPTVAYSVLVVAKVEKGKSKKLKSVKELLGITIMERSSFEKNPIDFLEAKGYKEVKKDLIIKLPKYSLFELENGRKRMLASAGELQKGNELALPSKYVNFLYLASHYEKLKGSPEDNEQKQLFVEQHKHYLDEIIEQISEFSKRVILADANLDKVLSAYNKHRDKPIREQAENIIHLFTLTNLGAPAAFKYFDTTIDRKRYTSTKEVLDATLIHQSITGLYETRIDLSQLGGDGGGGSGGGGSSGGTLNIEDEYRLHETSKGPDVPLGSTWLSDFPQAWAETGGMGLAVRQAPLIIPLKATSTPVSIKQYPMSQEARLGIKPHIQRLLDQGILVPCQSPWNTPLLPVKKPGTNDYRPVQDLREVNKRVEDIHPTVPNPYNLLSGLPPSHQWYTVLDLKDAFFCLRLHPTSQSLFAFEWRDPEMGISGQLTWTRLPQGFKNSPTLFNEALHRDLADFRIQHPDLILLQYVDDLLLAATSELDCQQGTRALLQTLGDLGYRASAKKAQICQKQVKYLGYLLKEGQRWLTEARKETVMGQPTPKTPRQLREFLGKAGFCRLFIPGFAEMAAPLYPLTKPGTLFEWGPDQQKAYQEIKQALLTAPALGLPDLTKPFELFVDEKQGYAKGVLTQKLGPWRRPVAYLSKKLDPVAAGWPPCLRMVAAIAVLTKDAGKLTMGQPLVILAPHAVEALVKQPPDRWLSNARMTHYQALLLDTDRVQFGPIVALNPATLLPLPEEGLQHDCLDILAEAHGTRPDLTDQPLPDADHTWYTDGSSFLQEGQRKAGAAVTTETEVVWAKALPAGTSAQRAELIALTQALKMAEGKKLNVYTDSRYAFATAHIHGEIYRRRGWLTSEGKEIKNKDEILALLKALFLPKRLSIIHCPGHQKGNRAEARGNRMADQAAREVATRETPETSTLLAGKRTADGSEFEKRTADGSEFESPKKKAKVE

SEQ ID NO: 2602 - protein, 2089 aa, synthetic construct
MPAAKRVKLDGGDKKYSIGLDIGTNSVGWAVITDEYKVPSKKFKVLGNTDRHSIKKNLIGALLFDSGETAEATRLKRTARRRYTRRKNRICYLQEIFSNEMAKVDDSFFHRLEESFLVEEDKKHERHPIFGNIVDEVAYHEKYPTIYHLRKKLVDSTDKADLRLIYLALAHMIKFRGHFLIEGDLNPDNSDVDKLFIQLVQTYNQLFEENPINASGVDAKAILSARLSKSRRLENLIAQLPGEKKNGLFGNLIALSLGLTPNFKSNFDLAEDAKLQLSKDTYDDDLDNLLAQIGDQYADLFLAAKNLSDAILLSDILRVNTEITKAPLSASMIKRYDEHHQDLTLLKALVRQQLPEKYKEIFFDQSKNGYAGYIDGGASQEEFYKFIKPILEKMDGTEELLVKLNREDLLRKQRTFDNGSIPHQIHLGELHAILRRQEDFYPFLKDNREKIEKILTFRIPYYVGPLARGNSRFAWMTRKSEETITPWNFEEVVDKGASAQSFIERMTNFDKNLPNEKVLPKHSLLYEYFTVYNELTKVKYVTEGMRKPAFLSGEQKKAIVDLLFKTNRKVTVKQLKEDYFKKIECFDSVEISGVEDRFNASLGTYHDLLKIIKDKDFLDNEENEDILEDIVLTLTLFEDREMIEERLKTYAHLFDDKVMKQLKRRRYTGWGRLSRKLINGIRDKQSGKTILDFLKSDGFANRNFMQLIHDDSLTFKEDIQKAQVSGQGDSLHEHIANLAGSPAIKKGILQTVKVVDELVKVMGRHKPENIVIEMARENQTTQKGQKNSRERMKRIEEGIKELGSQILKEHPVENTQLQNEKLYLYYLQNGRDMYVDQELDINRLSDYDVDHIVPQSFLKDDSIDNKVLTRSDKARGKSDNVPSEEVVKKMKNYWRQLLNAKLITQRKFDNLTKAERGGLSELDKAGFIKRQLVETRQITKHVAQILDSRMNTKYDENDKLIREVKVITLKSKLVSDFRKDFQFYKVREINNYHHAHDAYLNAVVGTALIKKYPKLESEFVYGDYKVYDVRKMIAKSEQEIGKATAKYFFYSNIMNFFKTEITLANGEIRKRPLIETNGETGEIVWDKGRDFATVRKVLSMPQVNIVKKTEVQTGGFSKESILPKRNSDKLIARKKDWDPKKYGGFDSPTVAYSVLVVAKVEKGKSKKLKSVKELLGITIMERSSFEKNPIDFLEAKGYKEVKKDLIIKLPKYSLFELENGRKRMLASAGELQKGNELALPSKYVNFLYLASHYEKLKGSPEDNEQKQLFVEQHKHYLDEIIEQISEFSKRVILADANLDKVLSAYNKHRDKPIREQAENIIHLFTLTNLGAPAAFKYFDTTIDRKRYTSTKEVLDATLIHQSITGLYETRIDLSQLGGDGGGGGGGGTLNIEDEYRLHETSKGPDVPLGSTWLSDFPQAWAETGGMGLAVRQAPLIIPLKATSTPVSIKQYPMSQEARLGIKPHIQRLLDQGILVPCQSPWNTPLLPVKKPGTNDYRPVQDLREVNKRVEDIHPTVPNPYNLLSGLPPSHQWYTVLDLKDAFFCLRLHPTSQSLFAFEWRDPEMGISGQLTWTRLPQGFKNSPTLFNEALHRDLADFRIQHPDLILLQYVDDLLLAATSELDCQQGTRALLQTLGDLGYRASAKKAQICQKQVKYLGYLLKEGQRWLTEARKETVMGQPTPKTPRQLREFLGKAGFCRLFIPGFAEMAAPLYPLTKPGTLFEWGPDQQKAYQEIKQALLTAPALGLPDLTKPFELFVDEKQGYAKGVLTQKLGPWRRPVAYLSKKLDPVAAGWPPCLRMVAAIAVLTKDAGKLTMGQPLVILAPHAVEALVKQPPDRWLSNARMTHYQALLLDTDRVQFGPIVALNPATLLPLPEEGLQHDCLDILAEAHGTRPDLTDQPLPDADHTWYTDGSSFLQEGQRKAGAAVTTETEVVWAKALPAGTSAQRAELIALTQALKMAEGKKLNVYTDSRYAFATAHIHGEIYRRRGWLTSEGKEIKNKDEILALLKALFLPKRLSIIHCPGHQKGNRAEARGNRMADQAAREVATRETPETSTLLAGKRTADGSEFEKRTADGSEFESPKKKAKVE

SEQ ID NO: 2603 - protein, 2096 aa, synthetic construct
MPAAKRVKLDGGDKKYSIGLDIGTNSVGWAVITDEYKVPSKKFKVLGNTDRHSIKKNLIGALLFDSGETAEATRLKRTARRRYTRRKNRICYLQEIFSNEMAKVDDSFFHRLEESFLVEEDKKHERHPIFGNIVDEVAYHEKYPTIYHLRKKLVDSTDKADLRLIYLALAHMIKFRGHFLIEGDLNPDNSDVDKLFIQLVQTYNQLFEENPINASGVDAKAILSARLSKSRRLENLIAQLPGEKKNGLFGNLIALSLGLTPNFKSNFDLAEDAKLQLSKDTYDDDLDNLLAQIGDQYADLFLAAKNLSDAILLSDILRVNTEITKAPLSASMIKRYDEHHQDLTLLKALVRQQLPEKYKEIFFDQSKNGYAGYIDGGASQEEFYKFIKPILEKMDGTEELLVKLNREDLLRKQRTFDNGSIPHQIHLGELHAILRRQEDFYPFLKDNREKIEKILTFRIPYYVGPLARGNSRFAWMTRKSEETITPWNFEEVVDKGASAQSFIERMTNFDKNLPNEKVLPKHSLLYEYFTVYNELTKVKYVTEGMRKPAFLSGEQKKAIVDLLFKTNRKVTVKQLKEDYFKKIECFDSVEISGVEDRFNASLGTYHDLLKIIKDKDFLDNEENEDILEDIVLTLTLFEDREMIEERLKTYAHLFDDKVMKQLKRRRYTGWGRLSRKLINGIRDKQSGKTILDFLKSDGFANRNFMQLIHDDSLTFKEDIQKAQVSGQGDSLHEHIANLAGSPAIKKGILQTVKVVDELVKVMGRHKPENIVIEMARENQTTQKGQKNSRERMKRIEEGIKELGSQILKEHPVENTQLQNEKLYLYYLQNGRDMYVDQELDINRLSDYDVDHIVPQSFLKDDSIDNKVLTRSDKARGKSDNVPSEEVVKKMKNYWRQLLNAKLITQRKFDNLTKAERGGLSELDKAGFIKRQLVETRQITKHVAQILDSRMNTKYDENDKLIREVKVITLKSKLVSDFRKDFQFYKVREINNYHHAHDAYLNAVVGTALIKKYPKLESEFVYGDYKVYDVRKMIAKSEQEIGKATAKYFFYSNIMNFFKTEITLANGEIRKRPLIETNGETGEIVWDKGRDFATVRKVLSMPQVNIVKKTEVQTGGFSKESILPKRNSDKLIARKKDWDPKKYGGFDSPTVAYSVLVVAKVEKGKSKKLKSVKELLGITIMERSSFEKNPIDFLEAKGYKEVKKDLIIKLPKYSLFELENGRKRMLASAGELQKGNELALPSKYVNFLYLASHYEKLKGSPEDNEQKQLFVEQHKHYLDEIIEQISEFSKRVILADANLDKVLSAYNKHRDKPIREQAENIIHLFTLTNLGAPAAFKYFDTTIDRKRYTSTKEVLDATLIHQSITGLYETRIDLSQLGGDGGGGSGGGEAAAKGGTLNIEDEYRLHETSKGPDVPLGSTWLSDFPQAWAETGGMGLAVRQAPLIIPLKATSTPVSIKQYPMSQEARLGIKPHIQRLLDQGILVPCQSPWNTPLLPVKKPGTNDYRPVQDLREVNKRVEDIHPTVPNPYNLLSGLPPSHQWYTVLDLKDAFFCLRLHPTSQSLFAFEWRDPEMGISGQLTWTRLPQGFKNSPTLFNEALHRDLADFRIQHPDLILLQYVDDLLLAATSELDCQQGTRALLQTLGDLGYRASAKKAQICQKQVKYLGYLLKEGQRWLTEARKETVMGQPTPKTPRQLREFLGKAGFCRLFIPGFAEMAAPLYPLTKPGTLFEWGPDQQKAYQEIKQALLTAPALGLPDLTKPFELFVDEKQGYAKGVLTQKLGPWRRPVAYLSKKLDPVAAGWPPCLRMVAAIAVLTKDAGKLTMGQPLVILAPHAVEALVKQPPDRWLSNARMTHYQALLLDTDRVQFGPIVALNPATLLPLPEEGLQHDCLDILAEAHGTRPDLTDQPLPDADHTWYTDGSSFLQEGQRKAGAAVTTETEVVWAKALPAGTSAQRAELIALTQALKMAEGKKLNVYTDSRYAFATAHIHGEIYRRRGWLTSEGKEIKNKDEILALLKALFLPKRLSIIHCPGHQKGNRAEARGNRMADQAAREVATRETPETSTLLAGKRTADGSEFEKRTADGSEFESPKKKAKVE

SEQ ID NO: 2604 - protein, 2091 aa, synthetic construct
MPAAKRVKLDGGDKKYSIGLDIGTNSVGWAVITDEYKVPSKKFKVLGNTDRHSIKKNLIGALLFDSGETAEATRLKRTARRRYTRRKNRICYLQEIFSNEMAKVDDSFFHRLEESFLVEEDKKHERHPIFGNIVDEVAYHEKYPTIYHLRKKLVDSTDKADLRLIYLALAHMIKFRGHFLIEGDLNPDNSDVDKLFIQLVQTYNQLFEENPINASGVDAKAILSARLSKSRRLENLIAQLPGEKKNGLFGNLIALSLGLTPNFKSNFDLAEDAKLQLSKDTYDDDLDNLLAQIGDQYADLFLAAKNLSDAILLSDILRVNTEITKAPLSASMIKRYDEHHQDLTLLKALVRQQLPEKYKEIFFDQSKNGYAGYIDGGASQEEFYKFIKPILEKMDGTEELLVKLNREDLLRKQRTFDNGSIPHQIHLGELHAILRRQEDFYPFLKDNREKIEKILTFRIPYYVGPLARGNSRFAWMTRKSEETITPWNFEEVVDKGASAQSFIERMTNFDKNLPNEKVLPKHSLLYEYFTVYNELTKVKYVTEGMRKPAFLSGEQKKAIVDLLFKTNRKVTVKQLKEDYFKKIECFDSVEISGVEDRFNASLGTYHDLLKIIKDKDFLDNEENEDILEDIVLTLTLFEDREMIEERLKTYAHLFDDKVMKQLKRRRYTGWGRLSRKLINGIRDKQSGKTILDFLKSDGFANRNFMQLIHDDSLTFKEDIQKAQVSGQGDSLHEHIANLAGSPAIKKGILQTVKVVDELVKVMGRHKPENIVIEMARENQTTQKGQKNSRERMKRIEEGIKELGSQILKEHPVENTQLQNEKLYLYYLQNGRDMYVDQELDINRLSDYDVDHIVPQSFLKDDSIDNKVLTRSDKARGKSDNVPSEEVVKKMKNYWRQLLNAKLITQRKFDNLTKAERGGLSELDKAGFIKRQLVETRQITKHVAQILDSRMNTKYDENDKLIREVKVITLKSKLVSDFRKDFQFYKVREINNYHHAHDAYLNAVVGTALIKKYPKLESEFVYGDYKVYDVRKMIAKSEQEIGKATAKYFFYSNIMNFFKTEITLANGEIRKRPLIETNGETGEIVWDKGRDFATVRKVLSMPQVNIVKKTEVQTGGFSKESILPKRNSDKLIARKKDWDPKKYGGFDSPTVAYSVLVVAKVEKGKSKKLKSVKELLGITIMERSSFEKNPIDFLEAKGYKEVKKDLIIKLPKYSLFELENGRKRMLASAGELQKGNELALPSKYVNFLYLASHYEKLKGSPEDNEQKQLFVEQHKHYLDEIIEQISEFSKRVILADANLDKVLSAYNKHRDKPIREQAENIIHLFTLTNLGAPAAFKYFDTTIDRKRYTSTKEVLDATLIHQSITGLYETRIDLSQLGGDGGGGSGGSGGTLNIEDEYRLHETSKGPDVPLGSTWLSDFPQAWAETGGMGLAVRQAPLIIPLKATSTPVSIKQYPMSQEARLGIKPHIQRLLDQGILVPCQSPWNTPLLPVKKPGTNDYRPVQDLREVNKRVEDIHPTVPNPYNLLSGLPPSHQWYTVLDLKDAFFCLRLHPTSQSLFAFEWRDPEMGISGQLTWTRLPQGFKNSPTLFNEALHRDLADFRIQHPDLILLQYVDDLLLAATSELDCQQGTRALLQTLGDLGYRASAKKAQICQKQVKYLGYLLKEGQRWLTEARKETVMGQPTPKTPRQLREFLGKAGFCRLFIPGFAEMAAPLYPLTKPGTLFEWGPDQQKAYQEIKQALLTAPALGLPDLTKPFELFVDEKQGYAKGVLTQKLGPWRRPVAYLSKKLDPVAAGWPPCLRMVAAIAVLTKDAGKLTMGQPLVILAPHAVEALVKQPPDRWLSNARMTHYQALLLDTDRVQFGPIVALNPATLLPLPEEGLQHDCLDILAEAHGTRPDLTDQPLPDADHTWYTDGSSFLQEGQRKAGAAVTTETEVVWAKALPAGTSAQRAELIALTQALKMAEGKKLNVYTDSRYAFATAHIHGEIYRRRGWLTSEGKEIKNKDEILALLKALFLPKRLSIIHCPGHQKGNRAEARGNRMADQAAREVATRETPETSTLLAGKRTADGSEFEKRTADGSEFESPKKKAKVE

SEQ ID NO: 2605 - protein, 2094 aa, synthetic construct
MPAAKRVKLDGGDKKYSIGLDIGTNSVGWAVITDEYKVPSKKFKVLGNTDRHSIKKNLIGALLFDSGETAEATRLKRTARRRYTRRKNRICYLQEIFSNEMAKVDDSFFHRLEESFLVEEDKKHERHPIFGNIVDEVAYHEKYPTIYHLRKKLVDSTDKADLRLIYLALAHMIKFRGHFLIEGDLNPDNSDVDKLFIQLVQTYNQLFEENPINASGVDAKAILSARLSKSRRLENLIAQLPGEKKNGLFGNLIALSLGLTPNFKSNFDLAEDAKLQLSKDTYDDDLDNLLAQIGDQYADLFLAAKNLSDAILLSDILRVNTEITKAPLSASMIKRYDEHHQDLTLLKALVRQQLPEKYKEIFFDQSKNGYAGYIDGGASQEEFYKFIKPILEKMDGTEELLVKLNREDLLRKQRTFDNGSIPHQIHLGELHAILRRQEDFYPFLKDNREKIEKILTFRIPYYVGPLARGNSRFAWMTRKSEETITPWNFEEVVDKGASAQSFIERMTNFDKNLPNEKVLPKHSLLYEYFTVYNELTKVKYVTEGMRKPAFLSGEQKKAIVDLLFKTNRKVTVKQLKEDYFKKIECFDSVEISGVEDRFNASLGTYHDLLKIIKDKDFLDNEENEDILEDIVLTLTLFEDREMIEERLKTYAHLFDDKVMKQLKRRRYTGWGRLSRKLINGIRDKQSGKTILDFLKSDGFANRNFMQLIHDDSLTFKEDIQKAQVSGQGDSLHEHIANLAGSPAIKKGILQTVKVVDELVKVMGRHKPENIVIEMARENQTTQKGQKNSRERMKRIEEGIKELGSQILKEHPVENTQLQNEKLYLYYLQNGRDMYVDQELDINRLSDYDVDHIVPQSFLKDDSIDNKVLTRSDKARGKSDNVPSEEVVKKMKNYWRQLLNAKLITQRKFDNLTKAERGGLSELDKAGFIKRQLVETRQITKHVAQILDSRMNTKYDENDKLIREVKVITLKSKLVSDFRKDFQFYKVREINNYHHAHDAYLNAVVGTALIKKYPKLESEFVYGDYKVYDVRKMIAKSEQEIGKATAKYFFYSNIMNFFKTEITLANGEIRKRPLIETNGETGEIVWDKGRDFATVRKVLSMPQVNIVKKTEVQTGGFSKESILPKRNSDKLIARKKDWDPKKYGGFDSPTVAYSVLVVAKVEKGKSKKLKSVKELLGITIMERSSFEKNPIDFLEAKGYKEVKKDLIIKLPKYSLFELENGRKRMLASAGELQKGNELALPSKYVNFLYLASHYEKLKGSPEDNEQKQLFVEQHKHYLDEIIEQISEFSKRVILADANLDKVLSAYNKHRDKPIREQAENIIHLFTLTNLGAPAAFKYFDTTIDRKRYTSTKEVLDATLIHQSITGLYETRIDLSQLGGDGGGGGGGSGSSGGTLNIEDEYRLHETSKGPDVPLGSTWLSDFPQAWAETGGMGLAVRQAPLIIPLKATSTPVSIKQYPMSQEARLGIKPHIQRLLDQGILVPCQSPWNTPLLPVKKPGTNDYRPVQDLREVNKRVEDIHPTVPNPYNLLSGLPPSHQWYTVLDLKDAFFCLRLHPTSQSLFAFEWRDPEMGISGQLTWTRLPQGFKNSPTLFNEALHRDLADFRIQHPDLILLQYVDDLLLAATSELDCQQGTRALLQTLGDLGYRASAKKAQICQKQVKYLGYLLKEGQRWLTEARKETVMGQPTPKTPRQLREFLGKAGFCRLFIPGFAEMAAPLYPLTKPGTLFEWGPDQQKAYQEIKQALLTAPALGLPDLTKPFELFVDEKQGYAKGVLTQKLGPWRRPVAYLSKKLDPVAAGWPPCLRMVAAIAVLTKDAGKLTMGQPLVILAPHAVEALVKQPPDRWLSNARMTHYQALLLDTDRVQFGPIVALNPATLLPLPEEGLQHDCLDILAEAHGTRPDLTDQPLPDADHTWYTDGSSFLQEGQRKAGAAVTTETEVVWAKALPAGTSAQRAELIALTQALKMAEGKKLNVYTDSRYAFATAHIHGEIYRRRGWLTSEGKEIKNKDEILALLKALFLPKRLSIIHCPGHQKGNRAEARGNRMADQAAREVATRETPETSTLLAGKRTADGSEFEKRTADGSEFESPKKKAKVE

SEQ ID NO: 2606 - protein, 2091 aa, synthetic construct
MPAAKRVKLDGGDKKYSIGLDIGTNSVGWAVITDEYKVPSKKFKVLGNTDRHSIKKNLIGALLFDSGETAEATRLKRTARRRYTRRKNRICYLQEIFSNEMAKVDDSFFHRLEESFLVEEDKKHERHPIFGNIVDEVAYHEKYPTIYHLRKKLVDSTDKADLRLIYLALAHMIKFRGHFLIEGDLNPDNSDVDKLFIQLVQTYNQLFEENPINASGVDAKAILSARLSKSRRLENLIAQLPGEKKNGLFGNLIALSLGLTPNFKSNFDLAEDAKLQLSKDTYDDDLDNLLAQIGDQYADLFLAAKNLSDAILLSDILRVNTEITKAPLSASMIKRYDEHHQDLTLLKALVRQQLPEKYKEIFFDQSKNGYAGYIDGGASQEEFYKFIKPILEKMDGTEELLVKLNREDLLRKQRTFDNGSIPHQIHLGELHAILRRQEDFYPFLKDNREKIEKILTFRIPYYVGPLARGNSRFAWMTRKSEETITPWNFEEVVDKGASAQSFIERMTNFDKNLPNEKVLPKHSLLYEYFTVYNELTKVKYVTEGMRKPAFLSGEQKKAIVDLLFKTNRKVTVKQLKEDYFKKIECFDSVEISGVEDRFNASLGTYHDLLKIIKDKDFLDNEENEDILEDIVLTLTLFEDREMIEERLKTYAHLFDDKVMKQLKRRRYTGWGRLSRKLINGIRDKQSGKTILDFLKSDGFANRNFMQLIHDDSLTFKEDIQKAQVSGQGDSLHEHIANLAGSPAIKKGILQTVKVVDELVKVMGRHKPENIVIEMARENQTTQKGQKNSRERMKRIEEGIKELGSQILKEHPVENTQLQNEKLYLYYLQNGRDMYVDQELDINRLSDYDVDHIVPQSFLKDDSIDNKVLTRSDKARGKSDNVPSEEVVKKMKNYWRQLLNAKLITQRKFDNLTKAERGGLSELDKAGFIKRQLVETRQITKHVAQILDSRMNTKYDENDKLIREVKVITLKSKLVSDFRKDFQFYKVREINNYHHAHDAYLNAVVGTALIKKYPKLESEFVYGDYKVYDVRKMIAKSEQEIGKATAKYFFYSNIMNFFKTEITLANGEIRKRPLIETNGETGEIVWDKGRDFATVRKVLSMPQVNIVKKTEVQTGGFSKESILPKRNSDKLIARKKDWDPKKYGGFDSPTVAYSVLVVAKVEKGKSKKLKSVKELLGITIMERSSFEKNPIDFLEAKGYKEVKKDLIIKLPKYSLFELENGRKRMLASAGELQKGNELALPSKYVNFLYLASHYEKLKGSPEDNEQKQLFVEQHKHYLDEIIEQISEFSKRVILADANLDKVLSAYNKHRDKPIREQAENIIHLFTLTNLGAPAAFKYFDTTIDRKRYTSTKEVLDATLIHQSITGLYETRIDLSQLGGDGGPAPGSSGGTLNIEDEYRLHETSKGPDVPLGSTWLSDFPQAWAETGGMGLAVRQAPLIIPLKATSTPVSIKQYPMSQEARLGIKPHIQRLLDQGILVPCQSPWNTPLLPVKKPGTNDYRPVQDLREVNKRVEDIHPTVPNPYNLLSGLPPSHQWYTVLDLKDAFFCLRLHPTSQSLFAFEWRDPEMGISGQLTWTRLPQGFKNSPTLFNEALHRDLADFRIQHPDLILLQYVDDLLLAATSELDCQQGTRALLQTLGDLGYRASAKKAQICQKQVKYLGYLLKEGQRWLTEARKETVMGQPTPKTPRQLREFLGKAGFCRLFIPGFAEMAAPLYPLTKPGTLFEWGPDQQKAYQEIKQALLTAPALGLPDLTKPFELFVDEKQGYAKGVLTQKLGPWRRPVAYLSKKLDPVAAGWPPCLRMVAAIAVLTKDAGKLTMGQPLVILAPHAVEALVKQPPDRWLSNARMTHYQALLLDTDRVQFGPIVALNPATLLPLPEEGLQHDCLDILAEAHGTRPDLTDQPLPDADHTWYTDGSSFLQEGQRKAGAAVTTETEVVWAKALPAGTSAQRAELIALTQALKMAEGKKLNVYTDSRYAFATAHIHGEIYRRRGWLTSEGKEIKNKDEILALLKALFLPKRLSIIHCPGHQKGNRAEARGNRMADQAAREVATRETPETSTLLAGKRTADGSEFEKRTADGSEFESPKKKAKVE

SEQ ID NO: 2607 - protein, 2093 aa, synthetic construct
MPAAKRVKLDGGDKKYSIGLDIGTNSVGWAVITDEYKVPSKKFKVLGNTDRHSIKKNLIGALLFDSGETAEATRLKRTARRRYTRRKNRICYLQEIFSNEMAKVDDSFFHRLEESFLVEEDKKHERHPIFGNIVDEVAYHEKYPTIYHLRKKLVDSTDKADLRLIYLALAHMIKFRGHFLIEGDLNPDNSDVDKLFIQLVQTYNQLFEENPINASGVDAKAILSARLSKSRRLENLIAQLPGEKKNGLFGNLIALSLGLTPNFKSNFDLAEDAKLQLSKDTYDDDLDNLLAQIGDQYADLFLAAKNLSDAILLSDILRVNTEITKAPLSASMIKRYDEHHQDLTLLKALVRQQLPEKYKEIFFDQSKNGYAGYIDGGASQEEFYKFIKPILEKMDGTEELLVKLNREDLLRKQRTFDNGSIPHQIHLGELHAILRRQEDFYPFLKDNREKIEKILTFRIPYYVGPLARGNSRFAWMTRKSEETITPWNFEEVVDKGASAQSFIERMTNFDKNLPNEKVLPKHSLLYEYFTVYNELTKVKYVTEGMRKPAFLSGEQKKAIVDLLFKTNRKVTVKQLKEDYFKKIECFDSVEISGVEDRFNASLGTYHDLLKIIKDKDFLDNEENEDILEDIVLTLTLFEDREMIEERLKTYAHLFDDKVMKQLKRRRYTGWGRLSRKLINGIRDKQSGKTILDFLKSDGFANRNFMQLIHDDSLTFKEDIQKAQVSGQGDSLHEHIANLAGSPAIKKGILQTVKVVDELVKVMGRHKPENIVIEMARENQTTQKGQKNSRERMKRIEEGIKELGSQILKEHPVENTQLQNEKLYLYYLQNGRDMYVDQELDINRLSDYDVDHIVPQSFLKDDSIDNKVLTRSDKARGKSDNVPSEEVVKKMKNYWRQLLNAKLITQRKFDNLTKAERGGLSELDKAGFIKRQLVETRQITKHVAQILDSRMNTKYDENDKLIREVKVITLKSKLVSDFRKDFQFYKVREINNYHHAHDAYLNAVVGTALIKKYPKLESEFVYGDYKVYDVRKMIAKSEQEIGKATAKYFFYSNIMNFFKTEITLANGEIRKRPLIETNGETGEIVWDKGRDFATVRKVLSMPQVNIVKKTEVQTGGFSKESILPKRNSDKLIARKKDWDPKKYGGFDSPTVAYSVLVVAKVEKGKSKKLKSVKELLGITIMERSSFEKNPIDFLEAKGYKEVKKDLIIKLPKYSLFELENGRKRMLASAGELQKGNELALPSKYVNFLYLASHYEKLKGSPEDNEQKQLFVEQHKHYLDEIIEQISEFSKRVILADANLDKVLSAYNKHRDKPIREQAENIIHLFTLTNLGAPAAFKYFDTTIDRKRYTSTKEVLDATLIHQSITGLYETRIDLSQLGGDGGGGGEAAAKGGTLNIEDEYRLHETSKGPDVPLGSTWLSDFPQAWAETGGMGLAVRQAPLIIPLKATSTPVSIKQYPMSQEARLGIKPHIQRLLDQGILVPCQSPWNTPLLPVKKPGTNDYRPVQDLREVNKRVEDIHPTVPNPYNLLSGLPPSHQWYTVLDLKDAFFCLRLHPTSQSLFAFEWRDPEMGISGQLTWTRLPQGFKNSPTLFNEALHRDLADFRIQHPDLILLQYVDDLLLAATSELDCQQGTRALLQTLGDLGYRASAKKAQICQKQVKYLGYLLKEGQRWLTEARKETVMGQPTPKTPRQLREFLGKAGFCRLFIPGFAEMAAPLYPLTKPGTLFEWGPDQQKAYQEIKQALLTAPALGLPDLTKPFELFVDEKQGYAKGVLTQKLGPWRRPVAYLSKKLDPVAAGWPPCLRMVAAIAVLTKDAGKLTMGQPLVILAPHAVEALVKQPPDRWLSNARMTHYQALLLDTDRVQFGPIVALNPATLLPLPEEGLQHDCLDILAEAHGTRPDLTDQPLPDADHTWYTDGSSFLQEGQRKAGAAVTTETEVVWAKALPAGTSAQRAELIALTQALKMAEGKKLNVYTDSRYAFATAHIHGEIYRRRGWLTSEGKEIKNKDEILALLKALFLPKRLSIIHCPGHQKGNRAEARGNRMADQAAREVATRETPETSTLLAGKRTADGSEFEKRTADGSEFESPKKKAKVE

SEQ ID NO: 2608 - protein, 2096 aa, synthetic construct
MPAAKRVKLDGGDKKYSIGLDIGTNSVGWAVITDEYKVPSKKFKVLGNTDRHSIKKNLIGALLFDSGETAEATRLKRTARRRYTRRKNRICYLQEIFSNEMAKVDDSFFHRLEESFLVEEDKKHERHPIFGNIVDEVAYHEKYPTIYHLRKKLVDSTDKADLRLIYLALAHMIKFRGHFLIEGDLNPDNSDVDKLFIQLVQTYNQLFEENPINASGVDAKAILSARLSKSRRLENLIAQLPGEKKNGLFGNLIALSLGLTPNFKSNFDLAEDAKLQLSKDTYDDDLDNLLAQIGDQYADLFLAAKNLSDAILLSDILRVNTEITKAPLSASMIKRYDEHHQDLTLLKALVRQQLPEKYKEIFFDQSKNGYAGYIDGGASQEEFYKFIKPILEKMDGTEELLVKLNREDLLRKQRTFDNGSIPHQIHLGELHAILRRQEDFYPFLKDNREKIEKILTFRIPYYVGPLARGNSRFAWMTRKSEETITPWNFEEVVDKGASAQSFIERMTNFDKNLPNEKVLPKHSLLYEYFTVYNELTKVKYVTEGMRKPAFLSGEQKKAIVDLLFKTNRKVTVKQLKEDYFKKIECFDSVEISGVEDRFNASLGTYHDLLKIIKDKDFLDNEENEDILEDIVLTLTLFEDREMIEERLKTYAHLFDDKVMKQLKRRRYTGWGRLSRKLINGIRDKQSGKTILDFLKSDGFANRNFMQLIHDDSLTFKEDIQKAQVSGQGDSLHEHIANLAGSPAIKKGILQTVKVVDELVKVMGRHKPENIVIEMARENQTTQKGQKNSRERMKRIEEGIKELGSQILKEHPVENTQLQNEKLYLYYLQNGRDMYVDQELDINRLSDYDVDHIVPQSFLKDDSIDNKVLTRSDKARGKSDNVPSEEVVKKMKNYWRQLLNAKLITQRKFDNLTKAERGGLSELDKAGFIKRQLVETRQITKHVAQILDSRMNTKYDENDKLIREVKVITLKSKLVSDFRKDFQFYKVREINNYHHAHDAYLNAVVGTALIKKYPKLESEFVYGDYKVYDVRKMIAKSEQEIGKATAKYFFYSNIMNFFKTEITLANGEIRKRPLIETNGETGEIVWDKGRDFATVRKVLSMPQVNIVKKTEVQTGGFSKESILPKRNSDKLIARKKDWDPKKYGGFDSPTVAYSVLVVAKVEKGKSKKLKSVKELLGITIMERSSFEKNPIDFLEAKGYKEVKKDLIIKLPKYSLFELENGRKRMLASAGELQKGNELALPSKYVNFLYLASHYEKLKGSPEDNEQKQLFVEQHKHYLDEIIEQISEFSKRVILADANLDKVLSAYNKHRDKPIREQAENIIHLFTLTNLGAPAAFKYFDTTIDRKRYTSTKEVLDATLIHQSITGLYETRIDLSQLGGDGGGGSEAAAKGSSGGTLNIEDEYRLHETSKGPDVPLGSTWLSDFPQAWAETGGMGLAVRQAPLIIPLKATSTPVSIKQYPMSQEARLGIKPHIQRLLDQGILVPCQSPWNTPLLPVKKPGTNDYRPVQDLREVNKRVEDIHPTVPNPYNLLSGLPPSHQWYTVLDLKDAFFCLRLHPTSQSLFAFEWRDPEMGISGQLTWTRLPQGFKNSPTLFNEALHRDLADFRIQHPDLILLQYVDDLLLAATSELDCQQGTRALLQTLGDLGYRASAKKAQICQKQVKYLGYLLKEGQRWLTEARKETVMGQPTPKTPRQLREFLGKAGFCRLFIPGFAEMAAPLYPLTKPGTLFEWGPDQQKAYQEIKQALLTAPALGLPDLTKPFELFVDEKQGYAKGVLTQKLGPWRRPVAYLSKKLDPVAAGWPPCLRMVAAIAVLTKDAGKLTMGQPLVILAPHAVEALVKQPPDRWLSNARMTHYQALLLDTDRVQFGPIVALNPATLLPLPEEGLQHDCLDILAEAHGTRPDLTDQPLPDADHTWYTDGSSFLQEGQRKAGAAVTTETEVVWAKALPAGTSAQRAELIALTQALKMAEGKKLNVYTDSRYAFATAHIHGEIYRRRGWLTSEGKEIKNKDEILALLKALFLPKRLSIIHCPGHQKGNRAEARGNRMADQAAREVATRETPETSTLLAGKRTADGSEFEKRTADGSEFESPKKKAKVE

SEQ ID NO: 2609 - protein, 2118 aa, synthetic construct
MPAAKRVKLDGGDKKYSIGLDIGTNSVGWAVITDEYKVPSKKFKVLGNTDRHSIKKNLIGALLFDSGETAEATRLKRTARRRYTRRKNRICYLQEIFSNEMAKVDDSFFHRLEESFLVEEDKKHERHPIFGNIVDEVAYHEKYPTIYHLRKKLVDSTDKADLRLIYLALAHMIKFRGHFLIEGDLNPDNSDVDKLFIQLVQTYNQLFEENPINASGVDAKAILSARLSKSRRLENLIAQLPGEKKNGLFGNLIALSLGLTPNFKSNFDLAEDAKLQLSKDTYDDDLDNLLAQIGDQYADLFLAAKNLSDAILLSDILRVNTEITKAPLSASMIKRYDEHHQDLTLLKALVRQQLPEKYKEIFFDQSKNGYAGYIDGGASQEEFYKFIKPILEKMDGTEELLVKLNREDLLRKQRTFDNGSIPHQIHLGELHAILRRQEDFYPFLKDNREKIEKILTFRIPYYVGPLARGNSRFAWMTRKSEETITPWNFEEVVDKGASAQSFIERMTNFDKNLPNEKVLPKHSLLYEYFTVYNELTKVKYVTEGMRKPAFLSGEQKKAIVDLLFKTNRKVTVKQLKEDYFKKIECFDSVEISGVEDRFNASLGTYHDLLKIIKDKDFLDNEENEDILEDIVLTLTLFEDREMIEERLKTYAHLFDDKVMKQLKRRRYTGWGRLSRKLINGIRDKQSGKTILDFLKSDGFANRNFMQLIHDDSLTFKEDIQKAQVSGQGDSLHEHIANLAGSPAIKKGILQTVKVVDELVKVMGRHKPENIVIEMARENQTTQKGQKNSRERMKRIEEGIKELGSQILKEHPVENTQLQNEKLYLYYLQNGRDMYVDQELDINRLSDYDVDHIVPQSFLKDDSIDNKVLTRSDKARGKSDNVPSEEVVKKMKNYWRQLLNAKLITQRKFDNLTKAERGGLSELDKAGFIKRQLVETRQITKHVAQILDSRMNTKYDENDKLIREVKVITLKSKLVSDFRKDFQFYKVREINNYHHAHDAYLNAVVGTALIKKYPKLESEFVYGDYKVYDVRKMIAKSEQEIGKATAKYFFYSNIMNFFKTEITLANGEIRKRPLIETNGETGEIVWDKGRDFATVRKVLSMPQVNIVKKTEVQTGGFSKESILPKRNSDKLIARKKDWDPKKYGGFDSPTVAYSVLVVAKVEKGKSKKLKSVKELLGITIMERSSFEKNPIDFLEAKGYKEVKKDLIIKLPKYSLFELENGRKRMLASAGELQKGNELALPSKYVNFLYLASHYEKLKGSPEDNEQKQLFVEQHKHYLDEIIEQISEFSKRVILADANLDKVLSAYNKHRDKPIREQAENIIHLFTLTNLGAPAAFKYFDTTIDRKRYTSTKEVLDATLIHQSITGLYETRIDLSQLGGDGGSGGSSGGSSGSETPGTSESATPESSGGSSGGSSGGTLNIEDEYRLHETSKGPDVPLGSTWLSDFPQAWAETGGMGLAVRQAPLIIPLKATSTPVSIKQYPMSQEARLGIKPHIQRLLDQGILVPCQSPWNTPLLPVKKPGTNDYRPVQDLREVNKRVEDIHPTVPNPYNLLSGLPPSHQWYTVLDLKDAFFCLRLHPTSQSLFAFEWRDPEMGISGQLTWTRLPQGFKNSPTLFNEALHRDLADFRIQHPDLILLQYVDDLLLAATSELDCQQGTRALLQTLGDLGYRASAKKAQICQKQVKYLGYLLKEGQRWLTEARKETVMGQPTPKTPRQLREFLGKAGFCRLFIPGFAEMAAPLYPLTKPGTLFEWGPDQQKAYQEIKQALLTAPALGLPDLTKPFELFVDEKQGYAKGVLTQKLGPWRRPVAYLSKKLDPVAAGWPPCLRMVAAIAVLTKDAGKLTMGQPLVILAPHAVEALVKQPPDRWLSNARMTHYQALLLDTDRVQFGPIVALNPATLLPLPEEGLQHDCLDILAEAHGTRPDLTDQPLPDADHTWYTDGSSFLQEGQRKAGAAVTTETEVVWAKALPAGTSAQRAELIALTQALKMAEGKKLNVYTDSRYAFATAHIHGEIYRRRGWLTSEGKEIKNKDEILALLKALFLPKRLSIIHCPGHQKGNRAEARGNRMADQAAREVATRETPETSTLLAGKRTADGSEFEKRTADGSEFESPKKKAKVE

SEQ ID NO: 2610 - protein, 2125 aa, synthetic construct
MPAAKRVKLDGGDKKYSIGLDIGTNSVGWAVITDEYKVPSKKFKVLGNTDRHSIKKNLIGALLFDSGETAEATRLKRTARRRYTRRKNRICYLQEIFSNEMAKVDDSFFHRLEESFLVEEDKKHERHPIFGNIVDEVAYHEKYPTIYHLRKKLVDSTDKADLRLIYLALAHMIKFRGHFLIEGDLNPDNSDVDKLFIQLVQTYNQLFEENPINASGVDAKAILSARLSKSRRLENLIAQLPGEKKNGLFGNLIALSLGLTPNFKSNFDLAEDAKLQLSKDTYDDDLDNLLAQIGDQYADLFLAAKNLSDAILLSDILRVNTEITKAPLSASMIKRYDEHHQDLTLLKALVRQQLPEKYKEIFFDQSKNGYAGYIDGGASQEEFYKFIKPILEKMDGTEELLVKLNREDLLRKQRTFDNGSIPHQIHLGELHAILRRQEDFYPFLKDNREKIEKILTFRIPYYVGPLARGNSRFAWMTRKSEETITPWNFEEVVDKGASAQSFIERMTNFDKNLPNEKVLPKHSLLYEYFTVYNELTKVKYVTEGMRKPAFLSGEQKKAIVDLLFKTNRKVTVKQLKEDYFKKIECFDSVEISGVEDRFNASLGTYHDLLKIIKDKDFLDNEENEDILEDIVLTLTLFEDREMIEERLKTYAHLFDDKVMKQLKRRRYTGWGRLSRKLINGIRDKQSGKTILDFLKSDGFANRNFMQLIHDDSLTFKEDIQKAQVSGQGDSLHEHIANLAGSPAIKKGILQTVKVVDELVKVMGRHKPENIVIEMARENQTTQKGQKNSRERMKRIEEGIKELGSQILKEHPVENTQLQNEKLYLYYLQNGRDMYVDQELDINRLSDYDVDHIVPQSFLKDDSIDNKVLTRSDKARGKSDNVPSEEVVKKMKNYWRQLLNAKLITQRKFDNLTKAERGGLSELDKAGFIKRQLVETRQITKHVAQILDSRMNTKYDENDKLIREVKVITLKSKLVSDFRKDFQFYKVREINNYHHAHDAYLNAVVGTALIKKYPKLESEFVYGDYKVYDVRKMIAKSEQEIGKATAKYFFYSNIMNFFKTEITLANGEIRKRPLIETNGETGEIVWDKGRDFATVRKVLSMPQVNIVKKTEVQTGGFSKESILPKRNSDKLIARKKDWDPKKYGGFDSPTVAYSVLVVAKVEKGKSKKLKSVKELLGITIMERSSFEKNPIDFLEAKGYKEVKKDLIIKLPKYSLFELENGRKRMLASAGELQKGNELALPSKYVNFLYLASHYEKLKGSPEDNEQKQLFVEQHKHYLDEIIEQISEFSKRVILADANLDKVLSAYNKHRDKPIREQAENIIHLFTLTNLGAPAAFKYFDTTIDRKRYTSTKEVLDATLIHQSITGLYETRIDLSQLGGDGGEAAAKEAAAKEAAAKEAAAKGGTLNIEDEYRLHETSKEPDVSLGSTWLSDFPQAWAETGGMGLAVRQAPLIIPLKATSTPVSIKQYPMSQEARLGIKPHIQRLLDQGILVPCQSPWNTPLLPVKKPGTNDYRPVQDLREVNKRVEDIHPTVPNPYNLLSGLPPSHQWYTVLDLKDAFFCLRLHPTSQPLFAFEWRDPEMGISGQLTWTRLPQGFKNSPTLFNEALHRDLADFRIQHPDLILLQYVDDLLLAATSELDCQQGTRALLQTLGNLGYRASAKKAQICQKQVKYLGYLLKEGQRWLTEARKETVMGQPTPKTPRQLREFLGKAGFCRLFIPGFAEMAAPLYPLTKPGTLFNWGPDQQKAYQEIKQALLTAPALGLPDLTKPFELFVDEKQGYAKGVLTQKLGPWRRPVAYLSKKLDPVAAGWPPCLRMVAAIAVLTKDAGKLTMGQPLVILAPHAVEALVKQPPDRWLSNARMTHYQALLLDTDRVQFGPVVALNPATLLPLPEEGLQHNCLDILAEAHGTRPDLTDQPLPDADHTWYTDGSSLLQEGQRKAGAAVTTETEVIWAKALPAGTSAQRAELIALTQALKMAEGKKLNVYTDSRYAFATAHIHGEIYRRRGWLTSEGKEIKNKDEILALLKALFLPKRLSIIHCPGHQKGHSAEARGNRMADQAARKAAITETPDTSTLLIENSSPSGGSKRTADGSEFEAGKRTADGSEFEKRTADGSEFESPKKKAKVE

SEQ ID NO: 2611 - protein, 2151 aa, synthetic construct
MPAAKRVKLDGGDKKYSIGLDIGTNSVGWAVITDEYKVPSKKFKVLGNTDRHSIKKNLIGALLFDSGETAEATRLKRTARRRYTRRKNRICYLQEIFSNEMAKVDDSFFHRLEESFLVEEDKKHERHPIFGNIVDEVAYHEKYPTIYHLRKKLVDSTDKADLRLIYLALAHMIKFRGHFLIEGDLNPDNSDVDKLFIQLVQTYNQLFEENPINASGVDAKAILSARLSKSRRLENLIAQLPGEKKNGLFGNLIALSLGLTPNFKSNFDLAEDAKLQLSKDTYDDDLDNLLAQIGDQYADLFLAAKNLSDAILLSDILRVNTEITKAPLSASMIKRYDEHHQDLTLLKALVRQQLPEKYKEIFFDQSKNGYAGYIDGGASQEEFYKFIKPILEKMDGTEELLVKLNREDLLRKQRTFDNGSIPHQIHLGELHAILRRQEDFYPFLKDNREKIEKILTFRIPYYVGPLARGNSRFAWMTRKSEETITPWNFEEVVDKGASAQSFIERMTNFDKNLPNEKVLPKHSLLYEYFTVYNELTKVKYVTEGMRKPAFLSGEQKKAIVDLLFKTNRKVTVKQLKEDYFKKIECFDSVEISGVEDRFNASLGTYHDLLKIIKDKDFLDNEENEDILEDIVLTLTLFEDREMIEERLKTYAHLFDDKVMKQLKRRRYTGWGRLSRKLINGIRDKQSGKTILDFLKSDGFANRNFMQLIHDDSLTFKEDIQKAQVSGQGDSLHEHIANLAGSPAIKKGILQTVKVVDELVKVMGRHKPENIVIEMARENQTTQKGQKNSRERMKRIEEGIKELGSQILKEHPVENTQLQNEKLYLYYLQNGRDMYVDQELDINRLSDYDVDHIVPQSFLKDDSIDNKVLTRSDKARGKSDNVPSEEVVKKMKNYWRQLLNAKLITQRKFDNLTKAERGGLSELDKAGFIKRQLVETRQITKHVAQILDSRMNTKYDENDKLIREVKVITLKSKLVSDFRKDFQFYKVREINNYHHAHDAYLNAVVGTALIKKYPKLESEFVYGDYKVYDVRKMIAKSEQEIGKATAKYFFYSNIMNFFKTEITLANGEIRKRPLIETNGETGEIVWDKGRDFATVRKVLSMPQVNIVKKTEVQTGGFSKESILPKRNSDKLIARKKDWDPKKYGGFDSPTVAYSVLVVAKVEKGKSKKLKSVKELLGITIMERSSFEKNPIDFLEAKGYKEVKKDLIIKLPKYSLFELENGRKRMLASAGELQKGNELALPSKYVNFLYLASHYEKLKGSPEDNEQKQLFVEQHKHYLDEIIEQISEFSKRVILADANLDKVLSAYNKHRDKPIREQAENIIHLFTLTNLGAPAAFKYFDTTIDRKRYTSTKEVLDATLIHQSITGLYETRIDLSQLGGDGGAEAAAKEAAAKEAAAKEAAAKALEAEAAAKEAAAKEAAAKEAAAKAGGTLNIEDEYRLHETSKEPDVSLGSTWLSDFPQAWAETGGMGLAVRQAPLIIPLKATSTPVSIKQYPMSQEARLGIKPHIQRLLDQGILVPCQSPWNTPLLPVKKPGTNDYRPVQDLREVNKRVEDIHPTVPNPYNLLSGLPPSHQWYTVLDLKDAFFCLRLHPTSQPLFAFEWRDPEMGISGQLTWTRLPQGFKNSPTLFNEALHRDLADFRIQHPDLILLQYVDDLLLAATSELDCQQGTRALLQTLGNLGYRASAKKAQICQKQVKYLGYLLKEGQRWLTEARKETVMGQPTPKTPRQLREFLGKAGFCRLFIPGFAEMAAPLYPLTKPGTLFNWGPDQQKAYQEIKQALLTAPALGLPDLTKPFELFVDEKQGYAKGVLTQKLGPWRRPVAYLSKKLDPVAAGWPPCLRMVAAIAVLTKDAGKLTMGQPLVILAPHAVEALVKQPPDRWLSNARMTHYQALLLDTDRVQFGPVVALNPATLLPLPEEGLQHNCLDILAEAHGTRPDLTDQPLPDADHTWYTDGSSLLQEGQRKAGAAVTTETEVIWAKALPAGTSAQRAELIALTQALKMAEGKKLNVYTDSRYAFATAHIHGEIYRRRGWLTSEGKEIKNKDEILALLKALFLPKRLSIIHCPGHQKGHSAEARGNRMADQAARKAAITETPDTSTLLIENSSPSGGSKRTADGSEFEAGKRTADGSEFEKRTADGSEFESPKKKAKVE

SEQ ID NO: 2612 - protein, 2123 aa, synthetic construct
MPAAKRVKLDGGDKKYSIGLDIGTNSVGWAVITDEYKVPSKKFKVLGNTDRHSIKKNLIGALLFDSGETAEATRLKRTARRRYTRRKNRICYLQEIFSNEMAKVDDSFFHRLEESFLVEEDKKHERHPIFGNIVDEVAYHEKYPTIYHLRKKLVDSTDKADLRLIYLALAHMIKFRGHFLIEGDLNPDNSDVDKLFIQLVQTYNQLFEENPINASGVDAKAILSARLSKSRRLENLIAQLPGEKKNGLFGNLIALSLGLTPNFKSNFDLAEDAKLQLSKDTYDDDLDNLLAQIGDQYADLFLAAKNLSDAILLSDILRVNTEITKAPLSASMIKRYDEHHQDLTLLKALVRQQLPEKYKEIFFDQSKNGYAGYIDGGASQEEFYKFIKPILEKMDGTEELLVKLNREDLLRKQRTFDNGSIPHQIHLGELHAILRRQEDFYPFLKDNREKIEKILTFRIPYYVGPLARGNSRFAWMTRKSEETITPWNFEEVVDKGASAQSFIERMTNFDKNLPNEKVLPKHSLLYEYFTVYNELTKVKYVTEGMRKPAFLSGEQKKAIVDLLFKTNRKVTVKQLKEDYFKKIECFDSVEISGVEDRFNASLGTYHDLLKIIKDKDFLDNEENEDILEDIVLTLTLFEDREMIEERLKTYAHLFDDKVMKQLKRRRYTGWGRLSRKLINGIRDKQSGKTILDFLKSDGFANRNFMQLIHDDSLTFKEDIQKAQVSGQGDSLHEHIANLAGSPAIKKGILQTVKVVDELVKVMGRHKPENIVIEMARENQTTQKGQKNSRERMKRIEEGIKELGSQILKEHPVENTQLQNEKLYLYYLQNGRDMYVDQELDINRLSDYDVDHIVPQSFLKDDSIDNKVLTRSDKARGKSDNVPSEEVVKKMKNYWRQLLNAKLITQRKFDNLTKAERGGLSELDKAGFIKRQLVETRQITKHVAQILDSRMNTKYDENDKLIREVKVITLKSKLVSDFRKDFQFYKVREINNYHHAHDAYLNAVVGTALIKKYPKLESEFVYGDYKVYDVRKMIAKSEQEIGKATAKYFFYSNIMNFFKTEITLANGEIRKRPLIETNGETGEIVWDKGRDFATVRKVLSMPQVNIVKKTEVQTGGFSKESILPKRNSDKLIARKKDWDPKKYGGFDSPTVAYSVLVVAKVEKGKSKKLKSVKELLGITIMERSSFEKNPIDFLEAKGYKEVKKDLIIKLPKYSLFELENGRKRMLASAGELQKGNELALPSKYVNFLYLASHYEKLKGSPEDNEQKQLFVEQHKHYLDEIIEQISEFSKRVILADANLDKVLSAYNKHRDKPIREQAENIIHLFTLTNLGAPAAFKYFDTTIDRKRYTSTKEVLDATLIHQSITGLYETRIDLSQLGGDGGGSSGSSGSSGSSGSSGSSGGTLNIEDEYRLHETSKEPDVSLGSTWLSDFPQAWAETGGMGLAVRQAPLIIPLKATSTPVSIKQYPMSQEARLGIKPHIQRLLDQGILVPCQSPWNTPLLPVKKPGTNDYRPVQDLREVNKRVEDIHPTVPNPYNLLSGLPPSHQWYTVLDLKDAFFCLRLHPTSQPLFAFEWRDPEMGISGQLTWTRLPQGFKNSPTLFNEALHRDLADFRIQHPDLILLQYVDDLLLAATSELDCQQGTRALLQTLGNLGYRASAKKAQICQKQVKYLGYLLKEGQRWLTEARKETVMGQPTPKTPRQLREFLGKAGFCRLFIPGFAEMAAPLYPLTKPGTLFNWGPDQQKAYQEIKQALLTAPALGLPDLTKPFELFVDEKQGYAKGVLTQKLGPWRRPVAYLSKKLDPVAAGWPPCLRMVAAIAVLTKDAGKLTMGQPLVILAPHAVEALVKQPPDRWLSNARMTHYQALLLDTDRVQFGPVVALNPATLLPLPEEGLQHNCLDILAEAHGTRPDLTDQPLPDADHTWYTDGSSLLQEGQRKAGAAVTTETEVIWAKALPAGTSAQRAELIALTQALKMAEGKKLNVYTDSRYAFATAHIHGEIYRRRGWLTSEGKEIKNKDEILALLKALFLPKRLSIIHCPGHQKGHSAEARGNRMADQAARKAAITETPDTSTLLIENSSPSGGSKRTADGSEFEAGKRTADGSEFEKRTADGSEFESPKKKAKVE

SEQ ID NO: 2613 - protein, 2130 aa, synthetic construct
MPAAKRVKLDGGDKKYSIGLDIGTNSVGWAVITDEYKVPSKKFKVLGNTDRHSIKKNLIGALLFDSGETAEATRLKRTARRRYTRRKNRICYLQEIFSNEMAKVDDSFFHRLEESFLVEEDKKHERHPIFGNIVDEVAYHEKYPTIYHLRKKLVDSTDKADLRLIYLALAHMIKFRGHFLIEGDLNPDNSDVDKLFIQLVQTYNQLFEENPINASGVDAKAILSARLSKSRRLENLIAQLPGEKKNGLFGNLIALSLGLTPNFKSNFDLAEDAKLQLSKDTYDDDLDNLLAQIGDQYADLFLAAKNLSDAILLSDILRVNTEITKAPLSASMIKRYDEHHQDLTLLKALVRQQLPEKYKEIFFDQSKNGYAGYIDGGASQEEFYKFIKPILEKMDGTEELLVKLNREDLLRKQRTFDNGSIPHQIHLGELHAILRRQEDFYPFLKDNREKIEKILTFRIPYYVGPLARGNSRFAWMTRKSEETITPWNFEEVVDKGASAQSFIERMTNFDKNLPNEKVLPKHSLLYEYFTVYNELTKVKYVTEGMRKPAFLSGEQKKAIVDLLFKTNRKVTVKQLKEDYFKKIECFDSVEISGVEDRFNASLGTYHDLLKIIKDKDFLDNEENEDILEDIVLTLTLFEDREMIEERLKTYAHLFDDKVMKQLKRRRYTGWGRLSRKLINGIRDKQSGKTILDFLKSDGFANRNFMQLIHDDSLTFKEDIQKAQVSGQGDSLHEHIANLAGSPAIKKGILQTVKVVDELVKVMGRHKPENIVIEMARENQTTQKGQKNSRERMKRIEEGIKELGSQILKEHPVENTQLQNEKLYLYYLQNGRDMYVDQELDINRLSDYDVDHIVPQSFLKDDSIDNKVLTRSDKARGKSDNVPSEEVVKKMKNYWRQLLNAKLITQRKFDNLTKAERGGLSELDKAGFIKRQLVETRQITKHVAQILDSRMNTKYDENDKLIREVKVITLKSKLVSDFRKDFQFYKVREINNYHHAHDAYLNAVVGTALIKKYPKLESEFVYGDYKVYDVRKMIAKSEQEIGKATAKYFFYSNIMNFFKTEITLANGEIRKRPLIETNGETGEIVWDKGRDFATVRKVLSMPQVNIVKKTEVQTGGFSKESILPKRNSDKLIARKKDWDPKKYGGFDSPTVAYSVLVVAKVEKGKSKKLKSVKELLGITIMERSSFEKNPIDFLEAKGYKEVKKDLIIKLPKYSLFELENGRKRMLASAGELQKGNELALPSKYVNFLYLASHYEKLKGSPEDNEQKQLFVEQHKHYLDEIIEQISEFSKRVILADANLDKVLSAYNKHRDKPIREQAENIIHLFTLTNLGAPAAFKYFDTTIDRKRYTSTKEVLDATLIHQSITGLYETRIDLSQLGGDGGGGGGSGGGGSGGGGSGGGGSGGGGSGGTLNIEDEYRLHETSKEPDVSLGSTWLSDFPQAWAETGGMGLAVRQAPLIIPLKATSTPVSIKQYPMSQEARLGIKPHIQRLLDQGILVPCQSPWNTPLLPVKKPGTNDYRPVQDLREVNKRVEDIHPTVPNPYNLLSGLPPSHQWYTVLDLKDAFFCLRLHPTSQPLFAFEWRDPEMGISGQLTWTRLPQGFKNSPTLFNEALHRDLADFRIQHPDLILLQYVDDLLLAATSELDCQQGTRALLQTLGNLGYRASAKKAQICQKQVKYLGYLLKEGQRWLTEARKETVMGQPTPKTPRQLREFLGKAGFCRLFIPGFAEMAAPLYPLTKPGTLFNWGPDQQKAYQEIKQALLTAPALGLPDLTKPFELFVDEKQGYAKGVLTQKLGPWRRPVAYLSKKLDPVAAGWPPCLRMVAAIAVLTKDAGKLTMGQPLVILAPHAVEALVKQPPDRWLSNARMTHYQALLLDTDRVQFGPVVALNPATLLPLPEEGLQHNCLDILAEAHGTRPDLTDQPLPDADHTWYTDGSSLLQEGQRKAGAAVTTETEVIWAKALPAGTSAQRAELIALTQALKMAEGKKLNVYTDSRYAFATAHIHGEIYRRRGWLTSEGKEIKNKDEILALLKALFLPKRLSIIHCPGHQKGHSAEARGNRMADQAARKAAITETPDTSTLLIENSSPSGGSKRTADGSEFEAGKRTADGSEFEKRTADGSEFESPKKKAKVE

SEQ ID NO: 2614 - protein, 2116 aa, synthetic construct
MPAAKRVKLDGGDKKYSIGLDIGTNSVGWAVITDEYKVPSKKFKVLGNTDRHSIKKNLIGALLFDSGETAEATRLKRTARRRYTRRKNRICYLQEIFSNEMAKVDDSFFHRLEESFLVEEDKKHERHPIFGNIVDEVAYHEKYPTIYHLRKKLVDSTDKADLRLIYLALAHMIKFRGHFLIEGDLNPDNSDVDKLFIQLVQTYNQLFEENPINASGVDAKAILSARLSKSRRLENLIAQLPGEKKNGLFGNLIALSLGLTPNFKSNFDLAEDAKLQLSKDTYDDDLDNLLAQIGDQYADLFLAAKNLSDAILLSDILRVNTEITKAPLSASMIKRYDEHHQDLTLLKALVRQQLPEKYKEIFFDQSKNGYAGYIDGGASQEEFYKFIKPILEKMDGTEELLVKLNREDLLRKQRTFDNGSIPHQIHLGELHAILRRQEDFYPFLKDNREKIEKILTFRIPYYVGPLARGNSRFAWMTRKSEETITPWNFEEVVDKGASAQSFIERMTNFDKNLPNEKVLPKHSLLYEYFTVYNELTKVKYVTEGMRKPAFLSGEQKKAIVDLLFKTNRKVTVKQLKEDYFKKIECFDSVEISGVEDRFNASLGTYHDLLKIIKDKDFLDNEENEDILEDIVLTLTLFEDREMIEERLKTYAHLFDDKVMKQLKRRRYTGWGRLSRKLINGIRDKQSGKTILDFLKSDGFANRNFMQLIHDDSLTFKEDIQKAQVSGQGDSLHEHIANLAGSPAIKKGILQTVKVVDELVKVMGRHKPENIVIEMARENQTTQKGQKNSRERMKRIEEGIKELGSQILKEHPVENTQLQNEKLYLYYLQNGRDMYVDQELDINRLSDYDVDHIVPQSFLKDDSIDNKVLTRSDKARGKSDNVPSEEVVKKMKNYWRQLLNAKLITQRKFDNLTKAERGGLSELDKAGFIKRQLVETRQITKHVAQILDSRMNTKYDENDKLIREVKVITLKSKLVSDFRKDFQFYKVREINNYHHAHDAYLNAVVGTALIKKYPKLESEFVYGDYKVYDVRKMIAKSEQEIGKATAKYFFYSNIMNFFKTEITLANGEIRKRPLIETNGETGEIVWDKGRDFATVRKVLSMPQVNIVKKTEVQTGGFSKESILPKRNSDKLIARKKDWDPKKYGGFDSPTVAYSVLVVAKVEKGKSKKLKSVKELLGITIMERSSFEKNPIDFLEAKGYKEVKKDLIIKLPKYSLFELENGRKRMLASAGELQKGNELALPSKYVNFLYLASHYEKLKGSPEDNEQKQLFVEQHKHYLDEIIEQISEFSKRVILADANLDKVLSAYNKHRDKPIREQAENIIHLFTLTNLGAPAAFKYFDTTIDRKRYTSTKEVLDATLIHQSITGLYETRIDLSQLGGDGGEAAAKGGGPAPGGTLNIEDEYRLHETSKEPDVSLGSTWLSDFPQAWAETGGMGLAVRQAPLIIPLKATSTPVSIKQYPMSQEARLGIKPHIQRLLDQGILVPCQSPWNTPLLPVKKPGTNDYRPVQDLREVNKRVEDIHPTVPNPYNLLSGLPPSHQWYTVLDLKDAFFCLRLHPTSQPLFAFEWRDPEMGISGQLTWTRLPQGFKNSPTLFNEALHRDLADFRIQHPDLILLQYVDDLLLAATSELDCQQGTRALLQTLGNLGYRASAKKAQICQKQVKYLGYLLKEGQRWLTEARKETVMGQPTPKTPRQLREFLGKAGFCRLFIPGFAEMAAPLYPLTKPGTLFNWGPDQQKAYQEIKQALLTAPALGLPDLTKPFELFVDEKQGYAKGVLTQKLGPWRRPVAYLSKKLDPVAAGWPPCLRMVAAIAVLTKDAGKLTMGQPLVILAPHAVEALVKQPPDRWLSNARMTHYQALLLDTDRVQFGPVVALNPATLLPLPEEGLQHNCLDILAEAHGTRPDLTDQPLPDADHTWYTDGSSLLQEGQRKAGAAVTTETEVIWAKALPAGTSAQRAELIALTQALKMAEGKKLNVYTDSRYAFATAHIHGEIYRRRGWLTSEGKEIKNKDEILALLKALFLPKRLSIIHCPGHQKGHSAEARGNRMADQAARKAAITETPDTSTLLIENSSPSGGSKRTADGSEFEAGKRTADGSEFEKRTADGSEFESPKKKAKVE

SEQ ID NO: 2615 - protein, 2125 aa, synthetic construct
MPAAKRVKLDGGDKKYSIGLDIGTNSVGWAVITDEYKVPSKKFKVLGNTDRHSIKKNLIGALLFDSGETAEATRLKRTARRRYTRRKNRICYLQEIFSNEMAKVDDSFFHRLEESFLVEEDKKHERHPIFGNIVDEVAYHEKYPTIYHLRKKLVDSTDKADLRLIYLALAHMIKFRGHFLIEGDLNPDNSDVDKLFIQLVQTYNQLFEENPINASGVDAKAILSARLSKSRRLENLIAQLPGEKKNGLFGNLIALSLGLTPNFKSNFDLAEDAKLQLSKDTYDDDLDNLLAQIGDQYADLFLAAKNLSDAILLSDILRVNTEITKAPLSASMIKRYDEHHQDLTLLKALVRQQLPEKYKEIFFDQSKNGYAGYIDGGASQEEFYKFIKPILEKMDGTEELLVKLNREDLLRKQRTFDNGSIPHQIHLGELHAILRRQEDFYPFLKDNREKIEKILTFRIPYYVGPLARGNSRFAWMTRKSEETITPWNFEEVVDKGASAQSFIERMTNFDKNLPNEKVLPKHSLLYEYFTVYNELTKVKYVTEGMRKPAFLSGEQKKAIVDLLFKTNRKVTVKQLKEDYFKKIECFDSVEISGVEDRFNASLGTYHDLLKIIKDKDFLDNEENEDILEDIVLTLTLFEDREMIEERLKTYAHLFDDKVMKQLKRRRYTGWGRLSRKLINGIRDKQSGKTILDFLKSDGFANRNFMQLIHDDSLTFKEDIQKAQVSGQGDSLHEHIANLAGSPAIKKGILQTVKVVDELVKVMGRHKPENIVIEMARENQTTQKGQKNSRERMKRIEEGIKELGSQILKEHPVENTQLQNEKLYLYYLQNGRDMYVDQELDINRLSDYDVDHIVPQSFLKDDSIDNKVLTRSDKARGKSDNVPSEEVVKKMKNYWRQLLNAKLITQRKFDNLTKAERGGLSELDKAGFIKRQLVETRQITKHVAQILDSRMNTKYDENDKLIREVKVITLKSKLVSDFRKDFQFYKVREINNYHHAHDAYLNAVVGTALIKKYPKLESEFVYGDYKVYDVRKMIAKSEQEIGKATAKYFFYSNIMNFFKTEITLANGEIRKRPLIETNGETGEIVWDKGRDFATVRKVLSMPQVNIVKKTEVQTGGFSKESILPKRNSDKLIARKKDWDPKKYGGFDSPTVAYSVLVVAKVEKGKSKKLKSVKELLGITIMERSSFEKNPIDFLEAKGYKEVKKDLIIKLPKYSLFELENGRKRMLASAGELQKGNELALPSKYVNFLYLASHYEKLKGSPEDNEQKQLFVEQHKHYLDEIIEQISEFSKRVILADANLDKVLSAYNKHRDKPIREQAENIIHLFTLTNLGAPAAFKYFDTTIDRKRYTSTKEVLDATLIHQSITGLYETRIDLSQLGGDGGGGGGSGGGGSGGGGSGGGGSGGTLNIEDEYRLHETSKEPDVSLGSTWLSDFPQAWAETGGMGLAVRQAPLIIPLKATSTPVSIKQYPMSQEARLGIKPHIQRLLDQGILVPCQSPWNTPLLPVKKPGTNDYRPVQDLREVNKRVEDIHPTVPNPYNLLSGLPPSHQWYTVLDLKDAFFCLRLHPTSQPLFAFEWRDPEMGISGQLTWTRLPQGFKNSPTLFNEALHRDLADFRIQHPDLILLQYVDDLLLAATSELDCQQGTRALLQTLGNLGYRASAKKAQICQKQVKYLGYLLKEGQRWLTEARKETVMGQPTPKTPRQLREFLGKAGFCRLFIPGFAEMAAPLYPLTKPGTLFNWGPDQQKAYQEIKQALLTAPALGLPDLTKPFELFVDEKQGYAKGVLTQKLGPWRRPVAYLSKKLDPVAAGWPPCLRMVAAIAVLTKDAGKLTMGQPLVILAPHAVEALVKQPPDRWLSNARMTHYQALLLDTDRVQFGPVVALNPATLLPLPEEGLQHNCLDILAEAHGTRPDLTDQPLPDADHTWYTDGSSLLQEGQRKAGAAVTTETEVIWAKALPAGTSAQRAELIALTQALKMAEGKKLNVYTDSRYAFATAHIHGEIYRRRGWLTSEGKEIKNKDEILALLKALFLPKRLSIIHCPGHQKGHSAEARGNRMADQAARKAAITETPDTSTLLIENSSPSGGSKRTADGSEFEAGKRTADGSEFEKRTADGSEFESPKKKAKVE

SEQ ID NO: 2616 - protein, 2114 aa, synthetic construct
MPAAKRVKLDGGDKKYSIGLDIGTNSVGWAVITDEYKVPSKKFKVLGNTDRHSIKKNLIGALLFDSGETAEATRLKRTARRRYTRRKNRICYLQEIFSNEMAKVDDSFFHRLEESFLVEEDKKHERHPIFGNIVDEVAYHEKYPTIYHLRKKLVDSTDKADLRLIYLALAHMIKFRGHFLIEGDLNPDNSDVDKLFIQLVQTYNQLFEENPINASGVDAKAILSARLSKSRRLENLIAQLPGEKKNGLFGNLIALSLGLTPNFKSNFDLAEDAKLQLSKDTYDDDLDNLLAQIGDQYADLFLAAKNLSDAILLSDILRVNTEITKAPLSASMIKRYDEHHQDLTLLKALVRQQLPEKYKEIFFDQSKNGYAGYIDGGASQEEFYKFIKPILEKMDGTEELLVKLNREDLLRKQRTFDNGSIPHQIHLGELHAILRRQEDFYPFLKDNREKIEKILTFRIPYYVGPLARGNSRFAWMTRKSEETITPWNFEEVVDKGASAQSFIERMTNFDKNLPNEKVLPKHSLLYEYFTVYNELTKVKYVTEGMRKPAFLSGEQKKAIVDLLFKTNRKVTVKQLKEDYFKKIECFDSVEISGVEDRFNASLGTYHDLLKIIKDKDFLDNEENEDILEDIVLTLTLFEDREMIEERLKTYAHLFDDKVMKQLKRRRYTGWGRLSRKLINGIRDKQSGKTILDFLKSDGFANRNFMQLIHDDSLTFKEDIQKAQVSGQGDSLHEHIANLAGSPAIKKGILQTVKVVDELVKVMGRHKPENIVIEMARENQTTQKGQKNSRERMKRIEEGIKELGSQILKEHPVENTQLQNEKLYLYYLQNGRDMYVDQELDINRLSDYDVDHIVPQSFLKDDSIDNKVLTRSDKARGKSDNVPSEEVVKKMKNYWRQLLNAKLITQRKFDNLTKAERGGLSELDKAGFIKRQLVETRQITKHVAQILDSRMNTKYDENDKLIREVKVITLKSKLVSDFRKDFQFYKVREINNYHHAHDAYLNAVVGTALIKKYPKLESEFVYGDYKVYDVRKMIAKSEQEIGKATAKYFFYSNIMNFFKTEITLANGEIRKRPLIETNGETGEIVWDKGRDFATVRKVLSMPQVNIVKKTEVQTGGFSKESILPKRNSDKLIARKKDWDPKKYGGFDSPTVAYSVLVVAKVEKGKSKKLKSVKELLGITIMERSSFEKNPIDFLEAKGYKEVKKDLIIKLPKYSLFELENGRKRMLASAGELQKGNELALPSKYVNFLYLASHYEKLKGSPEDNEQKQLFVEQHKHYLDEIIEQISEFSKRVILADANLDKVLSAYNKHRDKPIREQAENIIHLFTLTNLGAPAAFKYFDTTIDRKRYTSTKEVLDATLIHQSITGLYETRIDLSQLGGDGGPAPGSSGGGGGTLNIEDEYRLHETSKEPDVSLGSTWLSDFPQAWAETGGMGLAVRQAPLIIPLKATSTPVSIKQYPMSQEARLGIKPHIQRLLDQGILVPCQSPWNTPLLPVKKPGTNDYRPVQDLREVNKRVEDIHPTVPNPYNLLSGLPPSHQWYTVLDLKDAFFCLRLHPTSQPLFAFEWRDPEMGISGQLTWTRLPQGFKNSPTLFNEALHRDLADFRIQHPDLILLQYVDDLLLAATSELDCQQGTRALLQTLGNLGYRASAKKAQICQKQVKYLGYLLKEGQRWLTEARKETVMGQPTPKTPRQLREFLGKAGFCRLFIPGFAEMAAPLYPLTKPGTLFNWGPDQQKAYQEIKQALLTAPALGLPDLTKPFELFVDEKQGYAKGVLTQKLGPWRRPVAYLSKKLDPVAAGWPPCLRMVAAIAVLTKDAGKLTMGQPLVILAPHAVEALVKQPPDRWLSNARMTHYQALLLDTDRVQFGPVVALNPATLLPLPEEGLQHNCLDILAEAHGTRPDLTDQPLPDADHTWYTDGSSLLQEGQRKAGAAVTTETEVIWAKALPAGTSAQRAELIALTQALKMAEGKKLNVYTDSRYAFATAHIHGEIYRRRGWLTSEGKEIKNKDEILALLKALFLPKRLSIIHCPGHQKGHSAEARGNRMADQAARKAAITETPDTSTLLIENSSPSGGSKRTADGSEFEAGKRTADGSEFEKRTADGSEFESPKKKAKVE

SEQ ID NO: 2617 - protein, 2114 aa, synthetic construct
MPAAKRVKLDGGDKKYSIGLDIGTNSVGWAVITDEYKVPSKKFKVLGNTDRHSIKKNLIGALLFDSGETAEATRLKRTARRRYTRRKNRICYLQEIFSNEMAKVDDSFFHRLEESFLVEEDKKHERHPIFGNIVDEVAYHEKYPTIYHLRKKLVDSTDKADLRLIYLALAHMIKFRGHFLIEGDLNPDNSDVDKLFIQLVQTYNQLFEENPINASGVDAKAILSARLSKSRRLENLIAQLPGEKKNGLFGNLIALSLGLTPNFKSNFDLAEDAKLQLSKDTYDDDLDNLLAQIGDQYADLFLAAKNLSDAILLSDILRVNTEITKAPLSASMIKRYDEHHQDLTLLKALVRQQLPEKYKEIFFDQSKNGYAGYIDGGASQEEFYKFIKPILEKMDGTEELLVKLNREDLLRKQRTFDNGSIPHQIHLGELHAILRRQEDFYPFLKDNREKIEKILTFRIPYYVGPLARGNSRFAWMTRKSEETITPWNFEEVVDKGASAQSFIERMTNFDKNLPNEKVLPKHSLLYEYFTVYNELTKVKYVTEGMRKPAFLSGEQKKAIVDLLFKTNRKVTVKQLKEDYFKKIECFDSVEISGVEDRFNASLGTYHDLLKIIKDKDFLDNEENEDILEDIVLTLTLFEDREMIEERLKTYAHLFDDKVMKQLKRRRYTGWGRLSRKLINGIRDKQSGKTILDFLKSDGFANRNFMQLIHDDSLTFKEDIQKAQVSGQGDSLHEHIANLAGSPAIKKGILQTVKVVDELVKVMGRHKPENIVIEMARENQTTQKGQKNSRERMKRIEEGIKELGSQILKEHPVENTQLQNEKLYLYYLQNGRDMYVDQELDINRLSDYDVDHIVPQSFLKDDSIDNKVLTRSDKARGKSDNVPSEEVVKKMKNYWRQLLNAKLITQRKFDNLTKAERGGLSELDKAGFIKRQLVETRQITKHVAQILDSRMNTKYDENDKLIREVKVITLKSKLVSDFRKDFQFYKVREINNYHHAHDAYLNAVVGTALIKKYPKLESEFVYGDYKVYDVRKMIAKSEQEIGKATAKYFFYSNIMNFFKTEITLANGEIRKRPLIETNGETGEIVWDKGRDFATVRKVLSMPQVNIVKKTEVQTGGFSKESILPKRNSDKLIARKKDWDPKKYGGFDSPTVAYSVLVVAKVEKGKSKKLKSVKELLGITIMERSSFEKNPIDFLEAKGYKEVKKDLIIKLPKYSLFELENGRKRMLASAGELQKGNELALPSKYVNFLYLASHYEKLKGSPEDNEQKQLFVEQHKHYLDEIIEQISEFSKRVILADANLDKVLSAYNKHRDKPIREQAENIIHLFTLTNLGAPAAFKYFDTTIDRKRYTSTKEVLDATLIHQSITGLYETRIDLSQLGGDGGGSSGGGGGSGGTLNIEDEYRLHETSKEPDVSLGSTWLSDFPQAWAETGGMGLAVRQAPLIIPLKATSTPVSIKQYPMSQEARLGIKPHIQRLLDQGILVPCQSPWNTPLLPVKKPGTNDYRPVQDLREVNKRVEDIHPTVPNPYNLLSGLPPSHQWYTVLDLKDAFFCLRLHPTSQPLFAFEWRDPEMGISGQLTWTRLPQGFKNSPTLFNEALHRDLADFRIQHPDLILLQYVDDLLLAATSELDCQQGTRALLQTLGNLGYRASAKKAQICQKQVKYLGYLLKEGQRWLTEARKETVMGQPTPKTPRQLREFLGKAGFCRLFIPGFAEMAAPLYPLTKPGTLFNWGPDQQKAYQEIKQALLTAPALGLPDLTKPFELFVDEKQGYAKGVLTQKLGPWRRPVAYLSKKLDPVAAGWPPCLRMVAAIAVLTKDAGKLTMGQPLVILAPHAVEALVKQPPDRWLSNARMTHYQALLLDTDRVQFGPVVALNPATLLPLPEEGLQHNCLDILAEAHGTRPDLTDQPLPDADHTWYTDGSSLLQEGQRKAGAAVTTETEVIWAKALPAGTSAQRAELIALTQALKMAEGKKLNVYTDSRYAFATAHIHGEIYRRRGWLTSEGKEIKNKDEILALLKALFLPKRLSIIHCPGHQKGHSAEARGNRMADQAARKAAITETPDTSTLLIENSSPSGGSKRTADGSEFEAGKRTADGSEFEKRTADGSEFESPKKKAKVE

SEQ ID NO: 2618 - protein, 2114 aa, synthetic construct
MPAAKRVKLDGGDKKYSIGLDIGTNSVGWAVITDEYKVPSKKFKVLGNTDRHSIKKNLIGALLFDSGETAEATRLKRTARRRYTRRKNRICYLQEIFSNEMAKVDDSFFHRLEESFLVEEDKKHERHPIFGNIVDEVAYHEKYPTIYHLRKKLVDSTDKADLRLIYLALAHMIKFRGHFLIEGDLNPDNSDVDKLFIQLVQTYNQLFEENPINASGVDAKAILSARLSKSRRLENLIAQLPGEKKNGLFGNLIALSLGLTPNFKSNFDLAEDAKLQLSKDTYDDDLDNLLAQIGDQYADLFLAAKNLSDAILLSDILRVNTEITKAPLSASMIKRYDEHHQDLTLLKALVRQQLPEKYKEIFFDQSKNGYAGYIDGGASQEEFYKFIKPILEKMDGTEELLVKLNREDLLRKQRTFDNGSIPHQIHLGELHAILRRQEDFYPFLKDNREKIEKILTFRIPYYVGPLARGNSRFAWMTRKSEETITPWNFEEVVDKGASAQSFIERMTNFDKNLPNEKVLPKHSLLYEYFTVYNELTKVKYVTEGMRKPAFLSGEQKKAIVDLLFKTNRKVTVKQLKEDYFKKIECFDSVEISGVEDRFNASLGTYHDLLKIIKDKDFLDNEENEDILEDIVLTLTLFEDREMIEERLKTYAHLFDDKVMKQLKRRRYTGWGRLSRKLINGIRDKQSGKTILDFLKSDGFANRNFMQLIHDDSLTFKEDIQKAQVSGQGDSLHEHIANLAGSPAIKKGILQTVKVVDELVKVMGRHKPENIVIEMARENQTTQKGQKNSRERMKRIEEGIKELGSQILKEHPVENTQLQNEKLYLYYLQNGRDMYVDQELDINRLSDYDVDHIVPQSFLKDDSIDNKVLTRSDKARGKSDNVPSEEVVKKMKNYWRQLLNAKLITQRKFDNLTKAERGGLSELDKAGFIKRQLVETRQITKHVAQILDSRMNTKYDENDKLIREVKVITLKSKLVSDFRKDFQFYKVREINNYHHAHDAYLNAVVGTALIKKYPKLESEFVYGDYKVYDVRKMIAKSEQEIGKATAKYFFYSNIMNFFKTEITLANGEIRKRPLIETNGETGEIVWDKGRDFATVRKVLSMPQVNIVKKTEVQTGGFSKESILPKRNSDKLIARKKDWDPKKYGGFDSPTVAYSVLVVAKVEKGKSKKLKSVKELLGITIMERSSFEKNPIDFLEAKGYKEVKKDLIIKLPKYSLFELENGRKRMLASAGELQKGNELALPSKYVNFLYLASHYEKLKGSPEDNEQKQLFVEQHKHYLDEIIEQISEFSKRVILADANLDKVLSAYNKHRDKPIREQAENIIHLFTLTNLGAPAAFKYFDTTIDRKRYTSTKEVLDATLIHQSITGLYETRIDLSQLGGDGGGGGPAPGGSGGTLNIEDEYRLHETSKEPDVSLGSTWLSDFPQAWAETGGMGLAVRQAPLIIPLKATSTPVSIKQYPMSQEARLGIKPHIQRLLDQGILVPCQSPWNTPLLPVKKPGTNDYRPVQDLREVNKRVEDIHPTVPNPYNLLSGLPPSHQWYTVLDLKDAFFCLRLHPTSQPLFAFEWRDPEMGISGQLTWTRLPQGFKNSPTLFNEALHRDLADFRIQHPDLILLQYVDDLLLAATSELDCQQGTRALLQTLGNLGYRASAKKAQICQKQVKYLGYLLKEGQRWLTEARKETVMGQPTPKTPRQLREFLGKAGFCRLFIPGFAEMAAPLYPLTKPGTLFNWGPDQQKAYQEIKQALLTAPALGLPDLTKPFELFVDEKQGYAKGVLTQKLGPWRRPVAYLSKKLDPVAAGWPPCLRMVAAIAVLTKDAGKLTMGQPLVILAPHAVEALVKQPPDRWLSNARMTHYQALLLDTDRVQFGPVVALNPATLLPLPEEGLQHNCLDILAEAHGTRPDLTDQPLPDADHTWYTDGSSLLQEGQRKAGAAVTTETEVIWAKALPAGTSAQRAELIALTQALKMAEGKKLNVYTDSRYAFATAHIHGEIYRRRGWLTSEGKEIKNKDEILALLKALFLPKRLSIIHCPGHQKGHSAEARGNRMADQAARKAAITETPDTSTLLIENSSPSGGSKRTADGSEFEAGKRTADGSEFEKRTADGSEFESPKKKAKVE

SEQ ID NO: 2619 - protein, 2116 aa, synthetic construct
MPAAKRVKLDGGDKKYSIGLDIGTNSVGWAVITDEYKVPSKKFKVLGNTDRHSIKKNLIGALLFDSGETAEATRLKRTARRRYTRRKNRICYLQEIFSNEMAKVDDSFFHRLEESFLVEEDKKHERHPIFGNIVDEVAYHEKYPTIYHLRKKLVDSTDKADLRLIYLALAHMIKFRGHFLIEGDLNPDNSDVDKLFIQLVQTYNQLFEENPINASGVDAKAILSARLSKSRRLENLIAQLPGEKKNGLFGNLIALSLGLTPNFKSNFDLAEDAKLQLSKDTYDDDLDNLLAQIGDQYADLFLAAKNLSDAILLSDILRVNTEITKAPLSASMIKRYDEHHQDLTLLKALVRQQLPEKYKEIFFDQSKNGYAGYIDGGASQEEFYKFIKPILEKMDGTEELLVKLNREDLLRKQRTFDNGSIPHQIHLGELHAILRRQEDFYPFLKDNREKIEKILTFRIPYYVGPLARGNSRFAWMTRKSEETITPWNFEEVVDKGASAQSFIERMTNFDKNLPNEKVLPKHSLLYEYFTVYNELTKVKYVTEGMRKPAFLSGEQKKAIVDLLFKTNRKVTVKQLKEDYFKKIECFDSVEISGVEDRFNASLGTYHDLLKIIKDKDFLDNEENEDILEDIVLTLTLFEDREMIEERLKTYAHLFDDKVMKQLKRRRYTGWGRLSRKLINGIRDKQSGKTILDFLKSDGFANRNFMQLIHDDSLTFKEDIQKAQVSGQGDSLHEHIANLAGSPAIKKGILQTVKVVDELVKVMGRHKPENIVIEMARENQTTQKGQKNSRERMKRIEEGIKELGSQILKEHPVENTQLQNEKLYLYYLQNGRDMYVDQELDINRLSDYDVDHIVPQSFLKDDSIDNKVLTRSDKARGKSDNVPSEEVVKKMKNYWRQLLNAKLITQRKFDNLTKAERGGLSELDKAGFIKRQLVETRQITKHVAQILDSRMNTKYDENDKLIREVKVITLKSKLVSDFRKDFQFYKVREINNYHHAHDAYLNAVVGTALIKKYPKLESEFVYGDYKVYDVRKMIAKSEQEIGKATAKYFFYSNIMNFFKTEITLANGEIRKRPLIETNGETGEIVWDKGRDFATVRKVLSMPQVNIVKKTEVQTGGFSKESILPKRNSDKLIARKKDWDPKKYGGFDSPTVAYSVLVVAKVEKGKSKKLKSVKELLGITIMERSSFEKNPIDFLEAKGYKEVKKDLIIKLPKYSLFELENGRKRMLASAGELQKGNELALPSKYVNFLYLASHYEKLKGSPEDNEQKQLFVEQHKHYLDEIIEQISEFSKRVILADANLDKVLSAYNKHRDKPIREQAENIIHLFTLTNLGAPAAFKYFDTTIDRKRYTSTKEVLDATLIHQSITGLYETRIDLSQLGGDGGPAPAPAPAPAPGGTLNIEDEYRLHETSKEPDVSLGSTWLSDFPQAWAETGGMGLAVRQAPLIIPLKATSTPVSIKQYPMSQEARLGIKPHIQRLLDQGILVPCQSPWNTPLLPVKKPGTNDYRPVQDLREVNKRVEDIHPTVPNPYNLLSGLPPSHQWYTVLDLKDAFFCLRLHPTSQPLFAFEWRDPEMGISGQLTWTRLPQGFKNSPTLFNEALHRDLADFRIQHPDLILLQYVDDLLLAATSELDCQQGTRALLQTLGNLGYRASAKKAQICQKQVKYLGYLLKEGQRWLTEARKETVMGQPTPKTPRQLREFLGKAGFCRLFIPGFAEMAAPLYPLTKPGTLFNWGPDQQKAYQEIKQALLTAPALGLPDLTKPFELFVDEKQGYAKGVLTQKLGPWRRPVAYLSKKLDPVAAGWPPCLRMVAAIAVLTKDAGKLTMGQPLVILAPHAVEALVKQPPDRWLSNARMTHYQALLLDTDRVQFGPVVALNPATLLPLPEEGLQHNCLDILAEAHGTRPDLTDQPLPDADHTWYTDGSSLLQEGQRKAGAAVTTETEVIWAKALPAGTSAQRAELIALTQALKMAEGKKLNVYTDSRYAFATAHIHGEIYRRRGWLTSEGKEIKNKDEILALLKALFLPKRLSIIHCPGHQKGHSAEARGNRMADQAARKAAITETPDTSTLLIENSSPSGGSKRTADGSEFEAGKRTADGSEFEKRTADGSEFESPKKKAKVE

SEQ ID NO: 2620 - protein, 2110 aa, synthetic construct
MPAAKRVKLDGGDKKYSIGLDIGTNSVGWAVITDEYKVPSKKFKVLGNTDRHSIKKNLIGALLFDSGETAEATRLKRTARRRYTRRKNRICYLQEIFSNEMAKVDDSFFHRLEESFLVEEDKKHERHPIFGNIVDEVAYHEKYPTIYHLRKKLVDSTDKADLRLIYLALAHMIKFRGHFLIEGDLNPDNSDVDKLFIQLVQTYNQLFEENPINASGVDAKAILSARLSKSRRLENLIAQLPGEKKNGLFGNLIALSLGLTPNFKSNFDLAEDAKLQLSKDTYDDDLDNLLAQIGDQYADLFLAAKNLSDAILLSDILRVNTEITKAPLSASMIKRYDEHHQDLTLLKALVRQQLPEKYKEIFFDQSKNGYAGYIDGGASQEEFYKFIKPILEKMDGTEELLVKLNREDLLRKQRTFDNGSIPHQIHLGELHAILRRQEDFYPFLKDNREKIEKILTFRIPYYVGPLARGNSRFAWMTRKSEETITPWNFEEVVDKGASAQSFIERMTNFDKNLPNEKVLPKHSLLYEYFTVYNELTKVKYVTEGMRKPAFLSGEQKKAIVDLLFKTNRKVTVKQLKEDYFKKIECFDSVEISGVEDRFNASLGTYHDLLKIIKDKDFLDNEENEDILEDIVLTLTLFEDREMIEERLKTYAHLFDDKVMKQLKRRRYTGWGRLSRKLINGIRDKQSGKTILDFLKSDGFANRNFMQLIHDDSLTFKEDIQKAQVSGQGDSLHEHIANLAGSPAIKKGILQTVKVVDELVKVMGRHKPENIVIEMARENQTTQKGQKNSRERMKRIEEGIKELGSQILKEHPVENTQLQNEKLYLYYLQNGRDMYVDQELDINRLSDYDVDHIVPQSFLKDDSIDNKVLTRSDKARGKSDNVPSEEVVKKMKNYWRQLLNAKLITQRKFDNLTKAERGGLSELDKAGFIKRQLVETRQITKHVAQILDSRMNTKYDENDKLIREVKVITLKSKLVSDFRKDFQFYKVREINNYHHAHDAYLNAVVGTALIKKYPKLESEFVYGDYKVYDVRKMIAKSEQEIGKATAKYFFYSNIMNFFKTEITLANGEIRKRPLIETNGETGEIVWDKGRDFATVRKVLSMPQVNIVKKTEVQTGGFSKESILPKRNSDKLIARKKDWDPKKYGGFDSPTVAYSVLVVAKVEKGKSKKLKSVKELLGITIMERSSFEKNPIDFLEAKGYKEVKKDLIIKLPKYSLFELENGRKRMLASAGELQKGNELALPSKYVNFLYLASHYEKLKGSPEDNEQKQLFVEQHKHYLDEIIEQISEFSKRVILADANLDKVLSAYNKHRDKPIREQAENIIHLFTLTNLGAPAAFKYFDTTIDRKRYTSTKEVLDATLIHQSITGLYETRIDLSQLGGDGGEAAAKGGTLNIEDEYRLHETSKEPDVSLGSTWLSDFPQAWAETGGMGLAVRQAPLIIPLKATSTPVSIKQYPMSQEARLGIKPHIQRLLDQGILVPCQSPWNTPLLPVKKPGTNDYRPVQDLREVNKRVEDIHPTVPNPYNLLSGLPPSHQWYTVLDLKDAFFCLRLHPTSQPLFAFEWRDPEMGISGQLTWTRLPQGFKNSPTLFNEALHRDLADFRIQHPDLILLQYVDDLLLAATSELDCQQGTRALLQTLGNLGYRASAKKAQICQKQVKYLGYLLKEGQRWLTEARKETVMGQPTPKTPRQLREFLGKAGFCRLFIPGFAEMAAPLYPLTKPGTLFNWGPDQQKAYQEIKQALLTAPALGLPDLTKPFELFVDEKQGYAKGVLTQKLGPWRRPVAYLSKKLDPVAAGWPPCLRMVAAIAVLTKDAGKLTMGQPLVILAPHAVEALVKQPPDRWLSNARMTHYQALLLDTDRVQFGPVVALNPATLLPLPEEGLQHNCLDILAEAHGTRPDLTDQPLPDADHTWYTDGSSLLQEGQRKAGAAVTTETEVIWAKALPAGTSAQRAELIALTQALKMAEGKKLNVYTDSRYAFATAHIHGEIYRRRGWLTSEGKEIKNKDEILALLKALFLPKRLSIIHCPGHQKGHSAEARGNRMADQAARKAAITETPDTSTLLIENSSPSGGSKRTADGSEFEAGKRTADGSEFEKRTADGSEFESPKKKAKVE

SEQ ID NO: 2621 - protein, 2111 aa, synthetic construct
MPAAKRVKLDGGDKKYSIGLDIGTNSVGWAVITDEYKVPSKKFKVLGNTDRHSIKKNLIGALLFDSGETAEATRLKRTARRRYTRRKNRICYLQEIFSNEMAKVDDSFFHRLEESFLVEEDKKHERHPIFGNIVDEVAYHEKYPTIYHLRKKLVDSTDKADLRLIYLALAHMIKFRGHFLIEGDLNPDNSDVDKLFIQLVQTYNQLFEENPINASGVDAKAILSARLSKSRRLENLIAQLPGEKKNGLFGNLIALSLGLTPNFKSNFDLAEDAKLQLSKDTYDDDLDNLLAQIGDQYADLFLAAKNLSDAILLSDILRVNTEITKAPLSASMIKRYDEHHQDLTLLKALVRQQLPEKYKEIFFDQSKNGYAGYIDGGASQEEFYKFIKPILEKMDGTEELLVKLNREDLLRKQRTFDNGSIPHQIHLGELHAILRRQEDFYPFLKDNREKIEKILTFRIPYYVGPLARGNSRFAWMTRKSEETITPWNFEEVVDKGASAQSFIERMTNFDKNLPNEKVLPKHSLLYEYFTVYNELTKVKYVTEGMRKPAFLSGEQKKAIVDLLFKTNRKVTVKQLKEDYFKKIECFDSVEISGVEDRFNASLGTYHDLLKIIKDKDFLDNEENEDILEDIVLTLTLFEDREMIEERLKTYAHLFDDKVMKQLKRRRYTGWGRLSRKLINGIRDKQSGKTILDFLKSDGFANRNFMQLIHDDSLTFKEDIQKAQVSGQGDSLHEHIANLAGSPAIKKGILQTVKVVDELVKVMGRHKPENIVIEMARENQTTQKGQKNSRERMKRIEEGIKELGSQILKEHPVENTQLQNEKLYLYYLQNGRDMYVDQELDINRLSDYDVDHIVPQSFLKDDSIDNKVLTRSDKARGKSDNVPSEEVVKKMKNYWRQLLNAKLITQRKFDNLTKAERGGLSELDKAGFIKRQLVETRQITKHVAQILDSRMNTKYDENDKLIREVKVITLKSKLVSDFRKDFQFYKVREINNYHHAHDAYLNAVVGTALIKKYPKLESEFVYGDYKVYDVRKMIAKSEQEIGKATAKYFFYSNIMNFFKTEITLANGEIRKRPLIETNGETGEIVWDKGRDFATVRKVLSMPQVNIVKKTEVQTGGFSKESILPKRNSDKLIARKKDWDPKKYGGFDSPTVAYSVLVVAKVEKGKSKKLKSVKELLGITIMERSSFEKNPIDFLEAKGYKEVKKDLIIKLPKYSLFELENGRKRMLASAGELQKGNELALPSKYVNFLYLASHYEKLKGSPEDNEQKQLFVEQHKHYLDEIIEQISEFSKRVILADANLDKVLSAYNKHRDKPIREQAENIIHLFTLTNLGAPAAFKYFDTTIDRKRYTSTKEVLDATLIHQSITGLYETRIDLSQLGGDGGGGGGSSGGTLNIEDEYRLHETSKEPDVSLGSTWLSDFPQAWAETGGMGLAVRQAPLIIPLKATSTPVSIKQYPMSQEARLGIKPHIQRLLDQGILVPCQSPWNTPLLPVKKPGTNDYRPVQDLREVNKRVEDIHPTVPNPYNLLSGLPPSHQWYTVLDLKDAFFCLRLHPTSQPLFAFEWRDPEMGISGQLTWTRLPQGFKNSPTLFNEALHRDLADFRIQHPDLILLQYVDDLLLAATSELDCQQGTRALLQTLGNLGYRASAKKAQICQKQVKYLGYLLKEGQRWLTEARKETVMGQPTPKTPRQLREFLGKAGFCRLFIPGFAEMAAPLYPLTKPGTLFNWGPDQQKAYQEIKQALLTAPALGLPDLTKPFELFVDEKQGYAKGVLTQKLGPWRRPVAYLSKKLDPVAAGWPPCLRMVAAIAVLTKDAGKLTMGQPLVILAPHAVEALVKQPPDRWLSNARMTHYQALLLDTDRVQFGPVVALNPATLLPLPEEGLQHNCLDILAEAHGTRPDLTDQPLPDADHTWYTDGSSLLQEGQRKAGAAVTTETEVIWAKALPAGTSAQRAELIALTQALKMAEGKKLNVYTDSRYAFATAHIHGEIYRRRGWLTSEGKEIKNKDEILALLKALFLPKRLSIIHCPGHQKGHSAEARGNRMADQAARKAAITETPDTSTLLIENSSPSGGSKRTADGSEFEAGKRTADGSEFEKRTADGSEFESPKKKAKVE

SEQ ID NO: 2622 - protein, 2114 aa, synthetic construct
MPAAKRVKLDGGDKKYSIGLDIGTNSVGWAVITDEYKVPSKKFKVLGNTDRHSIKKNLIGALLFDSGETAEATRLKRTARRRYTRRKNRICYLQEIFSNEMAKVDDSFFHRLEESFLVEEDKKHERHPIFGNIVDEVAYHEKYPTIYHLRKKLVDSTDKADLRLIYLALAHMIKFRGHFLIEGDLNPDNSDVDKLFIQLVQTYNQLFEENPINASGVDAKAILSARLSKSRRLENLIAQLPGEKKNGLFGNLIALSLGLTPNFKSNFDLAEDAKLQLSKDTYDDDLDNLLAQIGDQYADLFLAAKNLSDAILLSDILRVNTEITKAPLSASMIKRYDEHHQDLTLLKALVRQQLPEKYKEIFFDQSKNGYAGYIDGGASQEEFYKFIKPILEKMDGTEELLVKLNREDLLRKQRTFDNGSIPHQIHLGELHAILRRQEDFYPFLKDNREKIEKILTFRIPYYVGPLARGNSRFAWMTRKSEETITPWNFEEVVDKGASAQSFIERMTNFDKNLPNEKVLPKHSLLYEYFTVYNELTKVKYVTEGMRKPAFLSGEQKKAIVDLLFKTNRKVTVKQLKEDYFKKIECFDSVEISGVEDRFNASLGTYHDLLKIIKDKDFLDNEENEDILEDIVLTLTLFEDREMIEERLKTYAHLFDDKVMKQLKRRRYTGWGRLSRKLINGIRDKQSGKTILDFLKSDGFANRNFMQLIHDDSLTFKEDIQKAQVSGQGDSLHEHIANLAGSPAIKKGILQTVKVVDELVKVMGRHKPENIVIEMARENQTTQKGQKNSRERMKRIEEGIKELGSQILKEHPVENTQLQNEKLYLYYLQNGRDMYVDQELDINRLSDYDVDHIVPQSFLKDDSIDNKVLTRSDKARGKSDNVPSEEVVKKMKNYWRQLLNAKLITQRKFDNLTKAERGGLSELDKAGFIKRQLVETRQITKHVAQILDSRMNTKYDENDKLIREVKVITLKSKLVSDFRKDFQFYKVREINNYHHAHDAYLNAVVGTALIKKYPKLESEFVYGDYKVYDVRKMIAKSEQEIGKATAKYFFYSNIMNFFKTEITLANGEIRKRPLIETNGETGEIVWDKGRDFATVRKVLSMPQVNIVKKTEVQTGGFSKESILPKRNSDKLIARKKDWDPKKYGGFDSPTVAYSVLVVAKVEKGKSKKLKSVKELLGITIMERSSFEKNPIDFLEAKGYKEVKKDLIIKLPKYSLFELENGRKRMLASAGELQKGNELALPSKYVNFLYLASHYEKLKGSPEDNEQKQLFVEQHKHYLDEIIEQISEFSKRVILADANLDKVLSAYNKHRDKPIREQAENIIHLFTLTNLGAPAAFKYFDTTIDRKRYTSTKEVLDATLIHQSITGLYETRIDLSQLGGDGGGGSGGGPAPGGTLNIEDEYRLHETSKEPDVSLGSTWLSDFPQAWAETGGMGLAVRQAPLIIPLKATSTPVSIKQYPMSQEARLGIKPHIQRLLDQGILVPCQSPWNTPLLPVKKPGTNDYRPVQDLREVNKRVEDIHPTVPNPYNLLSGLPPSHQWYTVLDLKDAFFCLRLHPTSQPLFAFEWRDPEMGISGQLTWTRLPQGFKNSPTLFNEALHRDLADFRIQHPDLILLQYVDDLLLAATSELDCQQGTRALLQTLGNLGYRASAKKAQICQKQVKYLGYLLKEGQRWLTEARKETVMGQPTPKTPRQLREFLGKAGFCRLFIPGFAEMAAPLYPLTKPGTLFNWGPDQQKAYQEIKQALLTAPALGLPDLTKPFELFVDEKQGYAKGVLTQKLGPWRRPVAYLSKKLDPVAAGWPPCLRMVAAIAVLTKDAGKLTMGQPLVILAPHAVEALVKQPPDRWLSNARMTHYQALLLDTDRVQFGPVVALNPATLLPLPEEGLQHNCLDILAEAHGTRPDLTDQPLPDADHTWYTDGSSLLQEGQRKAGAAVTTETEVIWAKALPAGTSAQRAELIALTQALKMAEGKKLNVYTDSRYAFATAHIHGEIYRRRGWLTSEGKEIKNKDEILALLKALFLPKRLSIIHCPGHQKGHSAEARGNRMADQAARKAAITETPDTSTLLIENSSPSGGSKRTADGSEFEAGKRTADGSEFEKRTADGSEFESPKKKAKVE

SEQ ID NO: 2623 - protein, 2120 aa, synthetic construct
MPAAKRVKLDGGDKKYSIGLDIGTNSVGWAVITDEYKVPSKKFKVLGNTDRHSIKKNLIGALLFDSGETAEATRLKRTARRRYTRRKNRICYLQEIFSNEMAKVDDSFFHRLEESFLVEEDKKHERHPIFGNIVDEVAYHEKYPTIYHLRKKLVDSTDKADLRLIYLALAHMIKFRGHFLIEGDLNPDNSDVDKLFIQLVQTYNQLFEENPINASGVDAKAILSARLSKSRRLENLIAQLPGEKKNGLFGNLIALSLGLTPNFKSNFDLAEDAKLQLSKDTYDDDLDNLLAQIGDQYADLFLAAKNLSDAILLSDILRVNTEITKAPLSASMIKRYDEHHQDLTLLKALVRQQLPEKYKEIFFDQSKNGYAGYIDGGASQEEFYKFIKPILEKMDGTEELLVKLNREDLLRKQRTFDNGSIPHQIHLGELHAILRRQEDFYPFLKDNREKIEKILTFRIPYYVGPLARGNSRFAWMTRKSEETITPWNFEEVVDKGASAQSFIERMTNFDKNLPNEKVLPKHSLLYEYFTVYNELTKVKYVTEGMRKPAFLSGEQKKAIVDLLFKTNRKVTVKQLKEDYFKKIECFDSVEISGVEDRFNASLGTYHDLLKIIKDKDFLDNEENEDILEDIVLTLTLFEDREMIEERLKTYAHLFDDKVMKQLKRRRYTGWGRLSRKLINGIRDKQSGKTILDFLKSDGFANRNFMQLIHDDSLTFKEDIQKAQVSGQGDSLHEHIANLAGSPAIKKGILQTVKVVDELVKVMGRHKPENIVIEMARENQTTQKGQKNSRERMKRIEEGIKELGSQILKEHPVENTQLQNEKLYLYYLQNGRDMYVDQELDINRLSDYDVDHIVPQSFLKDDSIDNKVLTRSDKARGKSDNVPSEEVVKKMKNYWRQLLNAKLITQRKFDNLTKAERGGLSELDKAGFIKRQLVETRQITKHVAQILDSRMNTKYDENDKLIREVKVITLKSKLVSDFRKDFQFYKVREINNYHHAHDAYLNAVVGTALIKKYPKLESEFVYGDYKVYDVRKMIAKSEQEIGKATAKYFFYSNIMNFFKTEITLANGEIRKRPLIETNGETGEIVWDKGRDFATVRKVLSMPQVNIVKKTEVQTGGFSKESILPKRNSDKLIARKKDWDPKKYGGFDSPTVAYSVLVVAKVEKGKSKKLKSVKELLGITIMERSSFEKNPIDFLEAKGYKEVKKDLIIKLPKYSLFELENGRKRMLASAGELQKGNELALPSKYVNFLYLASHYEKLKGSPEDNEQKQLFVEQHKHYLDEIIEQISEFSKRVILADANLDKVLSAYNKHRDKPIREQAENIIHLFTLTNLGAPAAFKYFDTTIDRKRYTSTKEVLDATLIHQSITGLYETRIDLSQLGGDGGEAAAKGGGGSEAAAKGGTLNIEDEYRLHETSKEPDVSLGSTWLSDFPQAWAETGGMGLAVRQAPLIIPLKATSTPVSIKQYPMSQEARLGIKPHIQRLLDQGILVPCQSPWNTPLLPVKKPGTNDYRPVQDLREVNKRVEDIHPTVPNPYNLLSGLPPSHQWYTVLDLKDAFFCLRLHPTSQPLFAFEWRDPEMGISGQLTWTRLPQGFKNSPTLFNEALHRDLADFRIQHPDLILLQYVDDLLLAATSELDCQQGTRALLQTLGNLGYRASAKKAQICQKQVKYLGYLLKEGQRWLTEARKETVMGQPTPKTPRQLREFLGKAGFCRLFIPGFAEMAAPLYPLTKPGTLFNWGPDQQKAYQEIKQALLTAPALGLPDLTKPFELFVDEKQGYAKGVLTQKLGPWRRPVAYLSKKLDPVAAGWPPCLRMVAAIAVLTKDAGKLTMGQPLVILAPHAVEALVKQPPDRWLSNARMTHYQALLLDTDRVQFGPVVALNPATLLPLPEEGLQHNCLDILAEAHGTRPDLTDQPLPDADHTWYTDGSSLLQEGQRKAGAAVTTETEVIWAKALPAGTSAQRAELIALTQALKMAEGKKLNVYTDSRYAFATAHIHGEIYRRRGWLTSEGKEIKNKDEILALLKALFLPKRLSIIHCPGHQKGHSAEARGNRMADQAARKAAITETPDTSTLLIENSSPSGGSKRTADGSEFEAGKRTADGSEFEKRTADGSEFESPKKKAKVE

SEQ ID NO: 2624 - protein, 2108 aa, synthetic construct
MPAAKRVKLDGGDKKYSIGLDIGTNSVGWAVITDEYKVPSKKFKVLGNTDRHSIKKNLIGALLFDSGETAEATRLKRTARRRYTRRKNRICYLQEIFSNEMAKVDDSFFHRLEESFLVEEDKKHERHPIFGNIVDEVAYHEKYPTIYHLRKKLVDSTDKADLRLIYLALAHMIKFRGHFLIEGDLNPDNSDVDKLFIQLVQTYNQLFEENPINASGVDAKAILSARLSKSRRLENLIAQLPGEKKNGLFGNLIALSLGLTPNFKSNFDLAEDAKLQLSKDTYDDDLDNLLAQIGDQYADLFLAAKNLSDAILLSDILRVNTEITKAPLSASMIKRYDEHHQDLTLLKALVRQQLPEKYKEIFFDQSKNGYAGYIDGGASQEEFYKFIKPILEKMDGTEELLVKLNREDLLRKQRTFDNGSIPHQIHLGELHAILRRQEDFYPFLKDNREKIEKILTFRIPYYVGPLARGNSRFAWMTRKSEETITPWNFEEVVDKGASAQSFIERMTNFDKNLPNEKVLPKHSLLYEYFTVYNELTKVKYVTEGMRKPAFLSGEQKKAIVDLLFKTNRKVTVKQLKEDYFKKIECFDSVEISGVEDRFNASLGTYHDLLKIIKDKDFLDNEENEDILEDIVLTLTLFEDREMIEERLKTYAHLFDDKVMKQLKRRRYTGWGRLSRKLINGIRDKQSGKTILDFLKSDGFANRNFMQLIHDDSLTFKEDIQKAQVSGQGDSLHEHIANLAGSPAIKKGILQTVKVVDELVKVMGRHKPENIVIEMARENQTTQKGQKNSRERMKRIEEGIKELGSQILKEHPVENTQLQNEKLYLYYLQNGRDMYVDQELDINRLSDYDVDHIVPQSFLKDDSIDNKVLTRSDKARGKSDNVPSEEVVKKMKNYWRQLLNAKLITQRKFDNLTKAERGGLSELDKAGFIKRQLVETRQITKHVAQILDSRMNTKYDENDKLIREVKVITLKSKLVSDFRKDFQFYKVREINNYHHAHDAYLNAVVGTALIKKYPKLESEFVYGDYKVYDVRKMIAKSEQEIGKATAKYFFYSNIMNFFKTEITLANGEIRKRPLIETNGETGEIVWDKGRDFATVRKVLSMPQVNIVKKTEVQTGGFSKESILPKRNSDKLIARKKDWDPKKYGGFDSPTVAYSVLVVAKVEKGKSKKLKSVKELLGITIMERSSFEKNPIDFLEAKGYKEVKKDLIIKLPKYSLFELENGRKRMLASAGELQKGNELALPSKYVNFLYLASHYEKLKGSPEDNEQKQLFVEQHKHYLDEIIEQISEFSKRVILADANLDKVLSAYNKHRDKPIREQAENIIHLFTLTNLGAPAAFKYFDTTIDRKRYTSTKEVLDATLIHQSITGLYETRIDLSQLGGDGGPAPGGTLNIEDEYRLHETSKEPDVSLGSTWLSDFPQAWAETGGMGLAVRQAPLIIPLKATSTPVSIKQYPMSQEARLGIKPHIQRLLDQGILVPCQSPWNTPLLPVKKPGTNDYRPVQDLREVNKRVEDIHPTVPNPYNLLSGLPPSHQWYTVLDLKDAFFCLRLHPTSQPLFAFEWRDPEMGISGQLTWTRLPQGFKNSPTLFNEALHRDLADFRIQHPDLILLQYVDDLLLAATSELDCQQGTRALLQTLGNLGYRASAKKAQICQKQVKYLGYLLKEGQRWLTEARKETVMGQPTPKTPRQLREFLGKAGFCRLFIPGFAEMAAPLYPLTKPGTLFNWGPDQQKAYQEIKQALLTAPALGLPDLTKPFELFVDEKQGYAKGVLTQKLGPWRRPVAYLSKKLDPVAAGWPPCLRMVAAIAVLTKDAGKLTMGQPLVILAPHAVEALVKQPPDRWLSNARMTHYQALLLDTDRVQFGPVVALNPATLLPLPEEGLQHNCLDILAEAHGTRPDLTDQPLPDADHTWYTDGSSLLQEGQRKAGAAVTTETEVIWAKALPAGTSAQRAELIALTQALKMAEGKKLNVYTDSRYAFATAHIHGEIYRRRGWLTSEGKEIKNKDEILALLKALFLPKRLSIIHCPGHQKGHSAEARGNRMADQAARKAAITETPDTSTLLIENSSPSGGSKRTADGSEFEAGKRTADGSEFEKRTADGSEFESPKKKAKVE

SEQ ID NO: 2625 - protein, 2113 aa, synthetic construct
MPAAKRVKLDGGDKKYSIGLDIGTNSVGWAVITDEYKVPSKKFKVLGNTDRHSIKKNLIGALLFDSGETAEATRLKRTARRRYTRRKNRICYLQEIFSNEMAKVDDSFFHRLEESFLVEEDKKHERHPIFGNIVDEVAYHEKYPTIYHLRKKLVDSTDKADLRLIYLALAHMIKFRGHFLIEGDLNPDNSDVDKLFIQLVQTYNQLFEENPINASGVDAKAILSARLSKSRRLENLIAQLPGEKKNGLFGNLIALSLGLTPNFKSNFDLAEDAKLQLSKDTYDDDLDNLLAQIGDQYADLFLAAKNLSDAILLSDILRVNTEITKAPLSASMIKRYDEHHQDLTLLKALVRQQLPEKYKEIFFDQSKNGYAGYIDGGASQEEFYKFIKPILEKMDGTEELLVKLNREDLLRKQRTFDNGSIPHQIHLGELHAILRRQEDFYPFLKDNREKIEKILTFRIPYYVGPLARGNSRFAWMTRKSEETITPWNFEEVVDKGASAQSFIERMTNFDKNLPNEKVLPKHSLLYEYFTVYNELTKVKYVTEGMRKPAFLSGEQKKAIVDLLFKTNRKVTVKQLKEDYFKKIECFDSVEISGVEDRFNASLGTYHDLLKIIKDKDFLDNEENEDILEDIVLTLTLFEDREMIEERLKTYAHLFDDKVMKQLKRRRYTGWGRLSRKLINGIRDKQSGKTILDFLKSDGFANRNFMQLIHDDSLTFKEDIQKAQVSGQGDSLHEHIANLAGSPAIKKGILQTVKVVDELVKVMGRHKPENIVIEMARENQTTQKGQKNSRERMKRIEEGIKELGSQILKEHPVENTQLQNEKLYLYYLQNGRDMYVDQELDINRLSDYDVDHIVPQSFLKDDSIDNKVLTRSDKARGKSDNVPSEEVVKKMKNYWRQLLNAKLITQRKFDNLTKAERGGLSELDKAGFIKRQLVETRQITKHVAQILDSRMNTKYDENDKLIREVKVITLKSKLVSDFRKDFQFYKVREINNYHHAHDAYLNAVVGTALIKKYPKLESEFVYGDYKVYDVRKMIAKSEQEIGKATAKYFFYSNIMNFFKTEITLANGEIRKRPLIETNGETGEIVWDKGRDFATVRKVLSMPQVNIVKKTEVQTGGFSKESILPKRNSDKLIARKKDWDPKKYGGFDSPTVAYSVLVVAKVEKGKSKKLKSVKELLGITIMERSSFEKNPIDFLEAKGYKEVKKDLIIKLPKYSLFELENGRKRMLASAGELQKGNELALPSKYVNFLYLASHYEKLKGSPEDNEQKQLFVEQHKHYLDEIIEQISEFSKRVILADANLDKVLSAYNKHRDKPIREQAENIIHLFTLTNLGAPAAFKYFDTTIDRKRYTSTKEVLDATLIHQSITGLYETRIDLSQLGGDGGEAAAKGSSGGTLNIEDEYRLHETSKEPDVSLGSTWLSDFPQAWAETGGMGLAVRQAPLIIPLKATSTPVSIKQYPMSQEARLGIKPHIQRLLDQGILVPCQSPWNTPLLPVKKPGTNDYRPVQDLREVNKRVEDIHPTVPNPYNLLSGLPPSHQWYTVLDLKDAFFCLRLHPTSQPLFAFEWRDPEMGISGQLTWTRLPQGFKNSPTLFNEALHRDLADFRIQHPDLILLQYVDDLLLAATSELDCQQGTRALLQTLGNLGYRASAKKAQICQKQVKYLGYLLKEGQRWLTEARKETVMGQPTPKTPRQLREFLGKAGFCRLFIPGFAEMAAPLYPLTKPGTLFNWGPDQQKAYQEIKQALLTAPALGLPDLTKPFELFVDEKQGYAKGVLTQKLGPWRRPVAYLSKKLDPVAAGWPPCLRMVAAIAVLTKDAGKLTMGQPLVILAPHAVEALVKQPPDRWLSNARMTHYQALLLDTDRVQFGPVVALNPATLLPLPEEGLQHNCLDILAEAHGTRPDLTDQPLPDADHTWYTDGSSLLQEGQRKAGAAVTTETEVIWAKALPAGTSAQRAELIALTQALKMAEGKKLNVYTDSRYAFATAHIHGEIYRRRGWLTSEGKEIKNKDEILALLKALFLPKRLSIIHCPGHQKGHSAEARGNRMADQAARKAAITETPDTSTLLIENSSPSGGSKRTADGSEFEAGKRTADGSEFEKRTADGSEFESPKKKAKVE

SEQ ID NO: 2626 - protein, 2113 aa, synthetic construct
MPAAKRVKLDGGDKKYSIGLDIGTNSVGWAVITDEYKVPSKKFKVLGNTDRHSIKKNLIGALLFDSGETAEATRLKRTARRRYTRRKNRICYLQEIFSNEMAKVDDSFFHRLEESFLVEEDKKHERHPIFGNIVDEVAYHEKYPTIYHLRKKLVDSTDKADLRLIYLALAHMIKFRGHFLIEGDLNPDNSDVDKLFIQLVQTYNQLFEENPINASGVDAKAILSARLSKSRRLENLIAQLPGEKKNGLFGNLIALSLGLTPNFKSNFDLAEDAKLQLSKDTYDDDLDNLLAQIGDQYADLFLAAKNLSDAILLSDILRVNTEITKAPLSASMIKRYDEHHQDLTLLKALVRQQLPEKYKEIFFDQSKNGYAGYIDGGASQEEFYKFIKPILEKMDGTEELLVKLNREDLLRKQRTFDNGSIPHQIHLGELHAILRRQEDFYPFLKDNREKIEKILTFRIPYYVGPLARGNSRFAWMTRKSEETITPWNFEEVVDKGASAQSFIERMTNFDKNLPNEKVLPKHSLLYEYFTVYNELTKVKYVTEGMRKPAFLSGEQKKAIVDLLFKTNRKVTVKQLKEDYFKKIECFDSVEISGVEDRFNASLGTYHDLLKIIKDKDFLDNEENEDILEDIVLTLTLFEDREMIEERLKTYAHLFDDKVMKQLKRRRYTGWGRLSRKLINGIRDKQSGKTILDFLKSDGFANRNFMQLIHDDSLTFKEDIQKAQVSGQGDSLHEHIANLAGSPAIKKGILQTVKVVDELVKVMGRHKPENIVIEMARENQTTQKGQKNSRERMKRIEEGIKELGSQILKEHPVENTQLQNEKLYLYYLQNGRDMYVDQELDINRLSDYDVDHIVPQSFLKDDSIDNKVLTRSDKARGKSDNVPSEEVVKKMKNYWRQLLNAKLITQRKFDNLTKAERGGLSELDKAGFIKRQLVETRQITKHVAQILDSRMNTKYDENDKLIREVKVITLKSKLVSDFRKDFQFYKVREINNYHHAHDAYLNAVVGTALIKKYPKLESEFVYGDYKVYDVRKMIAKSEQEIGKATAKYFFYSNIMNFFKTEITLANGEIRKRPLIETNGETGEIVWDKGRDFATVRKVLSMPQVNIVKKTEVQTGGFSKESILPKRNSDKLIARKKDWDPKKYGGFDSPTVAYSVLVVAKVEKGKSKKLKSVKELLGITIMERSSFEKNPIDFLEAKGYKEVKKDLIIKLPKYSLFELENGRKRMLASAGELQKGNELALPSKYVNFLYLASHYEKLKGSPEDNEQKQLFVEQHKHYLDEIIEQISEFSKRVILADANLDKVLSAYNKHRDKPIREQAENIIHLFTLTNLGAPAAFKYFDTTIDRKRYTSTKEVLDATLIHQSITGLYETRIDLSQLGGDGGGGGGGGGGGGTLNIEDEYRLHETSKEPDVSLGSTWLSDFPQAWAETGGMGLAVRQAPLIIPLKATSTPVSIKQYPMSQEARLGIKPHIQRLLDQGILVPCQSPWNTPLLPVKKPGTNDYRPVQDLREVNKRVEDIHPTVPNPYNLLSGLPPSHQWYTVLDLKDAFFCLRLHPTSQPLFAFEWRDPEMGISGQLTWTRLPQGFKNSPTLFNEALHRDLADFRIQHPDLILLQYVDDLLLAATSELDCQQGTRALLQTLGNLGYRASAKKAQICQKQVKYLGYLLKEGQRWLTEARKETVMGQPTPKTPRQLREFLGKAGFCRLFIPGFAEMAAPLYPLTKPGTLFNWGPDQQKAYQEIKQALLTAPALGLPDLTKPFELFVDEKQGYAKGVLTQKLGPWRRPVAYLSKKLDPVAAGWPPCLRMVAAIAVLTKDAGKLTMGQPLVILAPHAVEALVKQPPDRWLSNARMTHYQALLLDTDRVQFGPVVALNPATLLPLPEEGLQHNCLDILAEAHGTRPDLTDQPLPDADHTWYTDGSSLLQEGQRKAGAAVTTETEVIWAKALPAGTSAQRAELIALTQALKMAEGKKLNVYTDSRYAFATAHIHGEIYRRRGWLTSEGKEIKNKDEILALLKALFLPKRLSIIHCPGHQKGHSAEARGNRMADQAARKAAITETPDTSTLLIENSSPSGGSKRTADGSEFEAGKRTADGSEFEKRTADGSEFESPKKKAKVE

SEQ ID NO: 2627 - protein, 2120 aa, synthetic construct
MPAAKRVKLDGGDKKYSIGLDIGTNSVGWAVITDEYKVPSKKFKVLGNTDRHSIKKNLIGALLFDSGETAEATRLKRTARRRYTRRKNRICYLQEIFSNEMAKVDDSFFHRLEESFLVEEDKKHERHPIFGNIVDEVAYHEKYPTIYHLRKKLVDSTDKADLRLIYLALAHMIKFRGHFLIEGDLNPDNSDVDKLFIQLVQTYNQLFEENPINASGVDAKAILSARLSKSRRLENLIAQLPGEKKNGLFGNLIALSLGLTPNFKSNFDLAEDAKLQLSKDTYDDDLDNLLAQIGDQYADLFLAAKNLSDAILLSDILRVNTEITKAPLSASMIKRYDEHHQDLTLLKALVRQQLPEKYKEIFFDQSKNGYAGYIDGGASQEEFYKFIKPILEKMDGTEELLVKLNREDLLRKQRTFDNGSIPHQIHLGELHAILRRQEDFYPFLKDNREKIEKILTFRIPYYVGPLARGNSRFAWMTRKSEETITPWNFEEVVDKGASAQSFIERMTNFDKNLPNEKVLPKHSLLYEYFTVYNELTKVKYVTEGMRKPAFLSGEQKKAIVDLLFKTNRKVTVKQLKEDYFKKIECFDSVEISGVEDRFNASLGTYHDLLKIIKDKDFLDNEENEDILEDIVLTLTLFEDREMIEERLKTYAHLFDDKVMKQLKRRRYTGWGRLSRKLINGIRDKQSGKTILDFLKSDGFANRNFMQLIHDDSLTFKEDIQKAQVSGQGDSLHEHIANLAGSPAIKKGILQTVKVVDELVKVMGRHKPENIVIEMARENQTTQKGQKNSRERMKRIEEGIKELGSQILKEHPVENTQLQNEKLYLYYLQNGRDMYVDQELDINRLSDYDVDHIVPQSFLKDDSIDNKVLTRSDKARGKSDNVPSEEVVKKMKNYWRQLLNAKLITQRKFDNLTKAERGGLSELDKAGFIKRQLVETRQITKHVAQILDSRMNTKYDENDKLIREVKVITLKSKLVSDFRKDFQFYKVREINNYHHAHDAYLNAVVGTALIKKYPKLESEFVYGDYKVYDVRKMIAKSEQEIGKATAKYFFYSNIMNFFKTEITLANGEIRKRPLIETNGETGEIVWDKGRDFATVRKVLSMPQVNIVKKTEVQTGGFSKESILPKRNSDKLIARKKDWDPKKYGGFDSPTVAYSVLVVAKVEKGKSKKLKSVKELLGITIMERSSFEKNPIDFLEAKGYKEVKKDLIIKLPKYSLFELENGRKRMLASAGELQKGNELALPSKYVNFLYLASHYEKLKGSPEDNEQKQLFVEQHKHYLDEIIEQISEFSKRVILADANLDKVLSAYNKHRDKPIREQAENIIHLFTLTNLGAPAAFKYFDTTIDRKRYTSTKEVLDATLIHQSITGLYETRIDLSQLGGDGGEAAAKEAAAKEAAAKGGTLNIEDEYRLHETSKEPDVSLGSTWLSDFPQAWAETGGMGLAVRQAPLIIPLKATSTPVSIKQYPMSQEARLGIKPHIQRLLDQGILVPCQSPWNTPLLPVKKPGTNDYRPVQDLREVNKRVEDIHPTVPNPYNLLSGLPPSHQWYTVLDLKDAFFCLRLHPTSQPLFAFEWRDPEMGISGQLTWTRLPQGFKNSPTLFNEALHRDLADFRIQHPDLILLQYVDDLLLAATSELDCQQGTRALLQTLGNLGYRASAKKAQICQKQVKYLGYLLKEGQRWLTEARKETVMGQPTPKTPRQLREFLGKAGFCRLFIPGFAEMAAPLYPLTKPGTLFNWGPDQQKAYQEIKQALLTAPALGLPDLTKPFELFVDEKQGYAKGVLTQKLGPWRRPVAYLSKKLDPVAAGWPPCLRMVAAIAVLTKDAGKLTMGQPLVILAPHAVEALVKQPPDRWLSNARMTHYQALLLDTDRVQFGPVVALNPATLLPLPEEGLQHNCLDILAEAHGTRPDLTDQPLPDADHTWYTDGSSLLQEGQRKAGAAVTTETEVIWAKALPAGTSAQRAELIALTQALKMAEGKKLNVYTDSRYAFATAHIHGEIYRRRGWLTSEGKEIKNKDEILALLKALFLPKRLSIIHCPGHQKGHSAEARGNRMADQAARKAAITETPDTSTLLIENSSPSGGSKRTADGSEFEAGKRTADGSEFEKRTADGSEFESPKKKAKVE

SEQ ID NO: 2628 - protein, 2116 aa, synthetic construct
MPAAKRVKLDGGDKKYSIGLDIGTNSVGWAVITDEYKVPSKKFKVLGNTDRHSIKKNLIGALLFDSGETAEATRLKRTARRRYTRRKNRICYLQEIFSNEMAKVDDSFFHRLEESFLVEEDKKHERHPIFGNIVDEVAYHEKYPTIYHLRKKLVDSTDKADLRLIYLALAHMIKFRGHFLIEGDLNPDNSDVDKLFIQLVQTYNQLFEENPINASGVDAKAILSARLSKSRRLENLIAQLPGEKKNGLFGNLIALSLGLTPNFKSNFDLAEDAKLQLSKDTYDDDLDNLLAQIGDQYADLFLAAKNLSDAILLSDILRVNTEITKAPLSASMIKRYDEHHQDLTLLKALVRQQLPEKYKEIFFDQSKNGYAGYIDGGASQEEFYKFIKPILEKMDGTEELLVKLNREDLLRKQRTFDNGSIPHQIHLGELHAILRRQEDFYPFLKDNREKIEKILTFRIPYYVGPLARGNSRFAWMTRKSEETITPWNFEEVVDKGASAQSFIERMTNFDKNLPNEKVLPKHSLLYEYFTVYNELTKVKYVTEGMRKPAFLSGEQKKAIVDLLFKTNRKVTVKQLKEDYFKKIECFDSVEISGVEDRFNASLGTYHDLLKIIKDKDFLDNEENEDILEDIVLTLTLFEDREMIEERLKTYAHLFDDKVMKQLKRRRYTGWGRLSRKLINGIRDKQSGKTILDFLKSDGFANRNFMQLIHDDSLTFKEDIQKAQVSGQGDSLHEHIANLAGSPAIKKGILQTVKVVDELVKVMGRHKPENIVIEMARENQTTQKGQKNSRERMKRIEEGIKELGSQILKEHPVENTQLQNEKLYLYYLQNGRDMYVDQELDINRLSDYDVDHIVPQSFLKDDSIDNKVLTRSDKARGKSDNVPSEEVVKKMKNYWRQLLNAKLITQRKFDNLTKAERGGLSELDKAGFIKRQLVETRQITKHVAQILDSRMNTKYDENDKLIREVKVITLKSKLVSDFRKDFQFYKVREINNYHHAHDAYLNAVVGTALIKKYPKLESEFVYGDYKVYDVRKMIAKSEQEIGKATAKYFFYSNIMNFFKTEITLANGEIRKRPLIETNGETGEIVWDKGRDFATVRKVLSMPQVNIVKKTEVQTGGFSKESILPKRNSDKLIARKKDWDPKKYGGFDSPTVAYSVLVVAKVEKGKSKKLKSVKELLGITIMERSSFEKNPIDFLEAKGYKEVKKDLIIKLPKYSLFELENGRKRMLASAGELQKGNELALPSKYVNFLYLASHYEKLKGSPEDNEQKQLFVEQHKHYLDEIIEQISEFSKRVILADANLDKVLSAYNKHRDKPIREQAENIIHLFTLTNLGAPAAFKYFDTTIDRKRYTSTKEVLDATLIHQSITGLYETRIDLSQLGGDGGEAAAKPAPGSSGGTLNIEDEYRLHETSKEPDVSLGSTWLSDFPQAWAETGGMGLAVRQAPLIIPLKATSTPVSIKQYPMSQEARLGIKPHIQRLLDQGILVPCQSPWNTPLLPVKKPGTNDYRPVQDLREVNKRVEDIHPTVPNPYNLLSGLPPSHQWYTVLDLKDAFFCLRLHPTSQPLFAFEWRDPEMGISGQLTWTRLPQGFKNSPTLFNEALHRDLADFRIQHPDLILLQYVDDLLLAATSELDCQQGTRALLQTLGNLGYRASAKKAQICQKQVKYLGYLLKEGQRWLTEARKETVMGQPTPKTPRQLREFLGKAGFCRLFIPGFAEMAAPLYPLTKPGTLFNWGPDQQKAYQEIKQALLTAPALGLPDLTKPFELFVDEKQGYAKGVLTQKLGPWRRPVAYLSKKLDPVAAGWPPCLRMVAAIAVLTKDAGKLTMGQPLVILAPHAVEALVKQPPDRWLSNARMTHYQALLLDTDRVQFGPVVALNPATLLPLPEEGLQHNCLDILAEAHGTRPDLTDQPLPDADHTWYTDGSSLLQEGQRKAGAAVTTETEVIWAKALPAGTSAQRAELIALTQALKMAEGKKLNVYTDSRYAFATAHIHGEIYRRRGWLTSEGKEIKNKDEILALLKALFLPKRLSIIHCPGHQKGHSAEARGNRMADQAARKAAITETPDTSTLLIENSSPSGGSKRTADGSEFEAGKRTADGSEFEKRTADGSEFESPKKKAKVE

SEQ ID NO: 2629 - protein, 2116 aa, synthetic construct
MPAAKRVKLDGGDKKYSIGLDIGTNSVGWAVITDEYKVPSKKFKVLGNTDRHSIKKNLIGALLFDSGETAEATRLKRTARRRYTRRKNRICYLQEIFSNEMAKVDDSFFHRLEESFLVEEDKKHERHPIFGNIVDEVAYHEKYPTIYHLRKKLVDSTDKADLRLIYLALAHMIKFRGHFLIEGDLNPDNSDVDKLFIQLVQTYNQLFEENPINASGVDAKAILSARLSKSRRLENLIAQLPGEKKNGLFGNLIALSLGLTPNFKSNFDLAEDAKLQLSKDTYDDDLDNLLAQIGDQYADLFLAAKNLSDAILLSDILRVNTEITKAPLSASMIKRYDEHHQDLTLLKALVRQQLPEKYKEIFFDQSKNGYAGYIDGGASQEEFYKFIKPILEKMDGTEELLVKLNREDLLRKQRTFDNGSIPHQIHLGELHAILRRQEDFYPFLKDNREKIEKILTFRIPYYVGPLARGNSRFAWMTRKSEETITPWNFEEVVDKGASAQSFIERMTNFDKNLPNEKVLPKHSLLYEYFTVYNELTKVKYVTEGMRKPAFLSGEQKKAIVDLLFKTNRKVTVKQLKEDYFKKIECFDSVEISGVEDRFNASLGTYHDLLKIIKDKDFLDNEENEDILEDIVLTLTLFEDREMIEERLKTYAHLFDDKVMKQLKRRRYTGWGRLSRKLINGIRDKQSGKTILDFLKSDGFANRNFMQLIHDDSLTFKEDIQKAQVSGQGDSLHEHIANLAGSPAIKKGILQTVKVVDELVKVMGRHKPENIVIEMARENQTTQKGQKNSRERMKRIEEGIKELGSQILKEHPVENTQLQNEKLYLYYLQNGRDMYVDQELDINRLSDYDVDHIVPQSFLKDDSIDNKVLTRSDKARGKSDNVPSEEVVKKMKNYWRQLLNAKLITQRKFDNLTKAERGGLSELDKAGFIKRQLVETRQITKHVAQILDSRMNTKYDENDKLIREVKVITLKSKLVSDFRKDFQFYKVREINNYHHAHDAYLNAVVGTALIKKYPKLESEFVYGDYKVYDVRKMIAKSEQEIGKATAKYFFYSNIMNFFKTEITLANGEIRKRPLIETNGETGEIVWDKGRDFATVRKVLSMPQVNIVKKTEVQTGGFSKESILPKRNSDKLIARKKDWDPKKYGGFDSPTVAYSVLVVAKVEKGKSKKLKSVKELLGITIMERSSFEKNPIDFLEAKGYKEVKKDLIIKLPKYSLFELENGRKRMLASAGELQKGNELALPSKYVNFLYLASHYEKLKGSPEDNEQKQLFVEQHKHYLDEIIEQISEFSKRVILADANLDKVLSAYNKHRDKPIREQAENIIHLFTLTNLGAPAAFKYFDTTIDRKRYTSTKEVLDATLIHQSITGLYETRIDLSQLGGDGGGGSEAAAKGGGGGTLNIEDEYRLHETSKEPDVSLGSTWLSDFPQAWAETGGMGLAVRQAPLIIPLKATSTPVSIKQYPMSQEARLGIKPHIQRLLDQGILVPCQSPWNTPLLPVKKPGTNDYRPVQDLREVNKRVEDIHPTVPNPYNLLSGLPPSHQWYTVLDLKDAFFCLRLHPTSQPLFAFEWRDPEMGISGQLTWTRLPQGFKNSPTLFNEALHRDLADFRIQHPDLILLQYVDDLLLAATSELDCQQGTRALLQTLGNLGYRASAKKAQICQKQVKYLGYLLKEGQRWLTEARKETVMGQPTPKTPRQLREFLGKAGFCRLFIPGFAEMAAPLYPLTKPGTLFNWGPDQQKAYQEIKQALLTAPALGLPDLTKPFELFVDEKQGYAKGVLTQKLGPWRRPVAYLSKKLDPVAAGWPPCLRMVAAIAVLTKDAGKLTMGQPLVILAPHAVEALVKQPPDRWLSNARMTHYQALLLDTDRVQFGPVVALNPATLLPLPEEGLQHNCLDILAEAHGTRPDLTDQPLPDADHTWYTDGSSLLQEGQRKAGAAVTTETEVIWAKALPAGTSAQRAELIALTQALKMAEGKKLNVYTDSRYAFATAHIHGEIYRRRGWLTSEGKEIKNKDEILALLKALFLPKRLSIIHCPGHQKGHSAEARGNRMADQAARKAAITETPDTSTLLIENSSPSGGSKRTADGSEFEAGKRTADGSEFEKRTADGSEFESPKKKAKVE

SEQ ID NO: 2630 - protein, 2135 aa, synthetic construct
MPAAKRVKLDGGDKKYSIGLDIGTNSVGWAVITDEYKVPSKKFKVLGNTDRHSIKKNLIGALLFDSGETAEATRLKRTARRRYTRRKNRICYLQEIFSNEMAKVDDSFFHRLEESFLVEEDKKHERHPIFGNIVDEVAYHEKYPTIYHLRKKLVDSTDKADLRLIYLALAHMIKFRGHFLIEGDLNPDNSDVDKLFIQLVQTYNQLFEENPINASGVDAKAILSARLSKSRRLENLIAQLPGEKKNGLFGNLIALSLGLTPNFKSNFDLAEDAKLQLSKDTYDDDLDNLLAQIGDQYADLFLAAKNLSDAILLSDILRVNTEITKAPLSASMIKRYDEHHQDLTLLKALVRQQLPEKYKEIFFDQSKNGYAGYIDGGASQEEFYKFIKPILEKMDGTEELLVKLNREDLLRKQRTFDNGSIPHQIHLGELHAILRRQEDFYPFLKDNREKIEKILTFRIPYYVGPLARGNSRFAWMTRKSEETITPWNFEEVVDKGASAQSFIERMTNFDKNLPNEKVLPKHSLLYEYFTVYNELTKVKYVTEGMRKPAFLSGEQKKAIVDLLFKTNRKVTVKQLKEDYFKKIECFDSVEISGVEDRFNASLGTYHDLLKIIKDKDFLDNEENEDILEDIVLTLTLFEDREMIEERLKTYAHLFDDKVMKQLKRRRYTGWGRLSRKLINGIRDKQSGKTILDFLKSDGFANRNFMQLIHDDSLTFKEDIQKAQVSGQGDSLHEHIANLAGSPAIKKGILQTVKVVDELVKVMGRHKPENIVIEMARENQTTQKGQKNSRERMKRIEEGIKELGSQILKEHPVENTQLQNEKLYLYYLQNGRDMYVDQELDINRLSDYDVDHIVPQSFLKDDSIDNKVLTRSDKARGKSDNVPSEEVVKKMKNYWRQLLNAKLITQRKFDNLTKAERGGLSELDKAGFIKRQLVETRQITKHVAQILDSRMNTKYDENDKLIREVKVITLKSKLVSDFRKDFQFYKVREINNYHHAHDAYLNAVVGTALIKKYPKLESEFVYGDYKVYDVRKMIAKSEQEIGKATAKYFFYSNIMNFFKTEITLANGEIRKRPLIETNGETGEIVWDKGRDFATVRKVLSMPQVNIVKKTEVQTGGFSKESILPKRNSDKLIARKKDWDPKKYGGFDSPTVAYSVLVVAKVEKGKSKKLKSVKELLGITIMERSSFEKNPIDFLEAKGYKEVKKDLIIKLPKYSLFELENGRKRMLASAGELQKGNELALPSKYVNFLYLASHYEKLKGSPEDNEQKQLFVEQHKHYLDEIIEQISEFSKRVILADANLDKVLSAYNKHRDKPIREQAENIIHLFTLTNLGAPAAFKYFDTTIDRKRYTSTKEVLDATLIHQSITGLYETRIDLSQLGGDGGEAAAKEAAAKEAAAKEAAAKEAAAKEAAAKGGTLNIEDEYRLHETSKEPDVSLGSTWLSDFPQAWAETGGMGLAVRQAPLIIPLKATSTPVSIKQYPMSQEARLGIKPHIQRLLDQGILVPCQSPWNTPLLPVKKPGTNDYRPVQDLREVNKRVEDIHPTVPNPYNLLSGLPPSHQWYTVLDLKDAFFCLRLHPTSQPLFAFEWRDPEMGISGQLTWTRLPQGFKNSPTLFNEALHRDLADFRIQHPDLILLQYVDDLLLAATSELDCQQGTRALLQTLGNLGYRASAKKAQICQKQVKYLGYLLKEGQRWLTEARKETVMGQPTPKTPRQLREFLGKAGFCRLFIPGFAEMAAPLYPLTKPGTLFNWGPDQQKAYQEIKQALLTAPALGLPDLTKPFELFVDEKQGYAKGVLTQKLGPWRRPVAYLSKKLDPVAAGWPPCLRMVAAIAVLTKDAGKLTMGQPLVILAPHAVEALVKQPPDRWLSNARMTHYQALLLDTDRVQFGPVVALNPATLLPLPEEGLQHNCLDILAEAHGTRPDLTDQPLPDADHTWYTDGSSLLQEGQRKAGAAVTTETEVIWAKALPAGTSAQRAELIALTQALKMAEGKKLNVYTDSRYAFATAHIHGEIYRRRGWLTSEGKEIKNKDEILALLKALFLPKRLSIIHCPGHQKGHSAEARGNRMADQAARKAAITETPDTSTLLIENSSPSGGSKRTADGSEFEAGKRTADGSEFEKRTADGSEFESPKKKAKVE

SEQ ID NO: 2631 - protein, 2108 aa, synthetic construct
MPAAKRVKLDGGDKKYSIGLDIGTNSVGWAVITDEYKVPSKKFKVLGNTDRHSIKKNLIGALLFDSGETAEATRLKRTARRRYTRRKNRICYLQEIFSNEMAKVDDSFFHRLEESFLVEEDKKHERHPIFGNIVDEVAYHEKYPTIYHLRKKLVDSTDKADLRLIYLALAHMIKFRGHFLIEGDLNPDNSDVDKLFIQLVQTYNQLFEENPINASGVDAKAILSARLSKSRRLENLIAQLPGEKKNGLFGNLIALSLGLTPNFKSNFDLAEDAKLQLSKDTYDDDLDNLLAQIGDQYADLFLAAKNLSDAILLSDILRVNTEITKAPLSASMIKRYDEHHQDLTLLKALVRQQLPEKYKEIFFDQSKNGYAGYIDGGASQEEFYKFIKPILEKMDGTEELLVKLNREDLLRKQRTFDNGSIPHQIHLGELHAILRRQEDFYPFLKDNREKIEKILTFRIPYYVGPLARGNSRFAWMTRKSEETITPWNFEEVVDKGASAQSFIERMTNFDKNLPNEKVLPKHSLLYEYFTVYNELTKVKYVTEGMRKPAFLSGEQKKAIVDLLFKTNRKVTVKQLKEDYFKKIECFDSVEISGVEDRFNASLGTYHDLLKIIKDKDFLDNEENEDILEDIVLTLTLFEDREMIEERLKTYAHLFDDKVMKQLKRRRYTGWGRLSRKLINGIRDKQSGKTILDFLKSDGFANRNFMQLIHDDSLTFKEDIQKAQVSGQGDSLHEHIANLAGSPAIKKGILQTVKVVDELVKVMGRHKPENIVIEMARENQTTQKGQKNSRERMKRIEEGIKELGSQILKEHPVENTQLQNEKLYLYYLQNGRDMYVDQELDINRLSDYDVDHIVPQSFLKDDSIDNKVLTRSDKARGKSDNVPSEEVVKKMKNYWRQLLNAKLITQRKFDNLTKAERGGLSELDKAGFIKRQLVETRQITKHVAQILDSRMNTKYDENDKLIREVKVITLKSKLVSDFRKDFQFYKVREINNYHHAHDAYLNAVVGTALIKKYPKLESEFVYGDYKVYDVRKMIAKSEQEIGKATAKYFFYSNIMNFFKTEITLANGEIRKRPLIETNGETGEIVWDKGRDFATVRKVLSMPQVNIVKKTEVQTGGFSKESILPKRNSDKLIARKKDWDPKKYGGFDSPTVAYSVLVVAKVEKGKSKKLKSVKELLGITIMERSSFEKNPIDFLEAKGYKEVKKDLIIKLPKYSLFELENGRKRMLASAGELQKGNELALPSKYVNFLYLASHYEKLKGSPEDNEQKQLFVEQHKHYLDEIIEQISEFSKRVILADANLDKVLSAYNKHRDKPIREQAENIIHLFTLTNLGAPAAFKYFDTTIDRKRYTSTKEVLDATLIHQSITGLYETRIDLSQLGGDGGGGSGGTLNIEDEYRLHETSKEPDVSLGSTWLSDFPQAWAETGGMGLAVRQAPLIIPLKATSTPVSIKQYPMSQEARLGIKPHIQRLLDQGILVPCQSPWNTPLLPVKKPGTNDYRPVQDLREVNKRVEDIHPTVPNPYNLLSGLPPSHQWYTVLDLKDAFFCLRLHPTSQPLFAFEWRDPEMGISGQLTWTRLPQGFKNSPTLFNEALHRDLADFRIQHPDLILLQYVDDLLLAATSELDCQQGTRALLQTLGNLGYRASAKKAQICQKQVKYLGYLLKEGQRWLTEARKETVMGQPTPKTPRQLREFLGKAGFCRLFIPGFAEMAAPLYPLTKPGTLFNWGPDQQKAYQEIKQALLTAPALGLPDLTKPFELFVDEKQGYAKGVLTQKLGPWRRPVAYLSKKLDPVAAGWPPCLRMVAAIAVLTKDAGKLTMGQPLVILAPHAVEALVKQPPDRWLSNARMTHYQALLLDTDRVQFGPVVALNPATLLPLPEEGLQHNCLDILAEAHGTRPDLTDQPLPDADHTWYTDGSSLLQEGQRKAGAAVTTETEVIWAKALPAGTSAQRAELIALTQALKMAEGKKLNVYTDSRYAFATAHIHGEIYRRRGWLTSEGKEIKNKDEILALLKALFLPKRLSIIHCPGHQKGHSAEARGNRMADQAARKAAITETPDTSTLLIENSSPSGGSKRTADGSEFEAGKRTADGSEFEKRTADGSEFESPKKKAKVE

SEQ ID NO: 2632 - protein, 2114 aa, synthetic construct
MPAAKRVKLDGGDKKYSIGLDIGTNSVGWAVITDEYKVPSKKFKVLGNTDRHSIKKNLIGALLFDSGETAEATRLKRTARRRYTRRKNRICYLQEIFSNEMAKVDDSFFHRLEESFLVEEDKKHERHPIFGNIVDEVAYHEKYPTIYHLRKKLVDSTDKADLRLIYLALAHMIKFRGHFLIEGDLNPDNSDVDKLFIQLVQTYNQLFEENPINASGVDAKAILSARLSKSRRLENLIAQLPGEKKNGLFGNLIALSLGLTPNFKSNFDLAEDAKLQLSKDTYDDDLDNLLAQIGDQYADLFLAAKNLSDAILLSDILRVNTEITKAPLSASMIKRYDEHHQDLTLLKALVRQQLPEKYKEIFFDQSKNGYAGYIDGGASQEEFYKFIKPILEKMDGTEELLVKLNREDLLRKQRTFDNGSIPHQIHLGELHAILRRQEDFYPFLKDNREKIEKILTFRIPYYVGPLARGNSRFAWMTRKSEETITPWNFEEVVDKGASAQSFIERMTNFDKNLPNEKVLPKHSLLYEYFTVYNELTKVKYVTEGMRKPAFLSGEQKKAIVDLLFKTNRKVTVKQLKEDYFKKIECFDSVEISGVEDRFNASLGTYHDLLKIIKDKDFLDNEENEDILEDIVLTLTLFEDREMIEERLKTYAHLFDDKVMKQLKRRRYTGWGRLSRKLINGIRDKQSGKTILDFLKSDGFANRNFMQLIHDDSLTFKEDIQKAQVSGQGDSLHEHIANLAGSPAIKKGILQTVKVVDELVKVMGRHKPENIVIEMARENQTTQKGQKNSRERMKRIEEGIKELGSQILKEHPVENTQLQNEKLYLYYLQNGRDMYVDQELDINRLSDYDVDHIVPQSFLKDDSIDNKVLTRSDKARGKSDNVPSEEVVKKMKNYWRQLLNAKLITQRKFDNLTKAERGGLSELDKAGFIKRQLVETRQITKHVAQILDSRMNTKYDENDKLIREVKVITLKSKLVSDFRKDFQFYKVREINNYHHAHDAYLNAVVGTALIKKYPKLESEFVYGDYKVYDVRKMIAKSEQEIGKATAKYFFYSNIMNFFKTEITLANGEIRKRPLIETNGETGEIVWDKGRDFATVRKVLSMPQVNIVKKTEVQTGGFSKESILPKRNSDKLIARKKDWDPKKYGGFDSPTVAYSVLVVAKVEKGKSKKLKSVKELLGITIMERSSFEKNPIDFLEAKGYKEVKKDLIIKLPKYSLFELENGRKRMLASAGELQKGNELALPSKYVNFLYLASHYEKLKGSPEDNEQKQLFVEQHKHYLDEIIEQISEFSKRVILADANLDKVLSAYNKHRDKPIREQAENIIHLFTLTNLGAPAAFKYFDTTIDRKRYTSTKEVLDATLIHQSITGLYETRIDLSQLGGDGGGGGGSSGGSGGTLNIEDEYRLHETSKEPDVSLGSTWLSDFPQAWAETGGMGLAVRQAPLIIPLKATSTPVSIKQYPMSQEARLGIKPHIQRLLDQGILVPCQSPWNTPLLPVKKPGTNDYRPVQDLREVNKRVEDIHPTVPNPYNLLSGLPPSHQWYTVLDLKDAFFCLRLHPTSQPLFAFEWRDPEMGISGQLTWTRLPQGFKNSPTLFNEALHRDLADFRIQHPDLILLQYVDDLLLAATSELDCQQGTRALLQTLGNLGYRASAKKAQICQKQVKYLGYLLKEGQRWLTEARKETVMGQPTPKTPRQLREFLGKAGFCRLFIPGFAEMAAPLYPLTKPGTLFNWGPDQQKAYQEIKQALLTAPALGLPDLTKPFELFVDEKQGYAKGVLTQKLGPWRRPVAYLSKKLDPVAAGWPPCLRMVAAIAVLTKDAGKLTMGQPLVILAPHAVEALVKQPPDRWLSNARMTHYQALLLDTDRVQFGPVVALNPATLLPLPEEGLQHNCLDILAEAHGTRPDLTDQPLPDADHTWYTDGSSLLQEGQRKAGAAVTTETEVIWAKALPAGTSAQRAELIALTQALKMAEGKKLNVYTDSRYAFATAHIHGEIYRRRGWLTSEGKEIKNKDEILALLKALFLPKRLSIIHCPGHQKGHSAEARGNRMADQAARKAAITETPDTSTLLIENSSPSGGSKRTADGSEFEAGKRTADGSEFEKRTADGSEFESPKKKAKVE

SEQ ID NO: 2633 - protein, 2114 aa, synthetic construct
MPAAKRVKLDGGDKKYSIGLDIGTNSVGWAVITDEYKVPSKKFKVLGNTDRHSIKKNLIGALLFDSGETAEATRLKRTARRRYTRRKNRICYLQEIFSNEMAKVDDSFFHRLEESFLVEEDKKHERHPIFGNIVDEVAYHEKYPTIYHLRKKLVDSTDKADLRLIYLALAHMIKFRGHFLIEGDLNPDNSDVDKLFIQLVQTYNQLFEENPINASGVDAKAILSARLSKSRRLENLIAQLPGEKKNGLFGNLIALSLGLTPNFKSNFDLAEDAKLQLSKDTYDDDLDNLLAQIGDQYADLFLAAKNLSDAILLSDILRVNTEITKAPLSASMIKRYDEHHQDLTLLKALVRQQLPEKYKEIFFDQSKNGYAGYIDGGASQEEFYKFIKPILEKMDGTEELLVKLNREDLLRKQRTFDNGSIPHQIHLGELHAILRRQEDFYPFLKDNREKIEKILTFRIPYYVGPLARGNSRFAWMTRKSEETITPWNFEEVVDKGASAQSFIERMTNFDKNLPNEKVLPKHSLLYEYFTVYNELTKVKYVTEGMRKPAFLSGEQKKAIVDLLFKTNRKVTVKQLKEDYFKKIECFDSVEISGVEDRFNASLGTYHDLLKIIKDKDFLDNEENEDILEDIVLTLTLFEDREMIEERLKTYAHLFDDKVMKQLKRRRYTGWGRLSRKLINGIRDKQSGKTILDFLKSDGFANRNFMQLIHDDSLTFKEDIQKAQVSGQGDSLHEHIANLAGSPAIKKGILQTVKVVDELVKVMGRHKPENIVIEMARENQTTQKGQKNSRERMKRIEEGIKELGSQILKEHPVENTQLQNEKLYLYYLQNGRDMYVDQELDINRLSDYDVDHIVPQSFLKDDSIDNKVLTRSDKARGKSDNVPSEEVVKKMKNYWRQLLNAKLITQRKFDNLTKAERGGLSELDKAGFIKRQLVETRQITKHVAQILDSRMNTKYDENDKLIREVKVITLKSKLVSDFRKDFQFYKVREINNYHHAHDAYLNAVVGTALIKKYPKLESEFVYGDYKVYDVRKMIAKSEQEIGKATAKYFFYSNIMNFFKTEITLANGEIRKRPLIETNGETGEIVWDKGRDFATVRKVLSMPQVNIVKKTEVQTGGFSKESILPKRNSDKLIARKKDWDPKKYGGFDSPTVAYSVLVVAKVEKGKSKKLKSVKELLGITIMERSSFEKNPIDFLEAKGYKEVKKDLIIKLPKYSLFELENGRKRMLASAGELQKGNELALPSKYVNFLYLASHYEKLKGSPEDNEQKQLFVEQHKHYLDEIIEQISEFSKRVILADANLDKVLSAYNKHRDKPIREQAENIIHLFTLTNLGAPAAFKYFDTTIDRKRYTSTKEVLDATLIHQSITGLYETRIDLSQLGGDGGGSSPAPGGGGGTLNIEDEYRLHETSKEPDVSLGSTWLSDFPQAWAETGGMGLAVRQAPLIIPLKATSTPVSIKQYPMSQEARLGIKPHIQRLLDQGILVPCQSPWNTPLLPVKKPGTNDYRPVQDLREVNKRVEDIHPTVPNPYNLLSGLPPSHQWYTVLDLKDAFFCLRLHPTSQPLFAFEWRDPEMGISGQLTWTRLPQGFKNSPTLFNEALHRDLADFRIQHPDLILLQYVDDLLLAATSELDCQQGTRALLQTLGNLGYRASAKKAQICQKQVKYLGYLLKEGQRWLTEARKETVMGQPTPKTPRQLREFLGKAGFCRLFIPGFAEMAAPLYPLTKPGTLFNWGPDQQKAYQEIKQALLTAPALGLPDLTKPFELFVDEKQGYAKGVLTQKLGPWRRPVAYLSKKLDPVAAGWPPCLRMVAAIAVLTKDAGKLTMGQPLVILAPHAVEALVKQPPDRWLSNARMTHYQALLLDTDRVQFGPVVALNPATLLPLPEEGLQHNCLDILAEAHGTRPDLTDQPLPDADHTWYTDGSSLLQEGQRKAGAAVTTETEVIWAKALPAGTSAQRAELIALTQALKMAEGKKLNVYTDSRYAFATAHIHGEIYRRRGWLTSEGKEIKNKDEILALLKALFLPKRLSIIHCPGHQKGHSAEARGNRMADQAARKAAITETPDTSTLLIENSSPSGGSKRTADGSEFEAGKRTADGSEFEKRTADGSEFESPKKKAKVE

SEQ ID NO: 2634 - protein, 2114 aa, synthetic construct
MPAAKRVKLDGGDKKYSIGLDIGTNSVGWAVITDEYKVPSKKFKVLGNTDRHSIKKNLIGALLFDSGETAEATRLKRTARRRYTRRKNRICYLQEIFSNEMAKVDDSFFHRLEESFLVEEDKKHERHPIFGNIVDEVAYHEKYPTIYHLRKKLVDSTDKADLRLIYLALAHMIKFRGHFLIEGDLNPDNSDVDKLFIQLVQTYNQLFEENPINASGVDAKAILSARLSKSRRLENLIAQLPGEKKNGLFGNLIALSLGLTPNFKSNFDLAEDAKLQLSKDTYDDDLDNLLAQIGDQYADLFLAAKNLSDAILLSDILRVNTEITKAPLSASMIKRYDEHHQDLTLLKALVRQQLPEKYKEIFFDQSKNGYAGYIDGGASQEEFYKFIKPILEKMDGTEELLVKLNREDLLRKQRTFDNGSIPHQIHLGELHAILRRQEDFYPFLKDNREKIEKILTFRIPYYVGPLARGNSRFAWMTRKSEETITPWNFEEVVDKGASAQSFIERMTNFDKNLPNEKVLPKHSLLYEYFTVYNELTKVKYVTEGMRKPAFLSGEQKKAIVDLLFKTNRKVTVKQLKEDYFKKIECFDSVEISGVEDRFNASLGTYHDLLKIIKDKDFLDNEENEDILEDIVLTLTLFEDREMIEERLKTYAHLFDDKVMKQLKRRRYTGWGRLSRKLINGIRDKQSGKTILDFLKSDGFANRNFMQLIHDDSLTFKEDIQKAQVSGQGDSLHEHIANLAGSPAIKKGILQTVKVVDELVKVMGRHKPENIVIEMARENQTTQKGQKNSRERMKRIEEGIKELGSQILKEHPVENTQLQNEKLYLYYLQNGRDMYVDQELDINRLSDYDVDHIVPQSFLKDDSIDNKVLTRSDKARGKSDNVPSEEVVKKMKNYWRQLLNAKLITQRKFDNLTKAERGGLSELDKAGFIKRQLVETRQITKHVAQILDSRMNTKYDENDKLIREVKVITLKSKLVSDFRKDFQFYKVREINNYHHAHDAYLNAVVGTALIKKYPKLESEFVYGDYKVYDVRKMIAKSEQEIGKATAKYFFYSNIMNFFKTEITLANGEIRKRPLIETNGETGEIVWDKGRDFATVRKVLSMPQVNIVKKTEVQTGGFSKESILPKRNSDKLIARKKDWDPKKYGGFDSPTVAYSVLVVAKVEKGKSKKLKSVKELLGITIMERSSFEKNPIDFLEAKGYKEVKKDLIIKLPKYSLFELENGRKRMLASAGELQKGNELALPSKYVNFLYLASHYEKLKGSPEDNEQKQLFVEQHKHYLDEIIEQISEFSKRVILADANLDKVLSAYNKHRDKPIREQAENIIHLFTLTNLGAPAAFKYFDTTIDRKRYTSTKEVLDATLIHQSITGLYETRIDLSQLGGDGGGSSGSSGSSGGTLNIEDEYRLHETSKEPDVSLGSTWLSDFPQAWAETGGMGLAVRQAPLIIPLKATSTPVSIKQYPMSQEARLGIKPHIQRLLDQGILVPCQSPWNTPLLPVKKPGTNDYRPVQDLREVNKRVEDIHPTVPNPYNLLSGLPPSHQWYTVLDLKDAFFCLRLHPTSQPLFAFEWRDPEMGISGQLTWTRLPQGFKNSPTLFNEALHRDLADFRIQHPDLILLQYVDDLLLAATSELDCQQGTRALLQTLGNLGYRASAKKAQICQKQVKYLGYLLKEGQRWLTEARKETVMGQPTPKTPRQLREFLGKAGFCRLFIPGFAEMAAPLYPLTKPGTLFNWGPDQQKAYQEIKQALLTAPALGLPDLTKPFELFVDEKQGYAKGVLTQKLGPWRRPVAYLSKKLDPVAAGWPPCLRMVAAIAVLTKDAGKLTMGQPLVILAPHAVEALVKQPPDRWLSNARMTHYQALLLDTDRVQFGPVVALNPATLLPLPEEGLQHNCLDILAEAHGTRPDLTDQPLPDADHTWYTDGSSLLQEGQRKAGAAVTTETEVIWAKALPAGTSAQRAELIALTQALKMAEGKKLNVYTDSRYAFATAHIHGEIYRRRGWLTSEGKEIKNKDEILALLKALFLPKRLSIIHCPGHQKGHSAEARGNRMADQAARKAAITETPDTSTLLIENSSPSGGSKRTADGSEFEAGKRTADGSEFEKRTADGSEFESPKKKAKVE

SEQ ID NO: 2635 - protein, 2112 aa, synthetic construct
MPAAKRVKLDGGDKKYSIGLDIGTNSVGWAVITDEYKVPSKKFKVLGNTDRHSIKKNLIGALLFDSGETAEATRLKRTARRRYTRRKNRICYLQEIFSNEMAKVDDSFFHRLEESFLVEEDKKHERHPIFGNIVDEVAYHEKYPTIYHLRKKLVDSTDKADLRLIYLALAHMIKFRGHFLIEGDLNPDNSDVDKLFIQLVQTYNQLFEENPINASGVDAKAILSARLSKSRRLENLIAQLPGEKKNGLFGNLIALSLGLTPNFKSNFDLAEDAKLQLSKDTYDDDLDNLLAQIGDQYADLFLAAKNLSDAILLSDILRVNTEITKAPLSASMIKRYDEHHQDLTLLKALVRQQLPEKYKEIFFDQSKNGYAGYIDGGASQEEFYKFIKPILEKMDGTEELLVKLNREDLLRKQRTFDNGSIPHQIHLGELHAILRRQEDFYPFLKDNREKIEKILTFRIPYYVGPLARGNSRFAWMTRKSEETITPWNFEEVVDKGASAQSFIERMTNFDKNLPNEKVLPKHSLLYEYFTVYNELTKVKYVTEGMRKPAFLSGEQKKAIVDLLFKTNRKVTVKQLKEDYFKKIECFDSVEISGVEDRFNASLGTYHDLLKIIKDKDFLDNEENEDILEDIVLTLTLFEDREMIEERLKTYAHLFDDKVMKQLKRRRYTGWGRLSRKLINGIRDKQSGKTILDFLKSDGFANRNFMQLIHDDSLTFKEDIQKAQVSGQGDSLHEHIANLAGSPAIKKGILQTVKVVDELVKVMGRHKPENIVIEMARENQTTQKGQKNSRERMKRIEEGIKELGSQILKEHPVENTQLQNEKLYLYYLQNGRDMYVDQELDINRLSDYDVDHIVPQSFLKDDSIDNKVLTRSDKARGKSDNVPSEEVVKKMKNYWRQLLNAKLITQRKFDNLTKAERGGLSELDKAGFIKRQLVETRQITKHVAQILDSRMNTKYDENDKLIREVKVITLKSKLVSDFRKDFQFYKVREINNYHHAHDAYLNAVVGTALIKKYPKLESEFVYGDYKVYDVRKMIAKSEQEIGKATAKYFFYSNIMNFFKTEITLANGEIRKRPLIETNGETGEIVWDKGRDFATVRKVLSMPQVNIVKKTEVQTGGFSKESILPKRNSDKLIARKKDWDPKKYGGFDSPTVAYSVLVVAKVEKGKSKKLKSVKELLGITIMERSSFEKNPIDFLEAKGYKEVKKDLIIKLPKYSLFELENGRKRMLASAGELQKGNELALPSKYVNFLYLASHYEKLKGSPEDNEQKQLFVEQHKHYLDEIIEQISEFSKRVILADANLDKVLSAYNKHRDKPIREQAENIIHLFTLTNLGAPAAFKYFDTTIDRKRYTSTKEVLDATLIHQSITGLYETRIDLSQLGGDGGGGGGGGGGGTLNIEDEYRLHETSKEPDVSLGSTWLSDFPQAWAETGGMGLAVRQAPLIIPLKATSTPVSIKQYPMSQEARLGIKPHIQRLLDQGILVPCQSPWNTPLLPVKKPGTNDYRPVQDLREVNKRVEDIHPTVPNPYNLLSGLPPSHQWYTVLDLKDAFFCLRLHPTSQPLFAFEWRDPEMGISGQLTWTRLPQGFKNSPTLFNEALHRDLADFRIQHPDLILLQYVDDLLLAATSELDCQQGTRALLQTLGNLGYRASAKKAQICQKQVKYLGYLLKEGQRWLTEARKETVMGQPTPKTPRQLREFLGKAGFCRLFIPGFAEMAAPLYPLTKPGTLFNWGPDQQKAYQEIKQALLTAPALGLPDLTKPFELFVDEKQGYAKGVLTQKLGPWRRPVAYLSKKLDPVAAGWPPCLRMVAAIAVLTKDAGKLTMGQPLVILAPHAVEALVKQPPDRWLSNARMTHYQALLLDTDRVQFGPVVALNPATLLPLPEEGLQHNCLDILAEAHGTRPDLTDQPLPDADHTWYTDGSSLLQEGQRKAGAAVTTETEVIWAKALPAGTSAQRAELIALTQALKMAEGKKLNVYTDSRYAFATAHIHGEIYRRRGWLTSEGKEIKNKDEILALLKALFLPKRLSIIHCPGHQKGHSAEARGNRMADQAARKAAITETPDTSTLLIENSSPSGGSKRTADGSEFEAGKRTADGSEFEKRTADGSEFESPKKKAKVE

SEQ ID NO: 2636 - protein, 2120 aa, synthetic construct
MPAAKRVKLDGGDKKYSIGLDIGTNSVGWAVITDEYKVPSKKFKVLGNTDRHSIKKNLIGALLFDSGETAEATRLKRTARRRYTRRKNRICYLQEIFSNEMAKVDDSFFHRLEESFLVEEDKKHERHPIFGNIVDEVAYHEKYPTIYHLRKKLVDSTDKADLRLIYLALAHMIKFRGHFLIEGDLNPDNSDVDKLFIQLVQTYNQLFEENPINASGVDAKAILSARLSKSRRLENLIAQLPGEKKNGLFGNLIALSLGLTPNFKSNFDLAEDAKLQLSKDTYDDDLDNLLAQIGDQYADLFLAAKNLSDAILLSDILRVNTEITKAPLSASMIKRYDEHHQDLTLLKALVRQQLPEKYKEIFFDQSKNGYAGYIDGGASQEEFYKFIKPILEKMDGTEELLVKLNREDLLRKQRTFDNGSIPHQIHLGELHAILRRQEDFYPFLKDNREKIEKILTFRIPYYVGPLARGNSRFAWMTRKSEETITPWNFEEVVDKGASAQSFIERMTNFDKNLPNEKVLPKHSLLYEYFTVYNELTKVKYVTEGMRKPAFLSGEQKKAIVDLLFKTNRKVTVKQLKEDYFKKIECFDSVEISGVEDRFNASLGTYHDLLKIIKDKDFLDNEENEDILEDIVLTLTLFEDREMIEERLKTYAHLFDDKVMKQLKRRRYTGWGRLSRKLINGIRDKQSGKTILDFLKSDGFANRNFMQLIHDDSLTFKEDIQKAQVSGQGDSLHEHIANLAGSPAIKKGILQTVKVVDELVKVMGRHKPENIVIEMARENQTTQKGQKNSRERMKRIEEGIKELGSQILKEHPVENTQLQNEKLYLYYLQNGRDMYVDQELDINRLSDYDVDHIVPQSFLKDDSIDNKVLTRSDKARGKSDNVPSEEVVKKMKNYWRQLLNAKLITQRKFDNLTKAERGGLSELDKAGFIKRQLVETRQITKHVAQILDSRMNTKYDENDKLIREVKVITLKSKLVSDFRKDFQFYKVREINNYHHAHDAYLNAVVGTALIKKYPKLESEFVYGDYKVYDVRKMIAKSEQEIGKATAKYFFYSNIMNFFKTEITLANGEIRKRPLIETNGETGEIVWDKGRDFATVRKVLSMPQVNIVKKTEVQTGGFSKESILPKRNSDKLIARKKDWDPKKYGGFDSPTVAYSVLVVAKVEKGKSKKLKSVKELLGITIMERSSFEKNPIDFLEAKGYKEVKKDLIIKLPKYSLFELENGRKRMLASAGELQKGNELALPSKYVNFLYLASHYEKLKGSPEDNEQKQLFVEQHKHYLDEIIEQISEFSKRVILADANLDKVLSAYNKHRDKPIREQAENIIHLFTLTNLGAPAAFKYFDTTIDRKRYTSTKEVLDATLIHQSITGLYETRIDLSQLGGDGGGGGGSEAAAKGGGGSGGTLNIEDEYRLHETSKEPDVSLGSTWLSDFPQAWAETGGMGLAVRQAPLIIPLKATSTPVSIKQYPMSQEARLGIKPHIQRLLDQGILVPCQSPWNTPLLPVKKPGTNDYRPVQDLREVNKRVEDIHPTVPNPYNLLSGLPPSHQWYTVLDLKDAFFCLRLHPTSQPLFAFEWRDPEMGISGQLTWTRLPQGFKNSPTLFNEALHRDLADFRIQHPDLILLQYVDDLLLAATSELDCQQGTRALLQTLGNLGYRASAKKAQICQKQVKYLGYLLKEGQRWLTEARKETVMGQPTPKTPRQLREFLGKAGFCRLFIPGFAEMAAPLYPLTKPGTLFNWGPDQQKAYQEIKQALLTAPALGLPDLTKPFELFVDEKQGYAKGVLTQKLGPWRRPVAYLSKKLDPVAAGWPPCLRMVAAIAVLTKDAGKLTMGQPLVILAPHAVEALVKQPPDRWLSNARMTHYQALLLDTDRVQFGPVVALNPATLLPLPEEGLQHNCLDILAEAHGTRPDLTDQPLPDADHTWYTDGSSLLQEGQRKAGAAVTTETEVIWAKALPAGTSAQRAELIALTQALKMAEGKKLNVYTDSRYAFATAHIHGEIYRRRGWLTSEGKEIKNKDEILALLKALFLPKRLSIIHCPGHQKGHSAEARGNRMADQAARKAAITETPDTSTLLIENSSPSGGSKRTADGSEFEAGKRTADGSEFEKRTADGSEFESPKKKAKVE

SEQ ID NO: 2637 - protein, 2116 aa, synthetic construct
MPAAKRVKLDGGDKKYSIGLDIGTNSVGWAVITDEYKVPSKKFKVLGNTDRHSIKKNLIGALLFDSGETAEATRLKRTARRRYTRRKNRICYLQEIFSNEMAKVDDSFFHRLEESFLVEEDKKHERHPIFGNIVDEVAYHEKYPTIYHLRKKLVDSTDKADLRLIYLALAHMIKFRGHFLIEGDLNPDNSDVDKLFIQLVQTYNQLFEENPINASGVDAKAILSARLSKSRRLENLIAQLPGEKKNGLFGNLIALSLGLTPNFKSNFDLAEDAKLQLSKDTYDDDLDNLLAQIGDQYADLFLAAKNLSDAILLSDILRVNTEITKAPLSASMIKRYDEHHQDLTLLKALVRQQLPEKYKEIFFDQSKNGYAGYIDGGASQEEFYKFIKPILEKMDGTEELLVKLNREDLLRKQRTFDNGSIPHQIHLGELHAILRRQEDFYPFLKDNREKIEKILTFRIPYYVGPLARGNSRFAWMTRKSEETITPWNFEEVVDKGASAQSFIERMTNFDKNLPNEKVLPKHSLLYEYFTVYNELTKVKYVTEGMRKPAFLSGEQKKAIVDLLFKTNRKVTVKQLKEDYFKKIECFDSVEISGVEDRFNASLGTYHDLLKIIKDKDFLDNEENEDILEDIVLTLTLFEDREMIEERLKTYAHLFDDKVMKQLKRRRYTGWGRLSRKLINGIRDKQSGKTILDFLKSDGFANRNFMQLIHDDSLTFKEDIQKAQVSGQGDSLHEHIANLAGSPAIKKGILQTVKVVDELVKVMGRHKPENIVIEMARENQTTQKGQKNSRERMKRIEEGIKELGSQILKEHPVENTQLQNEKLYLYYLQNGRDMYVDQELDINRLSDYDVDHIVPQSFLKDDSIDNKVLTRSDKARGKSDNVPSEEVVKKMKNYWRQLLNAKLITQRKFDNLTKAERGGLSELDKAGFIKRQLVETRQITKHVAQILDSRMNTKYDENDKLIREVKVITLKSKLVSDFRKDFQFYKVREINNYHHAHDAYLNAVVGTALIKKYPKLESEFVYGDYKVYDVRKMIAKSEQEIGKATAKYFFYSNIMNFFKTEITLANGEIRKRPLIETNGETGEIVWDKGRDFATVRKVLSMPQVNIVKKTEVQTGGFSKESILPKRNSDKLIARKKDWDPKKYGGFDSPTVAYSVLVVAKVEKGKSKKLKSVKELLGITIMERSSFEKNPIDFLEAKGYKEVKKDLIIKLPKYSLFELENGRKRMLASAGELQKGNELALPSKYVNFLYLASHYEKLKGSPEDNEQKQLFVEQHKHYLDEIIEQISEFSKRVILADANLDKVLSAYNKHRDKPIREQAENIIHLFTLTNLGAPAAFKYFDTTIDRKRYTSTKEVLDATLIHQSITGLYETRIDLSQLGGDGGEAAAKGGSGGGGGTLNIEDEYRLHETSKEPDVSLGSTWLSDFPQAWAETGGMGLAVRQAPLIIPLKATSTPVSIKQYPMSQEARLGIKPHIQRLLDQGILVPCQSPWNTPLLPVKKPGTNDYRPVQDLREVNKRVEDIHPTVPNPYNLLSGLPPSHQWYTVLDLKDAFFCLRLHPTSQPLFAFEWRDPEMGISGQLTWTRLPQGFKNSPTLFNEALHRDLADFRIQHPDLILLQYVDDLLLAATSELDCQQGTRALLQTLGNLGYRASAKKAQICQKQVKYLGYLLKEGQRWLTEARKETVMGQPTPKTPRQLREFLGKAGFCRLFIPGFAEMAAPLYPLTKPGTLFNWGPDQQKAYQEIKQALLTAPALGLPDLTKPFELFVDEKQGYAKGVLTQKLGPWRRPVAYLSKKLDPVAAGWPPCLRMVAAIAVLTKDAGKLTMGQPLVILAPHAVEALVKQPPDRWLSNARMTHYQALLLDTDRVQFGPVVALNPATLLPLPEEGLQHNCLDILAEAHGTRPDLTDQPLPDADHTWYTDGSSLLQEGQRKAGAAVTTETEVIWAKALPAGTSAQRAELIALTQALKMAEGKKLNVYTDSRYAFATAHIHGEIYRRRGWLTSEGKEIKNKDEILALLKALFLPKRLSIIHCPGHQKGHSAEARGNRMADQAARKAAITETPDTSTLLIENSSPSGGSKRTADGSEFEAGKRTADGSEFEKRTADGSEFESPKKKAKVE

SEQ ID NO: 2638 - protein, 2116 aa, synthetic construct
MPAAKRVKLDGGDKKYSIGLDIGTNSVGWAVITDEYKVPSKKFKVLGNTDRHSIKKNLIGALLFDSGETAEATRLKRTARRRYTRRKNRICYLQEIFSNEMAKVDDSFFHRLEESFLVEEDKKHERHPIFGNIVDEVAYHEKYPTIYHLRKKLVDSTDKADLRLIYLALAHMIKFRGHFLIEGDLNPDNSDVDKLFIQLVQTYNQLFEENPINASGVDAKAILSARLSKSRRLENLIAQLPGEKKNGLFGNLIALSLGLTPNFKSNFDLAEDAKLQLSKDTYDDDLDNLLAQIGDQYADLFLAAKNLSDAILLSDILRVNTEITKAPLSASMIKRYDEHHQDLTLLKALVRQQLPEKYKEIFFDQSKNGYAGYIDGGASQEEFYKFIKPILEKMDGTEELLVKLNREDLLRKQRTFDNGSIPHQIHLGELHAILRRQEDFYPFLKDNREKIEKILTFRIPYYVGPLARGNSRFAWMTRKSEETITPWNFEEVVDKGASAQSFIERMTNFDKNLPNEKVLPKHSLLYEYFTVYNELTKVKYVTEGMRKPAFLSGEQKKAIVDLLFKTNRKVTVKQLKEDYFKKIECFDSVEISGVEDRFNASLGTYHDLLKIIKDKDFLDNEENEDILEDIVLTLTLFEDREMIEERLKTYAHLFDDKVMKQLKRRRYTGWGRLSRKLINGIRDKQSGKTILDFLKSDGFANRNFMQLIHDDSLTFKEDIQKAQVSGQGDSLHEHIANLAGSPAIKKGILQTVKVVDELVKVMGRHKPENIVIEMARENQTTQKGQKNSRERMKRIEEGIKELGSQILKEHPVENTQLQNEKLYLYYLQNGRDMYVDQELDINRLSDYDVDHIVPQSFLKDDSIDNKVLTRSDKARGKSDNVPSEEVVKKMKNYWRQLLNAKLITQRKFDNLTKAERGGLSELDKAGFIKRQLVETRQITKHVAQILDSRMNTKYDENDKLIREVKVITLKSKLVSDFRKDFQFYKVREINNYHHAHDAYLNAVVGTALIKKYPKLESEFVYGDYKVYDVRKMIAKSEQEIGKATAKYFFYSNIMNFFKTEITLANGEIRKRPLIETNGETGEIVWDKGRDFATVRKVLSMPQVNIVKKTEVQTGGFSKESILPKRNSDKLIARKKDWDPKKYGGFDSPTVAYSVLVVAKVEKGKSKKLKSVKELLGITIMERSSFEKNPIDFLEAKGYKEVKKDLIIKLPKYSLFELENGRKRMLASAGELQKGNELALPSKYVNFLYLASHYEKLKGSPEDNEQKQLFVEQHKHYLDEIIEQISEFSKRVILADANLDKVLSAYNKHRDKPIREQAENIIHLFTLTNLGAPAAFKYFDTTIDRKRYTSTKEVLDATLIHQSITGLYETRIDLSQLGGDGGGGGEAAAKGGSGGTLNIEDEYRLHETSKEPDVSLGSTWLSDFPQAWAETGGMGLAVRQAPLIIPLKATSTPVSIKQYPMSQEARLGIKPHIQRLLDQGILVPCQSPWNTPLLPVKKPGTNDYRPVQDLREVNKRVEDIHPTVPNPYNLLSGLPPSHQWYTVLDLKDAFFCLRLHPTSQPLFAFEWRDPEMGISGQLTWTRLPQGFKNSPTLFNEALHRDLADFRIQHPDLILLQYVDDLLLAATSELDCQQGTRALLQTLGNLGYRASAKKAQICQKQVKYLGYLLKEGQRWLTEARKETVMGQPTPKTPRQLREFLGKAGFCRLFIPGFAEMAAPLYPLTKPGTLFNWGPDQQKAYQEIKQALLTAPALGLPDLTKPFELFVDEKQGYAKGVLTQKLGPWRRPVAYLSKKLDPVAAGWPPCLRMVAAIAVLTKDAGKLTMGQPLVILAPHAVEALVKQPPDRWLSNARMTHYQALLLDTDRVQFGPVVALNPATLLPLPEEGLQHNCLDILAEAHGTRPDLTDQPLPDADHTWYTDGSSLLQEGQRKAGAAVTTETEVIWAKALPAGTSAQRAELIALTQALKMAEGKKLNVYTDSRYAFATAHIHGEIYRRRGWLTSEGKEIKNKDEILALLKALFLPKRLSIIHCPGHQKGHSAEARGNRMADQAARKAAITETPDTSTLLIENSSPSGGSKRTADGSEFEAGKRTADGSEFEKRTADGSEFESPKKKAKVE

SEQ ID NO: 2639 - protein, 2115 aa, synthetic construct
MPAAKRVKLDGGDKKYSIGLDIGTNSVGWAVITDEYKVPSKKFKVLGNTDRHSIKKNLIGALLFDSGETAEATRLKRTARRRYTRRKNRICYLQEIFSNEMAKVDDSFFHRLEESFLVEEDKKHERHPIFGNIVDEVAYHEKYPTIYHLRKKLVDSTDKADLRLIYLALAHMIKFRGHFLIEGDLNPDNSDVDKLFIQLVQTYNQLFEENPINASGVDAKAILSARLSKSRRLENLIAQLPGEKKNGLFGNLIALSLGLTPNFKSNFDLAEDAKLQLSKDTYDDDLDNLLAQIGDQYADLFLAAKNLSDAILLSDILRVNTEITKAPLSASMIKRYDEHHQDLTLLKALVRQQLPEKYKEIFFDQSKNGYAGYIDGGASQEEFYKFIKPILEKMDGTEELLVKLNREDLLRKQRTFDNGSIPHQIHLGELHAILRRQEDFYPFLKDNREKIEKILTFRIPYYVGPLARGNSRFAWMTRKSEETITPWNFEEVVDKGASAQSFIERMTNFDKNLPNEKVLPKHSLLYEYFTVYNELTKVKYVTEGMRKPAFLSGEQKKAIVDLLFKTNRKVTVKQLKEDYFKKIECFDSVEISGVEDRFNASLGTYHDLLKIIKDKDFLDNEENEDILEDIVLTLTLFEDREMIEERLKTYAHLFDDKVMKQLKRRRYTGWGRLSRKLINGIRDKQSGKTILDFLKSDGFANRNFMQLIHDDSLTFKEDIQKAQVSGQGDSLHEHIANLAGSPAIKKGILQTVKVVDELVKVMGRHKPENIVIEMARENQTTQKGQKNSRERMKRIEEGIKELGSQILKEHPVENTQLQNEKLYLYYLQNGRDMYVDQELDINRLSDYDVDHIVPQSFLKDDSIDNKVLTRSDKARGKSDNVPSEEVVKKMKNYWRQLLNAKLITQRKFDNLTKAERGGLSELDKAGFIKRQLVETRQITKHVAQILDSRMNTKYDENDKLIREVKVITLKSKLVSDFRKDFQFYKVREINNYHHAHDAYLNAVVGTALIKKYPKLESEFVYGDYKVYDVRKMIAKSEQEIGKATAKYFFYSNIMNFFKTEITLANGEIRKRPLIETNGETGEIVWDKGRDFATVRKVLSMPQVNIVKKTEVQTGGFSKESILPKRNSDKLIARKKDWDPKKYGGFDSPTVAYSVLVVAKVEKGKSKKLKSVKELLGITIMERSSFEKNPIDFLEAKGYKEVKKDLIIKLPKYSLFELENGRKRMLASAGELQKGNELALPSKYVNFLYLASHYEKLKGSPEDNEQKQLFVEQHKHYLDEIIEQISEFSKRVILADANLDKVLSAYNKHRDKPIREQAENIIHLFTLTNLGAPAAFKYFDTTIDRKRYTSTKEVLDATLIHQSITGLYETRIDLSQLGGDGGGGGGSGGGGSGGTLNIEDEYRLHETSKEPDVSLGSTWLSDFPQAWAETGGMGLAVRQAPLIIPLKATSTPVSIKQYPMSQEARLGIKPHIQRLLDQGILVPCQSPWNTPLLPVKKPGTNDYRPVQDLREVNKRVEDIHPTVPNPYNLLSGLPPSHQWYTVLDLKDAFFCLRLHPTSQPLFAFEWRDPEMGISGQLTWTRLPQGFKNSPTLFNEALHRDLADFRIQHPDLILLQYVDDLLLAATSELDCQQGTRALLQTLGNLGYRASAKKAQICQKQVKYLGYLLKEGQRWLTEARKETVMGQPTPKTPRQLREFLGKAGFCRLFIPGFAEMAAPLYPLTKPGTLFNWGPDQQKAYQEIKQALLTAPALGLPDLTKPFELFVDEKQGYAKGVLTQKLGPWRRPVAYLSKKLDPVAAGWPPCLRMVAAIAVLTKDAGKLTMGQPLVILAPHAVEALVKQPPDRWLSNARMTHYQALLLDTDRVQFGPVVALNPATLLPLPEEGLQHNCLDILAEAHGTRPDLTDQPLPDADHTWYTDGSSLLQEGQRKAGAAVTTETEVIWAKALPAGTSAQRAELIALTQALKMAEGKKLNVYTDSRYAFATAHIHGEIYRRRGWLTSEGKEIKNKDEILALLKALFLPKRLSIIHCPGHQKGHSAEARGNRMADQAARKAAITETPDTSTLLIENSSPSGGSKRTADGSEFEAGKRTADGSEFEKRTADGSEFESPKKKAKVE

SEQ ID NO: 2640 - protein, 2116 aa, synthetic construct
MPAAKRVKLDGGDKKYSIGLDIGTNSVGWAVITDEYKVPSKKFKVLGNTDRHSIKKNLIGALLFDSGETAEATRLKRTARRRYTRRKNRICYLQEIFSNEMAKVDDSFFHRLEESFLVEEDKKHERHPIFGNIVDEVAYHEKYPTIYHLRKKLVDSTDKADLRLIYLALAHMIKFRGHFLIEGDLNPDNSDVDKLFIQLVQTYNQLFEENPINASGVDAKAILSARLSKSRRLENLIAQLPGEKKNGLFGNLIALSLGLTPNFKSNFDLAEDAKLQLSKDTYDDDLDNLLAQIGDQYADLFLAAKNLSDAILLSDILRVNTEITKAPLSASMIKRYDEHHQDLTLLKALVRQQLPEKYKEIFFDQSKNGYAGYIDGGASQEEFYKFIKPILEKMDGTEELLVKLNREDLLRKQRTFDNGSIPHQIHLGELHAILRRQEDFYPFLKDNREKIEKILTFRIPYYVGPLARGNSRFAWMTRKSEETITPWNFEEVVDKGASAQSFIERMTNFDKNLPNEKVLPKHSLLYEYFTVYNELTKVKYVTEGMRKPAFLSGEQKKAIVDLLFKTNRKVTVKQLKEDYFKKIECFDSVEISGVEDRFNASLGTYHDLLKIIKDKDFLDNEENEDILEDIVLTLTLFEDREMIEERLKTYAHLFDDKVMKQLKRRRYTGWGRLSRKLINGIRDKQSGKTILDFLKSDGFANRNFMQLIHDDSLTFKEDIQKAQVSGQGDSLHEHIANLAGSPAIKKGILQTVKVVDELVKVMGRHKPENIVIEMARENQTTQKGQKNSRERMKRIEEGIKELGSQILKEHPVENTQLQNEKLYLYYLQNGRDMYVDQELDINRLSDYDVDHIVPQSFLKDDSIDNKVLTRSDKARGKSDNVPSEEVVKKMKNYWRQLLNAKLITQRKFDNLTKAERGGLSELDKAGFIKRQLVETRQITKHVAQILDSRMNTKYDENDKLIREVKVITLKSKLVSDFRKDFQFYKVREINNYHHAHDAYLNAVVGTALIKKYPKLESEFVYGDYKVYDVRKMIAKSEQEIGKATAKYFFYSNIMNFFKTEITLANGEIRKRPLIETNGETGEIVWDKGRDFATVRKVLSMPQVNIVKKTEVQTGGFSKESILPKRNSDKLIARKKDWDPKKYGGFDSPTVAYSVLVVAKVEKGKSKKLKSVKELLGITIMERSSFEKNPIDFLEAKGYKEVKKDLIIKLPKYSLFELENGRKRMLASAGELQKGNELALPSKYVNFLYLASHYEKLKGSPEDNEQKQLFVEQHKHYLDEIIEQISEFSKRVILADANLDKVLSAYNKHRDKPIREQAENIIHLFTLTNLGAPAAFKYFDTTIDRKRYTSTKEVLDATLIHQSITGLYETRIDLSQLGGDGGPAPGGSEAAAKGGTLNIEDEYRLHETSKEPDVSLGSTWLSDFPQAWAETGGMGLAVRQAPLIIPLKATSTPVSIKQYPMSQEARLGIKPHIQRLLDQGILVPCQSPWNTPLLPVKKPGTNDYRPVQDLREVNKRVEDIHPTVPNPYNLLSGLPPSHQWYTVLDLKDAFFCLRLHPTSQPLFAFEWRDPEMGISGQLTWTRLPQGFKNSPTLFNEALHRDLADFRIQHPDLILLQYVDDLLLAATSELDCQQGTRALLQTLGNLGYRASAKKAQICQKQVKYLGYLLKEGQRWLTEARKETVMGQPTPKTPRQLREFLGKAGFCRLFIPGFAEMAAPLYPLTKPGTLFNWGPDQQKAYQEIKQALLTAPALGLPDLTKPFELFVDEKQGYAKGVLTQKLGPWRRPVAYLSKKLDPVAAGWPPCLRMVAAIAVLTKDAGKLTMGQPLVILAPHAVEALVKQPPDRWLSNARMTHYQALLLDTDRVQFGPVVALNPATLLPLPEEGLQHNCLDILAEAHGTRPDLTDQPLPDADHTWYTDGSSLLQEGQRKAGAAVTTETEVIWAKALPAGTSAQRAELIALTQALKMAEGKKLNVYTDSRYAFATAHIHGEIYRRRGWLTSEGKEIKNKDEILALLKALFLPKRLSIIHCPGHQKGHSAEARGNRMADQAARKAAITETPDTSTLLIENSSPSGGSKRTADGSEFEAGKRTADGSEFEKRTADGSEFESPKKKAKVE

SEQ ID NO: 2641 - protein, 2116 aa, synthetic construct
MPAAKRVKLDGGDKKYSIGLDIGTNSVGWAVITDEYKVPSKKFKVLGNTDRHSIKKNLIGALLFDSGETAEATRLKRTARRRYTRRKNRICYLQEIFSNEMAKVDDSFFHRLEESFLVEEDKKHERHPIFGNIVDEVAYHEKYPTIYHLRKKLVDSTDKADLRLIYLALAHMIKFRGHFLIEGDLNPDNSDVDKLFIQLVQTYNQLFEENPINASGVDAKAILSARLSKSRRLENLIAQLPGEKKNGLFGNLIALSLGLTPNFKSNFDLAEDAKLQLSKDTYDDDLDNLLAQIGDQYADLFLAAKNLSDAILLSDILRVNTEITKAPLSASMIKRYDEHHQDLTLLKALVRQQLPEKYKEIFFDQSKNGYAGYIDGGASQEEFYKFIKPILEKMDGTEELLVKLNREDLLRKQRTFDNGSIPHQIHLGELHAILRRQEDFYPFLKDNREKIEKILTFRIPYYVGPLARGNSRFAWMTRKSEETITPWNFEEVVDKGASAQSFIERMTNFDKNLPNEKVLPKHSLLYEYFTVYNELTKVKYVTEGMRKPAFLSGEQKKAIVDLLFKTNRKVTVKQLKEDYFKKIECFDSVEISGVEDRFNASLGTYHDLLKIIKDKDFLDNEENEDILEDIVLTLTLFEDREMIEERLKTYAHLFDDKVMKQLKRRRYTGWGRLSRKLINGIRDKQSGKTILDFLKSDGFANRNFMQLIHDDSLTFKEDIQKAQVSGQGDSLHEHIANLAGSPAIKKGILQTVKVVDELVKVMGRHKPENIVIEMARENQTTQKGQKNSRERMKRIEEGIKELGSQILKEHPVENTQLQNEKLYLYYLQNGRDMYVDQELDINRLSDYDVDHIVPQSFLKDDSIDNKVLTRSDKARGKSDNVPSEEVVKKMKNYWRQLLNAKLITQRKFDNLTKAERGGLSELDKAGFIKRQLVETRQITKHVAQILDSRMNTKYDENDKLIREVKVITLKSKLVSDFRKDFQFYKVREINNYHHAHDAYLNAVVGTALIKKYPKLESEFVYGDYKVYDVRKMIAKSEQEIGKATAKYFFYSNIMNFFKTEITLANGEIRKRPLIETNGETGEIVWDKGRDFATVRKVLSMPQVNIVKKTEVQTGGFSKESILPKRNSDKLIARKKDWDPKKYGGFDSPTVAYSVLVVAKVEKGKSKKLKSVKELLGITIMERSSFEKNPIDFLEAKGYKEVKKDLIIKLPKYSLFELENGRKRMLASAGELQKGNELALPSKYVNFLYLASHYEKLKGSPEDNEQKQLFVEQHKHYLDEIIEQISEFSKRVILADANLDKVLSAYNKHRDKPIREQAENIIHLFTLTNLGAPAAFKYFDTTIDRKRYTSTKEVLDATLIHQSITGLYETRIDLSQLGGDGGGSSEAAAKPAPGGTLNIEDEYRLHETSKEPDVSLGSTWLSDFPQAWAETGGMGLAVRQAPLIIPLKATSTPVSIKQYPMSQEARLGIKPHIQRLLDQGILVPCQSPWNTPLLPVKKPGTNDYRPVQDLREVNKRVEDIHPTVPNPYNLLSGLPPSHQWYTVLDLKDAFFCLRLHPTSQPLFAFEWRDPEMGISGQLTWTRLPQGFKNSPTLFNEALHRDLADFRIQHPDLILLQYVDDLLLAATSELDCQQGTRALLQTLGNLGYRASAKKAQICQKQVKYLGYLLKEGQRWLTEARKETVMGQPTPKTPRQLREFLGKAGFCRLFIPGFAEMAAPLYPLTKPGTLFNWGPDQQKAYQEIKQALLTAPALGLPDLTKPFELFVDEKQGYAKGVLTQKLGPWRRPVAYLSKKLDPVAAGWPPCLRMVAAIAVLTKDAGKLTMGQPLVILAPHAVEALVKQPPDRWLSNARMTHYQALLLDTDRVQFGPVVALNPATLLPLPEEGLQHNCLDILAEAHGTRPDLTDQPLPDADHTWYTDGSSLLQEGQRKAGAAVTTETEVIWAKALPAGTSAQRAELIALTQALKMAEGKKLNVYTDSRYAFATAHIHGEIYRRRGWLTSEGKEIKNKDEILALLKALFLPKRLSIIHCPGHQKGHSAEARGNRMADQAARKAAITETPDTSTLLIENSSPSGGSKRTADGSEFEAGKRTADGSEFEKRTADGSEFESPKKKAKVE

SEQ ID NO: 2642 - protein, 2111 aa, synthetic construct
MPAAKRVKLDGGDKKYSIGLDIGTNSVGWAVITDEYKVPSKKFKVLGNTDRHSIKKNLIGALLFDSGETAEATRLKRTARRRYTRRKNRICYLQEIFSNEMAKVDDSFFHRLEESFLVEEDKKHERHPIFGNIVDEVAYHEKYPTIYHLRKKLVDSTDKADLRLIYLALAHMIKFRGHFLIEGDLNPDNSDVDKLFIQLVQTYNQLFEENPINASGVDAKAILSARLSKSRRLENLIAQLPGEKKNGLFGNLIALSLGLTPNFKSNFDLAEDAKLQLSKDTYDDDLDNLLAQIGDQYADLFLAAKNLSDAILLSDILRVNTEITKAPLSASMIKRYDEHHQDLTLLKALVRQQLPEKYKEIFFDQSKNGYAGYIDGGASQEEFYKFIKPILEKMDGTEELLVKLNREDLLRKQRTFDNGSIPHQIHLGELHAILRRQEDFYPFLKDNREKIEKILTFRIPYYVGPLARGNSRFAWMTRKSEETITPWNFEEVVDKGASAQSFIERMTNFDKNLPNEKVLPKHSLLYEYFTVYNELTKVKYVTEGMRKPAFLSGEQKKAIVDLLFKTNRKVTVKQLKEDYFKKIECFDSVEISGVEDRFNASLGTYHDLLKIIKDKDFLDNEENEDILEDIVLTLTLFEDREMIEERLKTYAHLFDDKVMKQLKRRRYTGWGRLSRKLINGIRDKQSGKTILDFLKSDGFANRNFMQLIHDDSLTFKEDIQKAQVSGQGDSLHEHIANLAGSPAIKKGILQTVKVVDELVKVMGRHKPENIVIEMARENQTTQKGQKNSRERMKRIEEGIKELGSQILKEHPVENTQLQNEKLYLYYLQNGRDMYVDQELDINRLSDYDVDHIVPQSFLKDDSIDNKVLTRSDKARGKSDNVPSEEVVKKMKNYWRQLLNAKLITQRKFDNLTKAERGGLSELDKAGFIKRQLVETRQITKHVAQILDSRMNTKYDENDKLIREVKVITLKSKLVSDFRKDFQFYKVREINNYHHAHDAYLNAVVGTALIKKYPKLESEFVYGDYKVYDVRKMIAKSEQEIGKATAKYFFYSNIMNFFKTEITLANGEIRKRPLIETNGETGEIVWDKGRDFATVRKVLSMPQVNIVKKTEVQTGGFSKESILPKRNSDKLIARKKDWDPKKYGGFDSPTVAYSVLVVAKVEKGKSKKLKSVKELLGITIMERSSFEKNPIDFLEAKGYKEVKKDLIIKLPKYSLFELENGRKRMLASAGELQKGNELALPSKYVNFLYLASHYEKLKGSPEDNEQKQLFVEQHKHYLDEIIEQISEFSKRVILADANLDKVLSAYNKHRDKPIREQAENIIHLFTLTNLGAPAAFKYFDTTIDRKRYTSTKEVLDATLIHQSITGLYETRIDLSQLGGDGGGGGGGGGGTLNIEDEYRLHETSKEPDVSLGSTWLSDFPQAWAETGGMGLAVRQAPLIIPLKATSTPVSIKQYPMSQEARLGIKPHIQRLLDQGILVPCQSPWNTPLLPVKKPGTNDYRPVQDLREVNKRVEDIHPTVPNPYNLLSGLPPSHQWYTVLDLKDAFFCLRLHPTSQPLFAFEWRDPEMGISGQLTWTRLPQGFKNSPTLFNEALHRDLADFRIQHPDLILLQYVDDLLLAATSELDCQQGTRALLQTLGNLGYRASAKKAQICQKQVKYLGYLLKEGQRWLTEARKETVMGQPTPKTPRQLREFLGKAGFCRLFIPGFAEMAAPLYPLTKPGTLFNWGPDQQKAYQEIKQALLTAPALGLPDLTKPFELFVDEKQGYAKGVLTQKLGPWRRPVAYLSKKLDPVAAGWPPCLRMVAAIAVLTKDAGKLTMGQPLVILAPHAVEALVKQPPDRWLSNARMTHYQALLLDTDRVQFGPVVALNPATLLPLPEEGLQHNCLDILAEAHGTRPDLTDQPLPDADHTWYTDGSSLLQEGQRKAGAAVTTETEVIWAKALPAGTSAQRAELIALTQALKMAEGKKLNVYTDSRYAFATAHIHGEIYRRRGWLTSEGKEIKNKDEILALLKALFLPKRLSIIHCPGHQKGHSAEARGNRMADQAARKAAITETPDTSTLLIENSSPSGGSKRTADGSEFEAGKRTADGSEFEKRTADGSEFESPKKKAKVE

SEQ ID NO: 2643 - protein, 2111 aa, synthetic construct
MPAAKRVKLDGGDKKYSIGLDIGTNSVGWAVITDEYKVPSKKFKVLGNTDRHSIKKNLIGALLFDSGETAEATRLKRTARRRYTRRKNRICYLQEIFSNEMAKVDDSFFHRLEESFLVEEDKKHERHPIFGNIVDEVAYHEKYPTIYHLRKKLVDSTDKADLRLIYLALAHMIKFRGHFLIEGDLNPDNSDVDKLFIQLVQTYNQLFEENPINASGVDAKAILSARLSKSRRLENLIAQLPGEKKNGLFGNLIALSLGLTPNFKSNFDLAEDAKLQLSKDTYDDDLDNLLAQIGDQYADLFLAAKNLSDAILLSDILRVNTEITKAPLSASMIKRYDEHHQDLTLLKALVRQQLPEKYKEIFFDQSKNGYAGYIDGGASQEEFYKFIKPILEKMDGTEELLVKLNREDLLRKQRTFDNGSIPHQIHLGELHAILRRQEDFYPFLKDNREKIEKILTFRIPYYVGPLARGNSRFAWMTRKSEETITPWNFEEVVDKGASAQSFIERMTNFDKNLPNEKVLPKHSLLYEYFTVYNELTKVKYVTEGMRKPAFLSGEQKKAIVDLLFKTNRKVTVKQLKEDYFKKIECFDSVEISGVEDRFNASLGTYHDLLKIIKDKDFLDNEENEDILEDIVLTLTLFEDREMIEERLKTYAHLFDDKVMKQLKRRRYTGWGRLSRKLINGIRDKQSGKTILDFLKSDGFANRNFMQLIHDDSLTFKEDIQKAQVSGQGDSLHEHIANLAGSPAIKKGILQTVKVVDELVKVMGRHKPENIVIEMARENQTTQKGQKNSRERMKRIEEGIKELGSQILKEHPVENTQLQNEKLYLYYLQNGRDMYVDQELDINRLSDYDVDHIVPQSFLKDDSIDNKVLTRSDKARGKSDNVPSEEVVKKMKNYWRQLLNAKLITQRKFDNLTKAERGGLSELDKAGFIKRQLVETRQITKHVAQILDSRMNTKYDENDKLIREVKVITLKSKLVSDFRKDFQFYKVREINNYHHAHDAYLNAVVGTALIKKYPKLESEFVYGDYKVYDVRKMIAKSEQEIGKATAKYFFYSNIMNFFKTEITLANGEIRKRPLIETNGETGEIVWDKGRDFATVRKVLSMPQVNIVKKTEVQTGGFSKESILPKRNSDKLIARKKDWDPKKYGGFDSPTVAYSVLVVAKVEKGKSKKLKSVKELLGITIMERSSFEKNPIDFLEAKGYKEVKKDLIIKLPKYSLFELENGRKRMLASAGELQKGNELALPSKYVNFLYLASHYEKLKGSPEDNEQKQLFVEQHKHYLDEIIEQISEFSKRVILADANLDKVLSAYNKHRDKPIREQAENIIHLFTLTNLGAPAAFKYFDTTIDRKRYTSTKEVLDATLIHQSITGLYETRIDLSQLGGDGGPAPGGSGGTLNIEDEYRLHETSKEPDVSLGSTWLSDFPQAWAETGGMGLAVRQAPLIIPLKATSTPVSIKQYPMSQEARLGIKPHIQRLLDQGILVPCQSPWNTPLLPVKKPGTNDYRPVQDLREVNKRVEDIHPTVPNPYNLLSGLPPSHQWYTVLDLKDAFFCLRLHPTSQPLFAFEWRDPEMGISGQLTWTRLPQGFKNSPTLFNEALHRDLADFRIQHPDLILLQYVDDLLLAATSELDCQQGTRALLQTLGNLGYRASAKKAQICQKQVKYLGYLLKEGQRWLTEARKETVMGQPTPKTPRQLREFLGKAGFCRLFIPGFAEMAAPLYPLTKPGTLFNWGPDQQKAYQEIKQALLTAPALGLPDLTKPFELFVDEKQGYAKGVLTQKLGPWRRPVAYLSKKLDPVAAGWPPCLRMVAAIAVLTKDAGKLTMGQPLVILAPHAVEALVKQPPDRWLSNARMTHYQALLLDTDRVQFGPVVALNPATLLPLPEEGLQHNCLDILAEAHGTRPDLTDQPLPDADHTWYTDGSSLLQEGQRKAGAAVTTETEVIWAKALPAGTSAQRAELIALTQALKMAEGKKLNVYTDSRYAFATAHIHGEIYRRRGWLTSEGKEIKNKDEILALLKALFLPKRLSIIHCPGHQKGHSAEARGNRMADQAARKAAITETPDTSTLLIENSSPSGGSKRTADGSEFEAGKRTADGSEFEKRTADGSEFESPKKKAKVE

SEQ ID NO: 2644 - protein, 2135 aa, synthetic construct
MPAAKRVKLDGGDKKYSIGLDIGTNSVGWAVITDEYKVPSKKFKVLGNTDRHSIKKNLIGALLFDSGETAEATRLKRTARRRYTRRKNRICYLQEIFSNEMAKVDDSFFHRLEESFLVEEDKKHERHPIFGNIVDEVAYHEKYPTIYHLRKKLVDSTDKADLRLIYLALAHMIKFRGHFLIEGDLNPDNSDVDKLFIQLVQTYNQLFEENPINASGVDAKAILSARLSKSRRLENLIAQLPGEKKNGLFGNLIALSLGLTPNFKSNFDLAEDAKLQLSKDTYDDDLDNLLAQIGDQYADLFLAAKNLSDAILLSDILRVNTEITKAPLSASMIKRYDEHHQDLTLLKALVRQQLPEKYKEIFFDQSKNGYAGYIDGGASQEEFYKFIKPILEKMDGTEELLVKLNREDLLRKQRTFDNGSIPHQIHLGELHAILRRQEDFYPFLKDNREKIEKILTFRIPYYVGPLARGNSRFAWMTRKSEETITPWNFEEVVDKGASAQSFIERMTNFDKNLPNEKVLPKHSLLYEYFTVYNELTKVKYVTEGMRKPAFLSGEQKKAIVDLLFKTNRKVTVKQLKEDYFKKIECFDSVEISGVEDRFNASLGTYHDLLKIIKDKDFLDNEENEDILEDIVLTLTLFEDREMIEERLKTYAHLFDDKVMKQLKRRRYTGWGRLSRKLINGIRDKQSGKTILDFLKSDGFANRNFMQLIHDDSLTFKEDIQKAQVSGQGDSLHEHIANLAGSPAIKKGILQTVKVVDELVKVMGRHKPENIVIEMARENQTTQKGQKNSRERMKRIEEGIKELGSQILKEHPVENTQLQNEKLYLYYLQNGRDMYVDQELDINRLSDYDVDHIVPQSFLKDDSIDNKVLTRSDKARGKSDNVPSEEVVKKMKNYWRQLLNAKLITQRKFDNLTKAERGGLSELDKAGFIKRQLVETRQITKHVAQILDSRMNTKYDENDKLIREVKVITLKSKLVSDFRKDFQFYKVREINNYHHAHDAYLNAVVGTALIKKYPKLESEFVYGDYKVYDVRKMIAKSEQEIGKATAKYFFYSNIMNFFKTEITLANGEIRKRPLIETNGETGEIVWDKGRDFATVRKVLSMPQVNIVKKTEVQTGGFSKESILPKRNSDKLIARKKDWDPKKYGGFDSPTVAYSVLVVAKVEKGKSKKLKSVKELLGITIMERSSFEKNPIDFLEAKGYKEVKKDLIIKLPKYSLFELENGRKRMLASAGELQKGNELALPSKYVNFLYLASHYEKLKGSPEDNEQKQLFVEQHKHYLDEIIEQISEFSKRVILADANLDKVLSAYNKHRDKPIREQAENIIHLFTLTNLGAPAAFKYFDTTIDRKRYTSTKEVLDATLIHQSITGLYETRIDLSQLGGDGGGGGGSGGGGSGGGGSGGGGSGGGGSGGGGSGGTLNIEDEYRLHETSKEPDVSLGSTWLSDFPQAWAETGGMGLAVRQAPLIIPLKATSTPVSIKQYPMSQEARLGIKPHIQRLLDQGILVPCQSPWNTPLLPVKKPGTNDYRPVQDLREVNKRVEDIHPTVPNPYNLLSGLPPSHQWYTVLDLKDAFFCLRLHPTSQPLFAFEWRDPEMGISGQLTWTRLPQGFKNSPTLFNEALHRDLADFRIQHPDLILLQYVDDLLLAATSELDCQQGTRALLQTLGNLGYRASAKKAQICQKQVKYLGYLLKEGQRWLTEARKETVMGQPTPKTPRQLREFLGKAGFCRLFIPGFAEMAAPLYPLTKPGTLFNWGPDQQKAYQEIKQALLTAPALGLPDLTKPFELFVDEKQGYAKGVLTQKLGPWRRPVAYLSKKLDPVAAGWPPCLRMVAAIAVLTKDAGKLTMGQPLVILAPHAVEALVKQPPDRWLSNARMTHYQALLLDTDRVQFGPVVALNPATLLPLPEEGLQHNCLDILAEAHGTRPDLTDQPLPDADHTWYTDGSSLLQEGQRKAGAAVTTETEVIWAKALPAGTSAQRAELIALTQALKMAEGKKLNVYTDSRYAFATAHIHGEIYRRRGWLTSEGKEIKNKDEILALLKALFLPKRLSIIHCPGHQKGHSAEARGNRMADQAARKAAITETPDTSTLLIENSSPSGGSKRTADGSEFEAGKRTADGSEFEKRTADGSEFESPKKKAKVE

SEQ ID NO: 2645 - protein, 2116 aa, synthetic construct
MPAAKRVKLDGGDKKYSIGLDIGTNSVGWAVITDEYKVPSKKFKVLGNTDRHSIKKNLIGALLFDSGETAEATRLKRTARRRYTRRKNRICYLQEIFSNEMAKVDDSFFHRLEESFLVEEDKKHERHPIFGNIVDEVAYHEKYPTIYHLRKKLVDSTDKADLRLIYLALAHMIKFRGHFLIEGDLNPDNSDVDKLFIQLVQTYNQLFEENPINASGVDAKAILSARLSKSRRLENLIAQLPGEKKNGLFGNLIALSLGLTPNFKSNFDLAEDAKLQLSKDTYDDDLDNLLAQIGDQYADLFLAAKNLSDAILLSDILRVNTEITKAPLSASMIKRYDEHHQDLTLLKALVRQQLPEKYKEIFFDQSKNGYAGYIDGGASQEEFYKFIKPILEKMDGTEELLVKLNREDLLRKQRTFDNGSIPHQIHLGELHAILRRQEDFYPFLKDNREKIEKILTFRIPYYVGPLARGNSRFAWMTRKSEETITPWNFEEVVDKGASAQSFIERMTNFDKNLPNEKVLPKHSLLYEYFTVYNELTKVKYVTEGMRKPAFLSGEQKKAIVDLLFKTNRKVTVKQLKEDYFKKIECFDSVEISGVEDRFNASLGTYHDLLKIIKDKDFLDNEENEDILEDIVLTLTLFEDREMIEERLKTYAHLFDDKVMKQLKRRRYTGWGRLSRKLINGIRDKQSGKTILDFLKSDGFANRNFMQLIHDDSLTFKEDIQKAQVSGQGDSLHEHIANLAGSPAIKKGILQTVKVVDELVKVMGRHKPENIVIEMARENQTTQKGQKNSRERMKRIEEGIKELGSQILKEHPVENTQLQNEKLYLYYLQNGRDMYVDQELDINRLSDYDVDHIVPQSFLKDDSIDNKVLTRSDKARGKSDNVPSEEVVKKMKNYWRQLLNAKLITQRKFDNLTKAERGGLSELDKAGFIKRQLVETRQITKHVAQILDSRMNTKYDENDKLIREVKVITLKSKLVSDFRKDFQFYKVREINNYHHAHDAYLNAVVGTALIKKYPKLESEFVYGDYKVYDVRKMIAKSEQEIGKATAKYFFYSNIMNFFKTEITLANGEIRKRPLIETNGETGEIVWDKGRDFATVRKVLSMPQVNIVKKTEVQTGGFSKESILPKRNSDKLIARKKDWDPKKYGGFDSPTVAYSVLVVAKVEKGKSKKLKSVKELLGITIMERSSFEKNPIDFLEAKGYKEVKKDLIIKLPKYSLFELENGRKRMLASAGELQKGNELALPSKYVNFLYLASHYEKLKGSPEDNEQKQLFVEQHKHYLDEIIEQISEFSKRVILADANLDKVLSAYNKHRDKPIREQAENIIHLFTLTNLGAPAAFKYFDTTIDRKRYTSTKEVLDATLIHQSITGLYETRIDLSQLGGDGGPAPEAAAKGSSGGTLNIEDEYRLHETSKEPDVSLGSTWLSDFPQAWAETGGMGLAVRQAPLIIPLKATSTPVSIKQYPMSQEARLGIKPHIQRLLDQGILVPCQSPWNTPLLPVKKPGTNDYRPVQDLREVNKRVEDIHPTVPNPYNLLSGLPPSHQWYTVLDLKDAFFCLRLHPTSQPLFAFEWRDPEMGISGQLTWTRLPQGFKNSPTLFNEALHRDLADFRIQHPDLILLQYVDDLLLAATSELDCQQGTRALLQTLGNLGYRASAKKAQICQKQVKYLGYLLKEGQRWLTEARKETVMGQPTPKTPRQLREFLGKAGFCRLFIPGFAEMAAPLYPLTKPGTLFNWGPDQQKAYQEIKQALLTAPALGLPDLTKPFELFVDEKQGYAKGVLTQKLGPWRRPVAYLSKKLDPVAAGWPPCLRMVAAIAVLTKDAGKLTMGQPLVILAPHAVEALVKQPPDRWLSNARMTHYQALLLDTDRVQFGPVVALNPATLLPLPEEGLQHNCLDILAEAHGTRPDLTDQPLPDADHTWYTDGSSLLQEGQRKAGAAVTTETEVIWAKALPAGTSAQRAELIALTQALKMAEGKKLNVYTDSRYAFATAHIHGEIYRRRGWLTSEGKEIKNKDEILALLKALFLPKRLSIIHCPGHQKGHSAEARGNRMADQAARKAAITETPDTSTLLIENSSPSGGSKRTADGSEFEAGKRTADGSEFEKRTADGSEFESPKKKAKVE

SEQ ID NO: 2646 - protein, 2108 aa, synthetic construct
MPAAKRVKLDGGDKKYSIGLDIGTNSVGWAVITDEYKVPSKKFKVLGNTDRHSIKKNLIGALLFDSGETAEATRLKRTARRRYTRRKNRICYLQEIFSNEMAKVDDSFFHRLEESFLVEEDKKHERHPIFGNIVDEVAYHEKYPTIYHLRKKLVDSTDKADLRLIYLALAHMIKFRGHFLIEGDLNPDNSDVDKLFIQLVQTYNQLFEENPINASGVDAKAILSARLSKSRRLENLIAQLPGEKKNGLFGNLIALSLGLTPNFKSNFDLAEDAKLQLSKDTYDDDLDNLLAQIGDQYADLFLAAKNLSDAILLSDILRVNTEITKAPLSASMIKRYDEHHQDLTLLKALVRQQLPEKYKEIFFDQSKNGYAGYIDGGASQEEFYKFIKPILEKMDGTEELLVKLNREDLLRKQRTFDNGSIPHQIHLGELHAILRRQEDFYPFLKDNREKIEKILTFRIPYYVGPLARGNSRFAWMTRKSEETITPWNFEEVVDKGASAQSFIERMTNFDKNLPNEKVLPKHSLLYEYFTVYNELTKVKYVTEGMRKPAFLSGEQKKAIVDLLFKTNRKVTVKQLKEDYFKKIECFDSVEISGVEDRFNASLGTYHDLLKIIKDKDFLDNEENEDILEDIVLTLTLFEDREMIEERLKTYAHLFDDKVMKQLKRRRYTGWGRLSRKLINGIRDKQSGKTILDFLKSDGFANRNFMQLIHDDSLTFKEDIQKAQVSGQGDSLHEHIANLAGSPAIKKGILQTVKVVDELVKVMGRHKPENIVIEMARENQTTQKGQKNSRERMKRIEEGIKELGSQILKEHPVENTQLQNEKLYLYYLQNGRDMYVDQELDINRLSDYDVDHIVPQSFLKDDSIDNKVLTRSDKARGKSDNVPSEEVVKKMKNYWRQLLNAKLITQRKFDNLTKAERGGLSELDKAGFIKRQLVETRQITKHVAQILDSRMNTKYDENDKLIREVKVITLKSKLVSDFRKDFQFYKVREINNYHHAHDAYLNAVVGTALIKKYPKLESEFVYGDYKVYDVRKMIAKSEQEIGKATAKYFFYSNIMNFFKTEITLANGEIRKRPLIETNGETGEIVWDKGRDFATVRKVLSMPQVNIVKKTEVQTGGFSKESILPKRNSDKLIARKKDWDPKKYGGFDSPTVAYSVLVVAKVEKGKSKKLKSVKELLGITIMERSSFEKNPIDFLEAKGYKEVKKDLIIKLPKYSLFELENGRKRMLASAGELQKGNELALPSKYVNFLYLASHYEKLKGSPEDNEQKQLFVEQHKHYLDEIIEQISEFSKRVILADANLDKVLSAYNKHRDKPIREQAENIIHLFTLTNLGAPAAFKYFDTTIDRKRYTSTKEVLDATLIHQSITGLYETRIDLSQLGGDGGGGGGGTLNIEDEYRLHETSKEPDVSLGSTWLSDFPQAWAETGGMGLAVRQAPLIIPLKATSTPVSIKQYPMSQEARLGIKPHIQRLLDQGILVPCQSPWNTPLLPVKKPGTNDYRPVQDLREVNKRVEDIHPTVPNPYNLLSGLPPSHQWYTVLDLKDAFFCLRLHPTSQPLFAFEWRDPEMGISGQLTWTRLPQGFKNSPTLFNEALHRDLADFRIQHPDLILLQYVDDLLLAATSELDCQQGTRALLQTLGNLGYRASAKKAQICQKQVKYLGYLLKEGQRWLTEARKETVMGQPTPKTPRQLREFLGKAGFCRLFIPGFAEMAAPLYPLTKPGTLFNWGPDQQKAYQEIKQALLTAPALGLPDLTKPFELFVDEKQGYAKGVLTQKLGPWRRPVAYLSKKLDPVAAGWPPCLRMVAAIAVLTKDAGKLTMGQPLVILAPHAVEALVKQPPDRWLSNARMTHYQALLLDTDRVQFGPVVALNPATLLPLPEEGLQHNCLDILAEAHGTRPDLTDQPLPDADHTWYTDGSSLLQEGQRKAGAAVTTETEVIWAKALPAGTSAQRAELIALTQALKMAEGKKLNVYTDSRYAFATAHIHGEIYRRRGWLTSEGKEIKNKDEILALLKALFLPKRLSIIHCPGHQKGHSAEARGNRMADQAARKAAITETPDTSTLLIENSSPSGGSKRTADGSEFEAGKRTADGSEFEKRTADGSEFESPKKKAKVE

SEQ ID NO: 2647 - protein, 2115 aa, synthetic construct
MPAAKRVKLDGGDKKYSIGLDIGTNSVGWAVITDEYKVPSKKFKVLGNTDRHSIKKNLIGALLFDSGETAEATRLKRTARRRYTRRKNRICYLQEIFSNEMAKVDDSFFHRLEESFLVEEDKKHERHPIFGNIVDEVAYHEKYPTIYHLRKKLVDSTDKADLRLIYLALAHMIKFRGHFLIEGDLNPDNSDVDKLFIQLVQTYNQLFEENPINASGVDAKAILSARLSKSRRLENLIAQLPGEKKNGLFGNLIALSLGLTPNFKSNFDLAEDAKLQLSKDTYDDDLDNLLAQIGDQYADLFLAAKNLSDAILLSDILRVNTEITKAPLSASMIKRYDEHHQDLTLLKALVRQQLPEKYKEIFFDQSKNGYAGYIDGGASQEEFYKFIKPILEKMDGTEELLVKLNREDLLRKQRTFDNGSIPHQIHLGELHAILRRQEDFYPFLKDNREKIEKILTFRIPYYVGPLARGNSRFAWMTRKSEETITPWNFEEVVDKGASAQSFIERMTNFDKNLPNEKVLPKHSLLYEYFTVYNELTKVKYVTEGMRKPAFLSGEQKKAIVDLLFKTNRKVTVKQLKEDYFKKIECFDSVEISGVEDRFNASLGTYHDLLKIIKDKDFLDNEENEDILEDIVLTLTLFEDREMIEERLKTYAHLFDDKVMKQLKRRRYTGWGRLSRKLINGIRDKQSGKTILDFLKSDGFANRNFMQLIHDDSLTFKEDIQKAQVSGQGDSLHEHIANLAGSPAIKKGILQTVKVVDELVKVMGRHKPENIVIEMARENQTTQKGQKNSRERMKRIEEGIKELGSQILKEHPVENTQLQNEKLYLYYLQNGRDMYVDQELDINRLSDYDVDHIVPQSFLKDDSIDNKVLTRSDKARGKSDNVPSEEVVKKMKNYWRQLLNAKLITQRKFDNLTKAERGGLSELDKAGFIKRQLVETRQITKHVAQILDSRMNTKYDENDKLIREVKVITLKSKLVSDFRKDFQFYKVREINNYHHAHDAYLNAVVGTALIKKYPKLESEFVYGDYKVYDVRKMIAKSEQEIGKATAKYFFYSNIMNFFKTEITLANGEIRKRPLIETNGETGEIVWDKGRDFATVRKVLSMPQVNIVKKTEVQTGGFSKESILPKRNSDKLIARKKDWDPKKYGGFDSPTVAYSVLVVAKVEKGKSKKLKSVKELLGITIMERSSFEKNPIDFLEAKGYKEVKKDLIIKLPKYSLFELENGRKRMLASAGELQKGNELALPSKYVNFLYLASHYEKLKGSPEDNEQKQLFVEQHKHYLDEIIEQISEFSKRVILADANLDKVLSAYNKHRDKPIREQAENIIHLFTLTNLGAPAAFKYFDTTIDRKRYTSTKEVLDATLIHQSITGLYETRIDLSQLGGDGGEAAAKEAAAKGGTLNIEDEYRLHETSKEPDVSLGSTWLSDFPQAWAETGGMGLAVRQAPLIIPLKATSTPVSIKQYPMSQEARLGIKPHIQRLLDQGILVPCQSPWNTPLLPVKKPGTNDYRPVQDLREVNKRVEDIHPTVPNPYNLLSGLPPSHQWYTVLDLKDAFFCLRLHPTSQPLFAFEWRDPEMGISGQLTWTRLPQGFKNSPTLFNEALHRDLADFRIQHPDLILLQYVDDLLLAATSELDCQQGTRALLQTLGNLGYRASAKKAQICQKQVKYLGYLLKEGQRWLTEARKETVMGQPTPKTPRQLREFLGKAGFCRLFIPGFAEMAAPLYPLTKPGTLFNWGPDQQKAYQEIKQALLTAPALGLPDLTKPFELFVDEKQGYAKGVLTQKLGPWRRPVAYLSKKLDPVAAGWPPCLRMVAAIAVLTKDAGKLTMGQPLVILAPHAVEALVKQPPDRWLSNARMTHYQALLLDTDRVQFGPVVALNPATLLPLPEEGLQHNCLDILAEAHGTRPDLTDQPLPDADHTWYTDGSSLLQEGQRKAGAAVTTETEVIWAKALPAGTSAQRAELIALTQALKMAEGKKLNVYTDSRYAFATAHIHGEIYRRRGWLTSEGKEIKNKDEILALLKALFLPKRLSIIHCPGHQKGHSAEARGNRMADQAARKAAITETPDTSTLLIENSSPSGGSKRTADGSEFEAGKRTADGSEFEKRTADGSEFESPKKKAKVE

SEQ ID NO: 2648 - protein, 2116 aa, synthetic construct
MPAAKRVKLDGGDKKYSIGLDIGTNSVGWAVITDEYKVPSKKFKVLGNTDRHSIKKNLIGALLFDSGETAEATRLKRTARRRYTRRKNRICYLQEIFSNEMAKVDDSFFHRLEESFLVEEDKKHERHPIFGNIVDEVAYHEKYPTIYHLRKKLVDSTDKADLRLIYLALAHMIKFRGHFLIEGDLNPDNSDVDKLFIQLVQTYNQLFEENPINASGVDAKAILSARLSKSRRLENLIAQLPGEKKNGLFGNLIALSLGLTPNFKSNFDLAEDAKLQLSKDTYDDDLDNLLAQIGDQYADLFLAAKNLSDAILLSDILRVNTEITKAPLSASMIKRYDEHHQDLTLLKALVRQQLPEKYKEIFFDQSKNGYAGYIDGGASQEEFYKFIKPILEKMDGTEELLVKLNREDLLRKQRTFDNGSIPHQIHLGELHAILRRQEDFYPFLKDNREKIEKILTFRIPYYVGPLARGNSRFAWMTRKSEETITPWNFEEVVDKGASAQSFIERMTNFDKNLPNEKVLPKHSLLYEYFTVYNELTKVKYVTEGMRKPAFLSGEQKKAIVDLLFKTNRKVTVKQLKEDYFKKIECFDSVEISGVEDRFNASLGTYHDLLKIIKDKDFLDNEENEDILEDIVLTLTLFEDREMIEERLKTYAHLFDDKVMKQLKRRRYTGWGRLSRKLINGIRDKQSGKTILDFLKSDGFANRNFMQLIHDDSLTFKEDIQKAQVSGQGDSLHEHIANLAGSPAIKKGILQTVKVVDELVKVMGRHKPENIVIEMARENQTTQKGQKNSRERMKRIEEGIKELGSQILKEHPVENTQLQNEKLYLYYLQNGRDMYVDQELDINRLSDYDVDHIVPQSFLKDDSIDNKVLTRSDKARGKSDNVPSEEVVKKMKNYWRQLLNAKLITQRKFDNLTKAERGGLSELDKAGFIKRQLVETRQITKHVAQILDSRMNTKYDENDKLIREVKVITLKSKLVSDFRKDFQFYKVREINNYHHAHDAYLNAVVGTALIKKYPKLESEFVYGDYKVYDVRKMIAKSEQEIGKATAKYFFYSNIMNFFKTEITLANGEIRKRPLIETNGETGEIVWDKGRDFATVRKVLSMPQVNIVKKTEVQTGGFSKESILPKRNSDKLIARKKDWDPKKYGGFDSPTVAYSVLVVAKVEKGKSKKLKSVKELLGITIMERSSFEKNPIDFLEAKGYKEVKKDLIIKLPKYSLFELENGRKRMLASAGELQKGNELALPSKYVNFLYLASHYEKLKGSPEDNEQKQLFVEQHKHYLDEIIEQISEFSKRVILADANLDKVLSAYNKHRDKPIREQAENIIHLFTLTNLGAPAAFKYFDTTIDRKRYTSTKEVLDATLIHQSITGLYETRIDLSQLGGDGGGSSPAPEAAAKGGTLNIEDEYRLHETSKEPDVSLGSTWLSDFPQAWAETGGMGLAVRQAPLIIPLKATSTPVSIKQYPMSQEARLGIKPHIQRLLDQGILVPCQSPWNTPLLPVKKPGTNDYRPVQDLREVNKRVEDIHPTVPNPYNLLSGLPPSHQWYTVLDLKDAFFCLRLHPTSQPLFAFEWRDPEMGISGQLTWTRLPQGFKNSPTLFNEALHRDLADFRIQHPDLILLQYVDDLLLAATSELDCQQGTRALLQTLGNLGYRASAKKAQICQKQVKYLGYLLKEGQRWLTEARKETVMGQPTPKTPRQLREFLGKAGFCRLFIPGFAEMAAPLYPLTKPGTLFNWGPDQQKAYQEIKQALLTAPALGLPDLTKPFELFVDEKQGYAKGVLTQKLGPWRRPVAYLSKKLDPVAAGWPPCLRMVAAIAVLTKDAGKLTMGQPLVILAPHAVEALVKQPPDRWLSNARMTHYQALLLDTDRVQFGPVVALNPATLLPLPEEGLQHNCLDILAEAHGTRPDLTDQPLPDADHTWYTDGSSLLQEGQRKAGAAVTTETEVIWAKALPAGTSAQRAELIALTQALKMAEGKKLNVYTDSRYAFATAHIHGEIYRRRGWLTSEGKEIKNKDEILALLKALFLPKRLSIIHCPGHQKGHSAEARGNRMADQAARKAAITETPDTSTLLIENSSPSGGSKRTADGSEFEAGKRTADGSEFEKRTADGSEFESPKKKAKVE

SEQ ID NO: 2649 - protein, 2114 aa, synthetic construct
MPAAKRVKLDGGDKKYSIGLDIGTNSVGWAVITDEYKVPSKKFKVLGNTDRHSIKKNLIGALLFDSGETAEATRLKRTARRRYTRRKNRICYLQEIFSNEMAKVDDSFFHRLEESFLVEEDKKHERHPIFGNIVDEVAYHEKYPTIYHLRKKLVDSTDKADLRLIYLALAHMIKFRGHFLIEGDLNPDNSDVDKLFIQLVQTYNQLFEENPINASGVDAKAILSARLSKSRRLENLIAQLPGEKKNGLFGNLIALSLGLTPNFKSNFDLAEDAKLQLSKDTYDDDLDNLLAQIGDQYADLFLAAKNLSDAILLSDILRVNTEITKAPLSASMIKRYDEHHQDLTLLKALVRQQLPEKYKEIFFDQSKNGYAGYIDGGASQEEFYKFIKPILEKMDGTEELLVKLNREDLLRKQRTFDNGSIPHQIHLGELHAILRRQEDFYPFLKDNREKIEKILTFRIPYYVGPLARGNSRFAWMTRKSEETITPWNFEEVVDKGASAQSFIERMTNFDKNLPNEKVLPKHSLLYEYFTVYNELTKVKYVTEGMRKPAFLSGEQKKAIVDLLFKTNRKVTVKQLKEDYFKKIECFDSVEISGVEDRFNASLGTYHDLLKIIKDKDFLDNEENEDILEDIVLTLTLFEDREMIEERLKTYAHLFDDKVMKQLKRRRYTGWGRLSRKLINGIRDKQSGKTILDFLKSDGFANRNFMQLIHDDSLTFKEDIQKAQVSGQGDSLHEHIANLAGSPAIKKGILQTVKVVDELVKVMGRHKPENIVIEMARENQTTQKGQKNSRERMKRIEEGIKELGSQILKEHPVENTQLQNEKLYLYYLQNGRDMYVDQELDINRLSDYDVDHIVPQSFLKDDSIDNKVLTRSDKARGKSDNVPSEEVVKKMKNYWRQLLNAKLITQRKFDNLTKAERGGLSELDKAGFIKRQLVETRQITKHVAQILDSRMNTKYDENDKLIREVKVITLKSKLVSDFRKDFQFYKVREINNYHHAHDAYLNAVVGTALIKKYPKLESEFVYGDYKVYDVRKMIAKSEQEIGKATAKYFFYSNIMNFFKTEITLANGEIRKRPLIETNGETGEIVWDKGRDFATVRKVLSMPQVNIVKKTEVQTGGFSKESILPKRNSDKLIARKKDWDPKKYGGFDSPTVAYSVLVVAKVEKGKSKKLKSVKELLGITIMERSSFEKNPIDFLEAKGYKEVKKDLIIKLPKYSLFELENGRKRMLASAGELQKGNELALPSKYVNFLYLASHYEKLKGSPEDNEQKQLFVEQHKHYLDEIIEQISEFSKRVILADANLDKVLSAYNKHRDKPIREQAENIIHLFTLTNLGAPAAFKYFDTTIDRKRYTSTKEVLDATLIHQSITGLYETRIDLSQLGGDGGPAPGGSGGGGGTLNIEDEYRLHETSKEPDVSLGSTWLSDFPQAWAETGGMGLAVRQAPLIIPLKATSTPVSIKQYPMSQEARLGIKPHIQRLLDQGILVPCQSPWNTPLLPVKKPGTNDYRPVQDLREVNKRVEDIHPTVPNPYNLLSGLPPSHQWYTVLDLKDAFFCLRLHPTSQPLFAFEWRDPEMGISGQLTWTRLPQGFKNSPTLFNEALHRDLADFRIQHPDLILLQYVDDLLLAATSELDCQQGTRALLQTLGNLGYRASAKKAQICQKQVKYLGYLLKEGQRWLTEARKETVMGQPTPKTPRQLREFLGKAGFCRLFIPGFAEMAAPLYPLTKPGTLFNWGPDQQKAYQEIKQALLTAPALGLPDLTKPFELFVDEKQGYAKGVLTQKLGPWRRPVAYLSKKLDPVAAGWPPCLRMVAAIAVLTKDAGKLTMGQPLVILAPHAVEALVKQPPDRWLSNARMTHYQALLLDTDRVQFGPVVALNPATLLPLPEEGLQHNCLDILAEAHGTRPDLTDQPLPDADHTWYTDGSSLLQEGQRKAGAAVTTETEVIWAKALPAGTSAQRAELIALTQALKMAEGKKLNVYTDSRYAFATAHIHGEIYRRRGWLTSEGKEIKNKDEILALLKALFLPKRLSIIHCPGHQKGHSAEARGNRMADQAARKAAITETPDTSTLLIENSSPSGGSKRTADGSEFEAGKRTADGSEFEKRTADGSEFESPKKKAKVE

SEQ ID NO: 2650 - protein, 2114 aa, synthetic construct
MPAAKRVKLDGGDKKYSIGLDIGTNSVGWAVITDEYKVPSKKFKVLGNTDRHSIKKNLIGALLFDSGETAEATRLKRTARRRYTRRKNRICYLQEIFSNEMAKVDDSFFHRLEESFLVEEDKKHERHPIFGNIVDEVAYHEKYPTIYHLRKKLVDSTDKADLRLIYLALAHMIKFRGHFLIEGDLNPDNSDVDKLFIQLVQTYNQLFEENPINASGVDAKAILSARLSKSRRLENLIAQLPGEKKNGLFGNLIALSLGLTPNFKSNFDLAEDAKLQLSKDTYDDDLDNLLAQIGDQYADLFLAAKNLSDAILLSDILRVNTEITKAPLSASMIKRYDEHHQDLTLLKALVRQQLPEKYKEIFFDQSKNGYAGYIDGGASQEEFYKFIKPILEKMDGTEELLVKLNREDLLRKQRTFDNGSIPHQIHLGELHAILRRQEDFYPFLKDNREKIEKILTFRIPYYVGPLARGNSRFAWMTRKSEETITPWNFEEVVDKGASAQSFIERMTNFDKNLPNEKVLPKHSLLYEYFTVYNELTKVKYVTEGMRKPAFLSGEQKKAIVDLLFKTNRKVTVKQLKEDYFKKIECFDSVEISGVEDRFNASLGTYHDLLKIIKDKDFLDNEENEDILEDIVLTLTLFEDREMIEERLKTYAHLFDDKVMKQLKRRRYTGWGRLSRKLINGIRDKQSGKTILDFLKSDGFANRNFMQLIHDDSLTFKEDIQKAQVSGQGDSLHEHIANLAGSPAIKKGILQTVKVVDELVKVMGRHKPENIVIEMARENQTTQKGQKNSRERMKRIEEGIKELGSQILKEHPVENTQLQNEKLYLYYLQNGRDMYVDQELDINRLSDYDVDHIVPQSFLKDDSIDNKVLTRSDKARGKSDNVPSEEVVKKMKNYWRQLLNAKLITQRKFDNLTKAERGGLSELDKAGFIKRQLVETRQITKHVAQILDSRMNTKYDENDKLIREVKVITLKSKLVSDFRKDFQFYKVREINNYHHAHDAYLNAVVGTALIKKYPKLESEFVYGDYKVYDVRKMIAKSEQEIGKATAKYFFYSNIMNFFKTEITLANGEIRKRPLIETNGETGEIVWDKGRDFATVRKVLSMPQVNIVKKTEVQTGGFSKESILPKRNSDKLIARKKDWDPKKYGGFDSPTVAYSVLVVAKVEKGKSKKLKSVKELLGITIMERSSFEKNPIDFLEAKGYKEVKKDLIIKLPKYSLFELENGRKRMLASAGELQKGNELALPSKYVNFLYLASHYEKLKGSPEDNEQKQLFVEQHKHYLDEIIEQISEFSKRVILADANLDKVLSAYNKHRDKPIREQAENIIHLFTLTNLGAPAAFKYFDTTIDRKRYTSTKEVLDATLIHQSITGLYETRIDLSQLGGDGGPAPGGGGGSGGTLNIEDEYRLHETSKEPDVSLGSTWLSDFPQAWAETGGMGLAVRQAPLIIPLKATSTPVSIKQYPMSQEARLGIKPHIQRLLDQGILVPCQSPWNTPLLPVKKPGTNDYRPVQDLREVNKRVEDIHPTVPNPYNLLSGLPPSHQWYTVLDLKDAFFCLRLHPTSQPLFAFEWRDPEMGISGQLTWTRLPQGFKNSPTLFNEALHRDLADFRIQHPDLILLQYVDDLLLAATSELDCQQGTRALLQTLGNLGYRASAKKAQICQKQVKYLGYLLKEGQRWLTEARKETVMGQPTPKTPRQLREFLGKAGFCRLFIPGFAEMAAPLYPLTKPGTLFNWGPDQQKAYQEIKQALLTAPALGLPDLTKPFELFVDEKQGYAKGVLTQKLGPWRRPVAYLSKKLDPVAAGWPPCLRMVAAIAVLTKDAGKLTMGQPLVILAPHAVEALVKQPPDRWLSNARMTHYQALLLDTDRVQFGPVVALNPATLLPLPEEGLQHNCLDILAEAHGTRPDLTDQPLPDADHTWYTDGSSLLQEGQRKAGAAVTTETEVIWAKALPAGTSAQRAELIALTQALKMAEGKKLNVYTDSRYAFATAHIHGEIYRRRGWLTSEGKEIKNKDEILALLKALFLPKRLSIIHCPGHQKGHSAEARGNRMADQAARKAAITETPDTSTLLIENSSPSGGSKRTADGSEFEAGKRTADGSEFEKRTADGSEFESPKKKAKVE

SEQ ID NO: 2651 - protein, 2116 aa, synthetic construct
MPAAKRVKLDGGDKKYSIGLDIGTNSVGWAVITDEYKVPSKKFKVLGNTDRHSIKKNLIGALLFDSGETAEATRLKRTARRRYTRRKNRICYLQEIFSNEMAKVDDSFFHRLEESFLVEEDKKHERHPIFGNIVDEVAYHEKYPTIYHLRKKLVDSTDKADLRLIYLALAHMIKFRGHFLIEGDLNPDNSDVDKLFIQLVQTYNQLFEENPINASGVDAKAILSARLSKSRRLENLIAQLPGEKKNGLFGNLIALSLGLTPNFKSNFDLAEDAKLQLSKDTYDDDLDNLLAQIGDQYADLFLAAKNLSDAILLSDILRVNTEITKAPLSASMIKRYDEHHQDLTLLKALVRQQLPEKYKEIFFDQSKNGYAGYIDGGASQEEFYKFIKPILEKMDGTEELLVKLNREDLLRKQRTFDNGSIPHQIHLGELHAILRRQEDFYPFLKDNREKIEKILTFRIPYYVGPLARGNSRFAWMTRKSEETITPWNFEEVVDKGASAQSFIERMTNFDKNLPNEKVLPKHSLLYEYFTVYNELTKVKYVTEGMRKPAFLSGEQKKAIVDLLFKTNRKVTVKQLKEDYFKKIECFDSVEISGVEDRFNASLGTYHDLLKIIKDKDFLDNEENEDILEDIVLTLTLFEDREMIEERLKTYAHLFDDKVMKQLKRRRYTGWGRLSRKLINGIRDKQSGKTILDFLKSDGFANRNFMQLIHDDSLTFKEDIQKAQVSGQGDSLHEHIANLAGSPAIKKGILQTVKVVDELVKVMGRHKPENIVIEMARENQTTQKGQKNSRERMKRIEEGIKELGSQILKEHPVENTQLQNEKLYLYYLQNGRDMYVDQELDINRLSDYDVDHIVPQSFLKDDSIDNKVLTRSDKARGKSDNVPSEEVVKKMKNYWRQLLNAKLITQRKFDNLTKAERGGLSELDKAGFIKRQLVETRQITKHVAQILDSRMNTKYDENDKLIREVKVITLKSKLVSDFRKDFQFYKVREINNYHHAHDAYLNAVVGTALIKKYPKLESEFVYGDYKVYDVRKMIAKSEQEIGKATAKYFFYSNIMNFFKTEITLANGEIRKRPLIETNGETGEIVWDKGRDFATVRKVLSMPQVNIVKKTEVQTGGFSKESILPKRNSDKLIARKKDWDPKKYGGFDSPTVAYSVLVVAKVEKGKSKKLKSVKELLGITIMERSSFEKNPIDFLEAKGYKEVKKDLIIKLPKYSLFELENGRKRMLASAGELQKGNELALPSKYVNFLYLASHYEKLKGSPEDNEQKQLFVEQHKHYLDEIIEQISEFSKRVILADANLDKVLSAYNKHRDKPIREQAENIIHLFTLTNLGAPAAFKYFDTTIDRKRYTSTKEVLDATLIHQSITGLYETRIDLSQLGGDGGPAPGSSEAAAKGGTLNIEDEYRLHETSKEPDVSLGSTWLSDFPQAWAETGGMGLAVRQAPLIIPLKATSTPVSIKQYPMSQEARLGIKPHIQRLLDQGILVPCQSPWNTPLLPVKKPGTNDYRPVQDLREVNKRVEDIHPTVPNPYNLLSGLPPSHQWYTVLDLKDAFFCLRLHPTSQPLFAFEWRDPEMGISGQLTWTRLPQGFKNSPTLFNEALHRDLADFRIQHPDLILLQYVDDLLLAATSELDCQQGTRALLQTLGNLGYRASAKKAQICQKQVKYLGYLLKEGQRWLTEARKETVMGQPTPKTPRQLREFLGKAGFCRLFIPGFAEMAAPLYPLTKPGTLFNWGPDQQKAYQEIKQALLTAPALGLPDLTKPFELFVDEKQGYAKGVLTQKLGPWRRPVAYLSKKLDPVAAGWPPCLRMVAAIAVLTKDAGKLTMGQPLVILAPHAVEALVKQPPDRWLSNARMTHYQALLLDTDRVQFGPVVALNPATLLPLPEEGLQHNCLDILAEAHGTRPDLTDQPLPDADHTWYTDGSSLLQEGQRKAGAAVTTETEVIWAKALPAGTSAQRAELIALTQALKMAEGKKLNVYTDSRYAFATAHIHGEIYRRRGWLTSEGKEIKNKDEILALLKALFLPKRLSIIHCPGHQKGHSAEARGNRMADQAARKAAITETPDTSTLLIENSSPSGGSKRTADGSEFEAGKRTADGSEFEKRTADGSEFESPKKKAKVE

SEQ ID NO: 2652 - protein, 2116 aa, synthetic construct
MPAAKRVKLDGGDKKYSIGLDIGTNSVGWAVITDEYKVPSKKFKVLGNTDRHSIKKNLIGALLFDSGETAEATRLKRTARRRYTRRKNRICYLQEIFSNEMAKVDDSFFHRLEESFLVEEDKKHERHPIFGNIVDEVAYHEKYPTIYHLRKKLVDSTDKADLRLIYLALAHMIKFRGHFLIEGDLNPDNSDVDKLFIQLVQTYNQLFEENPINASGVDAKAILSARLSKSRRLENLIAQLPGEKKNGLFGNLIALSLGLTPNFKSNFDLAEDAKLQLSKDTYDDDLDNLLAQIGDQYADLFLAAKNLSDAILLSDILRVNTEITKAPLSASMIKRYDEHHQDLTLLKALVRQQLPEKYKEIFFDQSKNGYAGYIDGGASQEEFYKFIKPILEKMDGTEELLVKLNREDLLRKQRTFDNGSIPHQIHLGELHAILRRQEDFYPFLKDNREKIEKILTFRIPYYVGPLARGNSRFAWMTRKSEETITPWNFEEVVDKGASAQSFIERMTNFDKNLPNEKVLPKHSLLYEYFTVYNELTKVKYVTEGMRKPAFLSGEQKKAIVDLLFKTNRKVTVKQLKEDYFKKIECFDSVEISGVEDRFNASLGTYHDLLKIIKDKDFLDNEENEDILEDIVLTLTLFEDREMIEERLKTYAHLFDDKVMKQLKRRRYTGWGRLSRKLINGIRDKQSGKTILDFLKSDGFANRNFMQLIHDDSLTFKEDIQKAQVSGQGDSLHEHIANLAGSPAIKKGILQTVKVVDELVKVMGRHKPENIVIEMARENQTTQKGQKNSRERMKRIEEGIKELGSQILKEHPVENTQLQNEKLYLYYLQNGRDMYVDQELDINRLSDYDVDHIVPQSFLKDDSIDNKVLTRSDKARGKSDNVPSEEVVKKMKNYWRQLLNAKLITQRKFDNLTKAERGGLSELDKAGFIKRQLVETRQITKHVAQILDSRMNTKYDENDKLIREVKVITLKSKLVSDFRKDFQFYKVREINNYHHAHDAYLNAVVGTALIKKYPKLESEFVYGDYKVYDVRKMIAKSEQEIGKATAKYFFYSNIMNFFKTEITLANGEIRKRPLIETNGETGEIVWDKGRDFATVRKVLSMPQVNIVKKTEVQTGGFSKESILPKRNSDKLIARKKDWDPKKYGGFDSPTVAYSVLVVAKVEKGKSKKLKSVKELLGITIMERSSFEKNPIDFLEAKGYKEVKKDLIIKLPKYSLFELENGRKRMLASAGELQKGNELALPSKYVNFLYLASHYEKLKGSPEDNEQKQLFVEQHKHYLDEIIEQISEFSKRVILADANLDKVLSAYNKHRDKPIREQAENIIHLFTLTNLGAPAAFKYFDTTIDRKRYTSTKEVLDATLIHQSITGLYETRIDLSQLGGDGGGSSGGGEAAAKGGTLNIEDEYRLHETSKEPDVSLGSTWLSDFPQAWAETGGMGLAVRQAPLIIPLKATSTPVSIKQYPMSQEARLGIKPHIQRLLDQGILVPCQSPWNTPLLPVKKPGTNDYRPVQDLREVNKRVEDIHPTVPNPYNLLSGLPPSHQWYTVLDLKDAFFCLRLHPTSQPLFAFEWRDPEMGISGQLTWTRLPQGFKNSPTLFNEALHRDLADFRIQHPDLILLQYVDDLLLAATSELDCQQGTRALLQTLGNLGYRASAKKAQICQKQVKYLGYLLKEGQRWLTEARKETVMGQPTPKTPRQLREFLGKAGFCRLFIPGFAEMAAPLYPLTKPGTLFNWGPDQQKAYQEIKQALLTAPALGLPDLTKPFELFVDEKQGYAKGVLTQKLGPWRRPVAYLSKKLDPVAAGWPPCLRMVAAIAVLTKDAGKLTMGQPLVILAPHAVEALVKQPPDRWLSNARMTHYQALLLDTDRVQFGPVVALNPATLLPLPEEGLQHNCLDILAEAHGTRPDLTDQPLPDADHTWYTDGSSLLQEGQRKAGAAVTTETEVIWAKALPAGTSAQRAELIALTQALKMAEGKKLNVYTDSRYAFATAHIHGEIYRRRGWLTSEGKEIKNKDEILALLKALFLPKRLSIIHCPGHQKGHSAEARGNRMADQAARKAAITETPDTSTLLIENSSPSGGSKRTADGSEFEAGKRTADGSEFEKRTADGSEFESPKKKAKVE

SEQ ID NO: 2653 - protein, 2111 aa, synthetic construct
MPAAKRVKLDGGDKKYSIGLDIGTNSVGWAVITDEYKVPSKKFKVLGNTDRHSIKKNLIGALLFDSGETAEATRLKRTARRRYTRRKNRICYLQEIFSNEMAKVDDSFFHRLEESFLVEEDKKHERHPIFGNIVDEVAYHEKYPTIYHLRKKLVDSTDKADLRLIYLALAHMIKFRGHFLIEGDLNPDNSDVDKLFIQLVQTYNQLFEENPINASGVDAKAILSARLSKSRRLENLIAQLPGEKKNGLFGNLIALSLGLTPNFKSNFDLAEDAKLQLSKDTYDDDLDNLLAQIGDQYADLFLAAKNLSDAILLSDILRVNTEITKAPLSASMIKRYDEHHQDLTLLKALVRQQLPEKYKEIFFDQSKNGYAGYIDGGASQEEFYKFIKPILEKMDGTEELLVKLNREDLLRKQRTFDNGSIPHQIHLGELHAILRRQEDFYPFLKDNREKIEKILTFRIPYYVGPLARGNSRFAWMTRKSEETITPWNFEEVVDKGASAQSFIERMTNFDKNLPNEKVLPKHSLLYEYFTVYNELTKVKYVTEGMRKPAFLSGEQKKAIVDLLFKTNRKVTVKQLKEDYFKKIECFDSVEISGVEDRFNASLGTYHDLLKIIKDKDFLDNEENEDILEDIVLTLTLFEDREMIEERLKTYAHLFDDKVMKQLKRRRYTGWGRLSRKLINGIRDKQSGKTILDFLKSDGFANRNFMQLIHDDSLTFKEDIQKAQVSGQGDSLHEHIANLAGSPAIKKGILQTVKVVDELVKVMGRHKPENIVIEMARENQTTQKGQKNSRERMKRIEEGIKELGSQILKEHPVENTQLQNEKLYLYYLQNGRDMYVDQELDINRLSDYDVDHIVPQSFLKDDSIDNKVLTRSDKARGKSDNVPSEEVVKKMKNYWRQLLNAKLITQRKFDNLTKAERGGLSELDKAGFIKRQLVETRQITKHVAQILDSRMNTKYDENDKLIREVKVITLKSKLVSDFRKDFQFYKVREINNYHHAHDAYLNAVVGTALIKKYPKLESEFVYGDYKVYDVRKMIAKSEQEIGKATAKYFFYSNIMNFFKTEITLANGEIRKRPLIETNGETGEIVWDKGRDFATVRKVLSMPQVNIVKKTEVQTGGFSKESILPKRNSDKLIARKKDWDPKKYGGFDSPTVAYSVLVVAKVEKGKSKKLKSVKELLGITIMERSSFEKNPIDFLEAKGYKEVKKDLIIKLPKYSLFELENGRKRMLASAGELQKGNELALPSKYVNFLYLASHYEKLKGSPEDNEQKQLFVEQHKHYLDEIIEQISEFSKRVILADANLDKVLSAYNKHRDKPIREQAENIIHLFTLTNLGAPAAFKYFDTTIDRKRYTSTKEVLDATLIHQSITGLYETRIDLSQLGGDGGGGSGGGGGTLNIEDEYRLHETSKEPDVSLGSTWLSDFPQAWAETGGMGLAVRQAPLIIPLKATSTPVSIKQYPMSQEARLGIKPHIQRLLDQGILVPCQSPWNTPLLPVKKPGTNDYRPVQDLREVNKRVEDIHPTVPNPYNLLSGLPPSHQWYTVLDLKDAFFCLRLHPTSQPLFAFEWRDPEMGISGQLTWTRLPQGFKNSPTLFNEALHRDLADFRIQHPDLILLQYVDDLLLAATSELDCQQGTRALLQTLGNLGYRASAKKAQICQKQVKYLGYLLKEGQRWLTEARKETVMGQPTPKTPRQLREFLGKAGFCRLFIPGFAEMAAPLYPLTKPGTLFNWGPDQQKAYQEIKQALLTAPALGLPDLTKPFELFVDEKQGYAKGVLTQKLGPWRRPVAYLSKKLDPVAAGWPPCLRMVAAIAVLTKDAGKLTMGQPLVILAPHAVEALVKQPPDRWLSNARMTHYQALLLDTDRVQFGPVVALNPATLLPLPEEGLQHNCLDILAEAHGTRPDLTDQPLPDADHTWYTDGSSLLQEGQRKAGAAVTTETEVIWAKALPAGTSAQRAELIALTQALKMAEGKKLNVYTDSRYAFATAHIHGEIYRRRGWLTSEGKEIKNKDEILALLKALFLPKRLSIIHCPGHQKGHSAEARGNRMADQAARKAAITETPDTSTLLIENSSPSGGSKRTADGSEFEAGKRTADGSEFEKRTADGSEFESPKKKAKVE

SEQ ID NO: 2654 - protein, 2116 aa, synthetic construct
MPAAKRVKLDGGDKKYSIGLDIGTNSVGWAVITDEYKVPSKKFKVLGNTDRHSIKKNLIGALLFDSGETAEATRLKRTARRRYTRRKNRICYLQEIFSNEMAKVDDSFFHRLEESFLVEEDKKHERHPIFGNIVDEVAYHEKYPTIYHLRKKLVDSTDKADLRLIYLALAHMIKFRGHFLIEGDLNPDNSDVDKLFIQLVQTYNQLFEENPINASGVDAKAILSARLSKSRRLENLIAQLPGEKKNGLFGNLIALSLGLTPNFKSNFDLAEDAKLQLSKDTYDDDLDNLLAQIGDQYADLFLAAKNLSDAILLSDILRVNTEITKAPLSASMIKRYDEHHQDLTLLKALVRQQLPEKYKEIFFDQSKNGYAGYIDGGASQEEFYKFIKPILEKMDGTEELLVKLNREDLLRKQRTFDNGSIPHQIHLGELHAILRRQEDFYPFLKDNREKIEKILTFRIPYYVGPLARGNSRFAWMTRKSEETITPWNFEEVVDKGASAQSFIERMTNFDKNLPNEKVLPKHSLLYEYFTVYNELTKVKYVTEGMRKPAFLSGEQKKAIVDLLFKTNRKVTVKQLKEDYFKKIECFDSVEISGVEDRFNASLGTYHDLLKIIKDKDFLDNEENEDILEDIVLTLTLFEDREMIEERLKTYAHLFDDKVMKQLKRRRYTGWGRLSRKLINGIRDKQSGKTILDFLKSDGFANRNFMQLIHDDSLTFKEDIQKAQVSGQGDSLHEHIANLAGSPAIKKGILQTVKVVDELVKVMGRHKPENIVIEMARENQTTQKGQKNSRERMKRIEEGIKELGSQILKEHPVENTQLQNEKLYLYYLQNGRDMYVDQELDINRLSDYDVDHIVPQSFLKDDSIDNKVLTRSDKARGKSDNVPSEEVVKKMKNYWRQLLNAKLITQRKFDNLTKAERGGLSELDKAGFIKRQLVETRQITKHVAQILDSRMNTKYDENDKLIREVKVITLKSKLVSDFRKDFQFYKVREINNYHHAHDAYLNAVVGTALIKKYPKLESEFVYGDYKVYDVRKMIAKSEQEIGKATAKYFFYSNIMNFFKTEITLANGEIRKRPLIETNGETGEIVWDKGRDFATVRKVLSMPQVNIVKKTEVQTGGFSKESILPKRNSDKLIARKKDWDPKKYGGFDSPTVAYSVLVVAKVEKGKSKKLKSVKELLGITIMERSSFEKNPIDFLEAKGYKEVKKDLIIKLPKYSLFELENGRKRMLASAGELQKGNELALPSKYVNFLYLASHYEKLKGSPEDNEQKQLFVEQHKHYLDEIIEQISEFSKRVILADANLDKVLSAYNKHRDKPIREQAENIIHLFTLTNLGAPAAFKYFDTTIDRKRYTSTKEVLDATLIHQSITGLYETRIDLSQLGGDGGEAAAKGGSPAPGGTLNIEDEYRLHETSKEPDVSLGSTWLSDFPQAWAETGGMGLAVRQAPLIIPLKATSTPVSIKQYPMSQEARLGIKPHIQRLLDQGILVPCQSPWNTPLLPVKKPGTNDYRPVQDLREVNKRVEDIHPTVPNPYNLLSGLPPSHQWYTVLDLKDAFFCLRLHPTSQPLFAFEWRDPEMGISGQLTWTRLPQGFKNSPTLFNEALHRDLADFRIQHPDLILLQYVDDLLLAATSELDCQQGTRALLQTLGNLGYRASAKKAQICQKQVKYLGYLLKEGQRWLTEARKETVMGQPTPKTPRQLREFLGKAGFCRLFIPGFAEMAAPLYPLTKPGTLFNWGPDQQKAYQEIKQALLTAPALGLPDLTKPFELFVDEKQGYAKGVLTQKLGPWRRPVAYLSKKLDPVAAGWPPCLRMVAAIAVLTKDAGKLTMGQPLVILAPHAVEALVKQPPDRWLSNARMTHYQALLLDTDRVQFGPVVALNPATLLPLPEEGLQHNCLDILAEAHGTRPDLTDQPLPDADHTWYTDGSSLLQEGQRKAGAAVTTETEVIWAKALPAGTSAQRAELIALTQALKMAEGKKLNVYTDSRYAFATAHIHGEIYRRRGWLTSEGKEIKNKDEILALLKALFLPKRLSIIHCPGHQKGHSAEARGNRMADQAARKAAITETPDTSTLLIENSSPSGGSKRTADGSEFEAGKRTADGSEFEKRTADGSEFESPKKKAKVE

SEQ ID NO: 2655 - protein, 2108 aa, synthetic construct
MPAAKRVKLDGGDKKYSIGLDIGTNSVGWAVITDEYKVPSKKFKVLGNTDRHSIKKNLIGALLFDSGETAEATRLKRTARRRYTRRKNRICYLQEIFSNEMAKVDDSFFHRLEESFLVEEDKKHERHPIFGNIVDEVAYHEKYPTIYHLRKKLVDSTDKADLRLIYLALAHMIKFRGHFLIEGDLNPDNSDVDKLFIQLVQTYNQLFEENPINASGVDAKAILSARLSKSRRLENLIAQLPGEKKNGLFGNLIALSLGLTPNFKSNFDLAEDAKLQLSKDTYDDDLDNLLAQIGDQYADLFLAAKNLSDAILLSDILRVNTEITKAPLSASMIKRYDEHHQDLTLLKALVRQQLPEKYKEIFFDQSKNGYAGYIDGGASQEEFYKFIKPILEKMDGTEELLVKLNREDLLRKQRTFDNGSIPHQIHLGELHAILRRQEDFYPFLKDNREKIEKILTFRIPYYVGPLARGNSRFAWMTRKSEETITPWNFEEVVDKGASAQSFIERMTNFDKNLPNEKVLPKHSLLYEYFTVYNELTKVKYVTEGMRKPAFLSGEQKKAIVDLLFKTNRKVTVKQLKEDYFKKIECFDSVEISGVEDRFNASLGTYHDLLKIIKDKDFLDNEENEDILEDIVLTLTLFEDREMIEERLKTYAHLFDDKVMKQLKRRRYTGWGRLSRKLINGIRDKQSGKTILDFLKSDGFANRNFMQLIHDDSLTFKEDIQKAQVSGQGDSLHEHIANLAGSPAIKKGILQTVKVVDELVKVMGRHKPENIVIEMARENQTTQKGQKNSRERMKRIEEGIKELGSQILKEHPVENTQLQNEKLYLYYLQNGRDMYVDQELDINRLSDYDVDHIVPQSFLKDDSIDNKVLTRSDKARGKSDNVPSEEVVKKMKNYWRQLLNAKLITQRKFDNLTKAERGGLSELDKAGFIKRQLVETRQITKHVAQILDSRMNTKYDENDKLIREVKVITLKSKLVSDFRKDFQFYKVREINNYHHAHDAYLNAVVGTALIKKYPKLESEFVYGDYKVYDVRKMIAKSEQEIGKATAKYFFYSNIMNFFKTEITLANGEIRKRPLIETNGETGEIVWDKGRDFATVRKVLSMPQVNIVKKTEVQTGGFSKESILPKRNSDKLIARKKDWDPKKYGGFDSPTVAYSVLVVAKVEKGKSKKLKSVKELLGITIMERSSFEKNPIDFLEAKGYKEVKKDLIIKLPKYSLFELENGRKRMLASAGELQKGNELALPSKYVNFLYLASHYEKLKGSPEDNEQKQLFVEQHKHYLDEIIEQISEFSKRVILADANLDKVLSAYNKHRDKPIREQAENIIHLFTLTNLGAPAAFKYFDTTIDRKRYTSTKEVLDATLIHQSITGLYETRIDLSQLGGDGGGSSGGTLNIEDEYRLHETSKEPDVSLGSTWLSDFPQAWAETGGMGLAVRQAPLIIPLKATSTPVSIKQYPMSQEARLGIKPHIQRLLDQGILVPCQSPWNTPLLPVKKPGTNDYRPVQDLREVNKRVEDIHPTVPNPYNLLSGLPPSHQWYTVLDLKDAFFCLRLHPTSQPLFAFEWRDPEMGISGQLTWTRLPQGFKNSPTLFNEALHRDLADFRIQHPDLILLQYVDDLLLAATSELDCQQGTRALLQTLGNLGYRASAKKAQICQKQVKYLGYLLKEGQRWLTEARKETVMGQPTPKTPRQLREFLGKAGFCRLFIPGFAEMAAPLYPLTKPGTLFNWGPDQQKAYQEIKQALLTAPALGLPDLTKPFELFVDEKQGYAKGVLTQKLGPWRRPVAYLSKKLDPVAAGWPPCLRMVAAIAVLTKDAGKLTMGQPLVILAPHAVEALVKQPPDRWLSNARMTHYQALLLDTDRVQFGPVVALNPATLLPLPEEGLQHNCLDILAEAHGTRPDLTDQPLPDADHTWYTDGSSLLQEGQRKAGAAVTTETEVIWAKALPAGTSAQRAELIALTQALKMAEGKKLNVYTDSRYAFATAHIHGEIYRRRGWLTSEGKEIKNKDEILALLKALFLPKRLSIIHCPGHQKGHSAEARGNRMADQAARKAAITETPDTSTLLIENSSPSGGSKRTADGSEFEAGKRTADGSEFEKRTADGSEFESPKKKAKVE

SEQ ID NO: 2656 - protein, 2114 aa, synthetic construct
MPAAKRVKLDGGDKKYSIGLDIGTNSVGWAVITDEYKVPSKKFKVLGNTDRHSIKKNLIGALLFDSGETAEATRLKRTARRRYTRRKNRICYLQEIFSNEMAKVDDSFFHRLEESFLVEEDKKHERHPIFGNIVDEVAYHEKYPTIYHLRKKLVDSTDKADLRLIYLALAHMIKFRGHFLIEGDLNPDNSDVDKLFIQLVQTYNQLFEENPINASGVDAKAILSARLSKSRRLENLIAQLPGEKKNGLFGNLIALSLGLTPNFKSNFDLAEDAKLQLSKDTYDDDLDNLLAQIGDQYADLFLAAKNLSDAILLSDILRVNTEITKAPLSASMIKRYDEHHQDLTLLKALVRQQLPEKYKEIFFDQSKNGYAGYIDGGASQEEFYKFIKPILEKMDGTEELLVKLNREDLLRKQRTFDNGSIPHQIHLGELHAILRRQEDFYPFLKDNREKIEKILTFRIPYYVGPLARGNSRFAWMTRKSEETITPWNFEEVVDKGASAQSFIERMTNFDKNLPNEKVLPKHSLLYEYFTVYNELTKVKYVTEGMRKPAFLSGEQKKAIVDLLFKTNRKVTVKQLKEDYFKKIECFDSVEISGVEDRFNASLGTYHDLLKIIKDKDFLDNEENEDILEDIVLTLTLFEDREMIEERLKTYAHLFDDKVMKQLKRRRYTGWGRLSRKLINGIRDKQSGKTILDFLKSDGFANRNFMQLIHDDSLTFKEDIQKAQVSGQGDSLHEHIANLAGSPAIKKGILQTVKVVDELVKVMGRHKPENIVIEMARENQTTQKGQKNSRERMKRIEEGIKELGSQILKEHPVENTQLQNEKLYLYYLQNGRDMYVDQELDINRLSDYDVDHIVPQSFLKDDSIDNKVLTRSDKARGKSDNVPSEEVVKKMKNYWRQLLNAKLITQRKFDNLTKAERGGLSELDKAGFIKRQLVETRQITKHVAQILDSRMNTKYDENDKLIREVKVITLKSKLVSDFRKDFQFYKVREINNYHHAHDAYLNAVVGTALIKKYPKLESEFVYGDYKVYDVRKMIAKSEQEIGKATAKYFFYSNIMNFFKTEITLANGEIRKRPLIETNGETGEIVWDKGRDFATVRKVLSMPQVNIVKKTEVQTGGFSKESILPKRNSDKLIARKKDWDPKKYGGFDSPTVAYSVLVVAKVEKGKSKKLKSVKELLGITIMERSSFEKNPIDFLEAKGYKEVKKDLIIKLPKYSLFELENGRKRMLASAGELQKGNELALPSKYVNFLYLASHYEKLKGSPEDNEQKQLFVEQHKHYLDEIIEQISEFSKRVILADANLDKVLSAYNKHRDKPIREQAENIIHLFTLTNLGAPAAFKYFDTTIDRKRYTSTKEVLDATLIHQSITGLYETRIDLSQLGGDGGPAPAPAPAPGGTLNIEDEYRLHETSKEPDVSLGSTWLSDFPQAWAETGGMGLAVRQAPLIIPLKATSTPVSIKQYPMSQEARLGIKPHIQRLLDQGILVPCQSPWNTPLLPVKKPGTNDYRPVQDLREVNKRVEDIHPTVPNPYNLLSGLPPSHQWYTVLDLKDAFFCLRLHPTSQPLFAFEWRDPEMGISGQLTWTRLPQGFKNSPTLFNEALHRDLADFRIQHPDLILLQYVDDLLLAATSELDCQQGTRALLQTLGNLGYRASAKKAQICQKQVKYLGYLLKEGQRWLTEARKETVMGQPTPKTPRQLREFLGKAGFCRLFIPGFAEMAAPLYPLTKPGTLFNWGPDQQKAYQEIKQALLTAPALGLPDLTKPFELFVDEKQGYAKGVLTQKLGPWRRPVAYLSKKLDPVAAGWPPCLRMVAAIAVLTKDAGKLTMGQPLVILAPHAVEALVKQPPDRWLSNARMTHYQALLLDTDRVQFGPVVALNPATLLPLPEEGLQHNCLDILAEAHGTRPDLTDQPLPDADHTWYTDGSSLLQEGQRKAGAAVTTETEVIWAKALPAGTSAQRAELIALTQALKMAEGKKLNVYTDSRYAFATAHIHGEIYRRRGWLTSEGKEIKNKDEILALLKALFLPKRLSIIHCPGHQKGHSAEARGNRMADQAARKAAITETPDTSTLLIENSSPSGGSKRTADGSEFEAGKRTADGSEFEKRTADGSEFESPKKKAKVE

SEQ ID NO: 2657 - protein, 2113 aa, synthetic construct
MPAAKRVKLDGGDKKYSIGLDIGTNSVGWAVITDEYKVPSKKFKVLGNTDRHSIKKNLIGALLFDSGETAEATRLKRTARRRYTRRKNRICYLQEIFSNEMAKVDDSFFHRLEESFLVEEDKKHERHPIFGNIVDEVAYHEKYPTIYHLRKKLVDSTDKADLRLIYLALAHMIKFRGHFLIEGDLNPDNSDVDKLFIQLVQTYNQLFEENPINASGVDAKAILSARLSKSRRLENLIAQLPGEKKNGLFGNLIALSLGLTPNFKSNFDLAEDAKLQLSKDTYDDDLDNLLAQIGDQYADLFLAAKNLSDAILLSDILRVNTEITKAPLSASMIKRYDEHHQDLTLLKALVRQQLPEKYKEIFFDQSKNGYAGYIDGGASQEEFYKFIKPILEKMDGTEELLVKLNREDLLRKQRTFDNGSIPHQIHLGELHAILRRQEDFYPFLKDNREKIEKILTFRIPYYVGPLARGNSRFAWMTRKSEETITPWNFEEVVDKGASAQSFIERMTNFDKNLPNEKVLPKHSLLYEYFTVYNELTKVKYVTEGMRKPAFLSGEQKKAIVDLLFKTNRKVTVKQLKEDYFKKIECFDSVEISGVEDRFNASLGTYHDLLKIIKDKDFLDNEENEDILEDIVLTLTLFEDREMIEERLKTYAHLFDDKVMKQLKRRRYTGWGRLSRKLINGIRDKQSGKTILDFLKSDGFANRNFMQLIHDDSLTFKEDIQKAQVSGQGDSLHEHIANLAGSPAIKKGILQTVKVVDELVKVMGRHKPENIVIEMARENQTTQKGQKNSRERMKRIEEGIKELGSQILKEHPVENTQLQNEKLYLYYLQNGRDMYVDQELDINRLSDYDVDHIVPQSFLKDDSIDNKVLTRSDKARGKSDNVPSEEVVKKMKNYWRQLLNAKLITQRKFDNLTKAERGGLSELDKAGFIKRQLVETRQITKHVAQILDSRMNTKYDENDKLIREVKVITLKSKLVSDFRKDFQFYKVREINNYHHAHDAYLNAVVGTALIKKYPKLESEFVYGDYKVYDVRKMIAKSEQEIGKATAKYFFYSNIMNFFKTEITLANGEIRKRPLIETNGETGEIVWDKGRDFATVRKVLSMPQVNIVKKTEVQTGGFSKESILPKRNSDKLIARKKDWDPKKYGGFDSPTVAYSVLVVAKVEKGKSKKLKSVKELLGITIMERSSFEKNPIDFLEAKGYKEVKKDLIIKLPKYSLFELENGRKRMLASAGELQKGNELALPSKYVNFLYLASHYEKLKGSPEDNEQKQLFVEQHKHYLDEIIEQISEFSKRVILADANLDKVLSAYNKHRDKPIREQAENIIHLFTLTNLGAPAAFKYFDTTIDRKRYTSTKEVLDATLIHQSITGLYETRIDLSQLGGDGGEAAAKGGSGGTLNIEDEYRLHETSKEPDVSLGSTWLSDFPQAWAETGGMGLAVRQAPLIIPLKATSTPVSIKQYPMSQEARLGIKPHIQRLLDQGILVPCQSPWNTPLLPVKKPGTNDYRPVQDLREVNKRVEDIHPTVPNPYNLLSGLPPSHQWYTVLDLKDAFFCLRLHPTSQPLFAFEWRDPEMGISGQLTWTRLPQGFKNSPTLFNEALHRDLADFRIQHPDLILLQYVDDLLLAATSELDCQQGTRALLQTLGNLGYRASAKKAQICQKQVKYLGYLLKEGQRWLTEARKETVMGQPTPKTPRQLREFLGKAGFCRLFIPGFAEMAAPLYPLTKPGTLFNWGPDQQKAYQEIKQALLTAPALGLPDLTKPFELFVDEKQGYAKGVLTQKLGPWRRPVAYLSKKLDPVAAGWPPCLRMVAAIAVLTKDAGKLTMGQPLVILAPHAVEALVKQPPDRWLSNARMTHYQALLLDTDRVQFGPVVALNPATLLPLPEEGLQHNCLDILAEAHGTRPDLTDQPLPDADHTWYTDGSSLLQEGQRKAGAAVTTETEVIWAKALPAGTSAQRAELIALTQALKMAEGKKLNVYTDSRYAFATAHIHGEIYRRRGWLTSEGKEIKNKDEILALLKALFLPKRLSIIHCPGHQKGHSAEARGNRMADQAARKAAITETPDTSTLLIENSSPSGGSKRTADGSEFEAGKRTADGSEFEKRTADGSEFESPKKKAKVE

SEQ ID NO: 2658 - protein, 2116 aa, synthetic construct
MPAAKRVKLDGGDKKYSIGLDIGTNSVGWAVITDEYKVPSKKFKVLGNTDRHSIKKNLIGALLFDSGETAEATRLKRTARRRYTRRKNRICYLQEIFSNEMAKVDDSFFHRLEESFLVEEDKKHERHPIFGNIVDEVAYHEKYPTIYHLRKKLVDSTDKADLRLIYLALAHMIKFRGHFLIEGDLNPDNSDVDKLFIQLVQTYNQLFEENPINASGVDAKAILSARLSKSRRLENLIAQLPGEKKNGLFGNLIALSLGLTPNFKSNFDLAEDAKLQLSKDTYDDDLDNLLAQIGDQYADLFLAAKNLSDAILLSDILRVNTEITKAPLSASMIKRYDEHHQDLTLLKALVRQQLPEKYKEIFFDQSKNGYAGYIDGGASQEEFYKFIKPILEKMDGTEELLVKLNREDLLRKQRTFDNGSIPHQIHLGELHAILRRQEDFYPFLKDNREKIEKILTFRIPYYVGPLARGNSRFAWMTRKSEETITPWNFEEVVDKGASAQSFIERMTNFDKNLPNEKVLPKHSLLYEYFTVYNELTKVKYVTEGMRKPAFLSGEQKKAIVDLLFKTNRKVTVKQLKEDYFKKIECFDSVEISGVEDRFNASLGTYHDLLKIIKDKDFLDNEENEDILEDIVLTLTLFEDREMIEERLKTYAHLFDDKVMKQLKRRRYTGWGRLSRKLINGIRDKQSGKTILDFLKSDGFANRNFMQLIHDDSLTFKEDIQKAQVSGQGDSLHEHIANLAGSPAIKKGILQTVKVVDELVKVMGRHKPENIVIEMARENQTTQKGQKNSRERMKRIEEGIKELGSQILKEHPVENTQLQNEKLYLYYLQNGRDMYVDQELDINRLSDYDVDHIVPQSFLKDDSIDNKVLTRSDKARGKSDNVPSEEVVKKMKNYWRQLLNAKLITQRKFDNLTKAERGGLSELDKAGFIKRQLVETRQITKHVAQILDSRMNTKYDENDKLIREVKVITLKSKLVSDFRKDFQFYKVREINNYHHAHDAYLNAVVGTALIKKYPKLESEFVYGDYKVYDVRKMIAKSEQEIGKATAKYFFYSNIMNFFKTEITLANGEIRKRPLIETNGETGEIVWDKGRDFATVRKVLSMPQVNIVKKTEVQTGGFSKESILPKRNSDKLIARKKDWDPKKYGGFDSPTVAYSVLVVAKVEKGKSKKLKSVKELLGITIMERSSFEKNPIDFLEAKGYKEVKKDLIIKLPKYSLFELENGRKRMLASAGELQKGNELALPSKYVNFLYLASHYEKLKGSPEDNEQKQLFVEQHKHYLDEIIEQISEFSKRVILADANLDKVLSAYNKHRDKPIREQAENIIHLFTLTNLGAPAAFKYFDTTIDRKRYTSTKEVLDATLIHQSITGLYETRIDLSQLGGDGGEAAAKGSSPAPGGTLNIEDEYRLHETSKEPDVSLGSTWLSDFPQAWAETGGMGLAVRQAPLIIPLKATSTPVSIKQYPMSQEARLGIKPHIQRLLDQGILVPCQSPWNTPLLPVKKPGTNDYRPVQDLREVNKRVEDIHPTVPNPYNLLSGLPPSHQWYTVLDLKDAFFCLRLHPTSQPLFAFEWRDPEMGISGQLTWTRLPQGFKNSPTLFNEALHRDLADFRIQHPDLILLQYVDDLLLAATSELDCQQGTRALLQTLGNLGYRASAKKAQICQKQVKYLGYLLKEGQRWLTEARKETVMGQPTPKTPRQLREFLGKAGFCRLFIPGFAEMAAPLYPLTKPGTLFNWGPDQQKAYQEIKQALLTAPALGLPDLTKPFELFVDEKQGYAKGVLTQKLGPWRRPVAYLSKKLDPVAAGWPPCLRMVAAIAVLTKDAGKLTMGQPLVILAPHAVEALVKQPPDRWLSNARMTHYQALLLDTDRVQFGPVVALNPATLLPLPEEGLQHNCLDILAEAHGTRPDLTDQPLPDADHTWYTDGSSLLQEGQRKAGAAVTTETEVIWAKALPAGTSAQRAELIALTQALKMAEGKKLNVYTDSRYAFATAHIHGEIYRRRGWLTSEGKEIKNKDEILALLKALFLPKRLSIIHCPGHQKGHSAEARGNRMADQAARKAAITETPDTSTLLIENSSPSGGSKRTADGSEFEAGKRTADGSEFEKRTADGSEFESPKKKAKVE

SEQ ID NO: 2659 - protein, 2113 aa, synthetic construct
MPAAKRVKLDGGDKKYSIGLDIGTNSVGWAVITDEYKVPSKKFKVLGNTDRHSIKKNLIGALLFDSGETAEATRLKRTARRRYTRRKNRICYLQEIFSNEMAKVDDSFFHRLEESFLVEEDKKHERHPIFGNIVDEVAYHEKYPTIYHLRKKLVDSTDKADLRLIYLALAHMIKFRGHFLIEGDLNPDNSDVDKLFIQLVQTYNQLFEENPINASGVDAKAILSARLSKSRRLENLIAQLPGEKKNGLFGNLIALSLGLTPNFKSNFDLAEDAKLQLSKDTYDDDLDNLLAQIGDQYADLFLAAKNLSDAILLSDILRVNTEITKAPLSASMIKRYDEHHQDLTLLKALVRQQLPEKYKEIFFDQSKNGYAGYIDGGASQEEFYKFIKPILEKMDGTEELLVKLNREDLLRKQRTFDNGSIPHQIHLGELHAILRRQEDFYPFLKDNREKIEKILTFRIPYYVGPLARGNSRFAWMTRKSEETITPWNFEEVVDKGASAQSFIERMTNFDKNLPNEKVLPKHSLLYEYFTVYNELTKVKYVTEGMRKPAFLSGEQKKAIVDLLFKTNRKVTVKQLKEDYFKKIECFDSVEISGVEDRFNASLGTYHDLLKIIKDKDFLDNEENEDILEDIVLTLTLFEDREMIEERLKTYAHLFDDKVMKQLKRRRYTGWGRLSRKLINGIRDKQSGKTILDFLKSDGFANRNFMQLIHDDSLTFKEDIQKAQVSGQGDSLHEHIANLAGSPAIKKGILQTVKVVDELVKVMGRHKPENIVIEMARENQTTQKGQKNSRERMKRIEEGIKELGSQILKEHPVENTQLQNEKLYLYYLQNGRDMYVDQELDINRLSDYDVDHIVPQSFLKDDSIDNKVLTRSDKARGKSDNVPSEEVVKKMKNYWRQLLNAKLITQRKFDNLTKAERGGLSELDKAGFIKRQLVETRQITKHVAQILDSRMNTKYDENDKLIREVKVITLKSKLVSDFRKDFQFYKVREINNYHHAHDAYLNAVVGTALIKKYPKLESEFVYGDYKVYDVRKMIAKSEQEIGKATAKYFFYSNIMNFFKTEITLANGEIRKRPLIETNGETGEIVWDKGRDFATVRKVLSMPQVNIVKKTEVQTGGFSKESILPKRNSDKLIARKKDWDPKKYGGFDSPTVAYSVLVVAKVEKGKSKKLKSVKELLGITIMERSSFEKNPIDFLEAKGYKEVKKDLIIKLPKYSLFELENGRKRMLASAGELQKGNELALPSKYVNFLYLASHYEKLKGSPEDNEQKQLFVEQHKHYLDEIIEQISEFSKRVILADANLDKVLSAYNKHRDKPIREQAENIIHLFTLTNLGAPAAFKYFDTTIDRKRYTSTKEVLDATLIHQSITGLYETRIDLSQLGGDGGEAAAKGGGGGTLNIEDEYRLHETSKEPDVSLGSTWLSDFPQAWAETGGMGLAVRQAPLIIPLKATSTPVSIKQYPMSQEARLGIKPHIQRLLDQGILVPCQSPWNTPLLPVKKPGTNDYRPVQDLREVNKRVEDIHPTVPNPYNLLSGLPPSHQWYTVLDLKDAFFCLRLHPTSQPLFAFEWRDPEMGISGQLTWTRLPQGFKNSPTLFNEALHRDLADFRIQHPDLILLQYVDDLLLAATSELDCQQGTRALLQTLGNLGYRASAKKAQICQKQVKYLGYLLKEGQRWLTEARKETVMGQPTPKTPRQLREFLGKAGFCRLFIPGFAEMAAPLYPLTKPGTLFNWGPDQQKAYQEIKQALLTAPALGLPDLTKPFELFVDEKQGYAKGVLTQKLGPWRRPVAYLSKKLDPVAAGWPPCLRMVAAIAVLTKDAGKLTMGQPLVILAPHAVEALVKQPPDRWLSNARMTHYQALLLDTDRVQFGPVVALNPATLLPLPEEGLQHNCLDILAEAHGTRPDLTDQPLPDADHTWYTDGSSLLQEGQRKAGAAVTTETEVIWAKALPAGTSAQRAELIALTQALKMAEGKKLNVYTDSRYAFATAHIHGEIYRRRGWLTSEGKEIKNKDEILALLKALFLPKRLSIIHCPGHQKGHSAEARGNRMADQAARKAAITETPDTSTLLIENSSPSGGSKRTADGSEFEAGKRTADGSEFEKRTADGSEFESPKKKAKVE

SEQ ID NO: 2660 - protein, 2116 aa, synthetic construct
MPAAKRVKLDGGDKKYSIGLDIGTNSVGWAVITDEYKVPSKKFKVLGNTDRHSIKKNLIGALLFDSGETAEATRLKRTARRRYTRRKNRICYLQEIFSNEMAKVDDSFFHRLEESFLVEEDKKHERHPIFGNIVDEVAYHEKYPTIYHLRKKLVDSTDKADLRLIYLALAHMIKFRGHFLIEGDLNPDNSDVDKLFIQLVQTYNQLFEENPINASGVDAKAILSARLSKSRRLENLIAQLPGEKKNGLFGNLIALSLGLTPNFKSNFDLAEDAKLQLSKDTYDDDLDNLLAQIGDQYADLFLAAKNLSDAILLSDILRVNTEITKAPLSASMIKRYDEHHQDLTLLKALVRQQLPEKYKEIFFDQSKNGYAGYIDGGASQEEFYKFIKPILEKMDGTEELLVKLNREDLLRKQRTFDNGSIPHQIHLGELHAILRRQEDFYPFLKDNREKIEKILTFRIPYYVGPLARGNSRFAWMTRKSEETITPWNFEEVVDKGASAQSFIERMTNFDKNLPNEKVLPKHSLLYEYFTVYNELTKVKYVTEGMRKPAFLSGEQKKAIVDLLFKTNRKVTVKQLKEDYFKKIECFDSVEISGVEDRFNASLGTYHDLLKIIKDKDFLDNEENEDILEDIVLTLTLFEDREMIEERLKTYAHLFDDKVMKQLKRRRYTGWGRLSRKLINGIRDKQSGKTILDFLKSDGFANRNFMQLIHDDSLTFKEDIQKAQVSGQGDSLHEHIANLAGSPAIKKGILQTVKVVDELVKVMGRHKPENIVIEMARENQTTQKGQKNSRERMKRIEEGIKELGSQILKEHPVENTQLQNEKLYLYYLQNGRDMYVDQELDINRLSDYDVDHIVPQSFLKDDSIDNKVLTRSDKARGKSDNVPSEEVVKKMKNYWRQLLNAKLITQRKFDNLTKAERGGLSELDKAGFIKRQLVETRQITKHVAQILDSRMNTKYDENDKLIREVKVITLKSKLVSDFRKDFQFYKVREINNYHHAHDAYLNAVVGTALIKKYPKLESEFVYGDYKVYDVRKMIAKSEQEIGKATAKYFFYSNIMNFFKTEITLANGEIRKRPLIETNGETGEIVWDKGRDFATVRKVLSMPQVNIVKKTEVQTGGFSKESILPKRNSDKLIARKKDWDPKKYGGFDSPTVAYSVLVVAKVEKGKSKKLKSVKELLGITIMERSSFEKNPIDFLEAKGYKEVKKDLIIKLPKYSLFELENGRKRMLASAGELQKGNELALPSKYVNFLYLASHYEKLKGSPEDNEQKQLFVEQHKHYLDEIIEQISEFSKRVILADANLDKVLSAYNKHRDKPIREQAENIIHLFTLTNLGAPAAFKYFDTTIDRKRYTSTKEVLDATLIHQSITGLYETRIDLSQLGGDGGGGSGSSEAAAKGGTLNIEDEYRLHETSKEPDVSLGSTWLSDFPQAWAETGGMGLAVRQAPLIIPLKATSTPVSIKQYPMSQEARLGIKPHIQRLLDQGILVPCQSPWNTPLLPVKKPGTNDYRPVQDLREVNKRVEDIHPTVPNPYNLLSGLPPSHQWYTVLDLKDAFFCLRLHPTSQPLFAFEWRDPEMGISGQLTWTRLPQGFKNSPTLFNEALHRDLADFRIQHPDLILLQYVDDLLLAATSELDCQQGTRALLQTLGNLGYRASAKKAQICQKQVKYLGYLLKEGQRWLTEARKETVMGQPTPKTPRQLREFLGKAGFCRLFIPGFAEMAAPLYPLTKPGTLFNWGPDQQKAYQEIKQALLTAPALGLPDLTKPFELFVDEKQGYAKGVLTQKLGPWRRPVAYLSKKLDPVAAGWPPCLRMVAAIAVLTKDAGKLTMGQPLVILAPHAVEALVKQPPDRWLSNARMTHYQALLLDTDRVQFGPVVALNPATLLPLPEEGLQHNCLDILAEAHGTRPDLTDQPLPDADHTWYTDGSSLLQEGQRKAGAAVTTETEVIWAKALPAGTSAQRAELIALTQALKMAEGKKLNVYTDSRYAFATAHIHGEIYRRRGWLTSEGKEIKNKDEILALLKALFLPKRLSIIHCPGHQKGHSAEARGNRMADQAARKAAITETPDTSTLLIENSSPSGGSKRTADGSEFEAGKRTADGSEFEKRTADGSEFESPKKKAKVE

SEQ ID NO: 2661 - protein, 2116 aa, synthetic construct
MPAAKRVKLDGGDKKYSIGLDIGTNSVGWAVITDEYKVPSKKFKVLGNTDRHSIKKNLIGALLFDSGETAEATRLKRTARRRYTRRKNRICYLQEIFSNEMAKVDDSFFHRLEESFLVEEDKKHERHPIFGNIVDEVAYHEKYPTIYHLRKKLVDSTDKADLRLIYLALAHMIKFRGHFLIEGDLNPDNSDVDKLFIQLVQTYNQLFEENPINASGVDAKAILSARLSKSRRLENLIAQLPGEKKNGLFGNLIALSLGLTPNFKSNFDLAEDAKLQLSKDTYDDDLDNLLAQIGDQYADLFLAAKNLSDAILLSDILRVNTEITKAPLSASMIKRYDEHHQDLTLLKALVRQQLPEKYKEIFFDQSKNGYAGYIDGGASQEEFYKFIKPILEKMDGTEELLVKLNREDLLRKQRTFDNGSIPHQIHLGELHAILRRQEDFYPFLKDNREKIEKILTFRIPYYVGPLARGNSRFAWMTRKSEETITPWNFEEVVDKGASAQSFIERMTNFDKNLPNEKVLPKHSLLYEYFTVYNELTKVKYVTEGMRKPAFLSGEQKKAIVDLLFKTNRKVTVKQLKEDYFKKIECFDSVEISGVEDRFNASLGTYHDLLKIIKDKDFLDNEENEDILEDIVLTLTLFEDREMIEERLKTYAHLFDDKVMKQLKRRRYTGWGRLSRKLINGIRDKQSGKTILDFLKSDGFANRNFMQLIHDDSLTFKEDIQKAQVSGQGDSLHEHIANLAGSPAIKKGILQTVKVVDELVKVMGRHKPENIVIEMARENQTTQKGQKNSRERMKRIEEGIKELGSQILKEHPVENTQLQNEKLYLYYLQNGRDMYVDQELDINRLSDYDVDHIVPQSFLKDDSIDNKVLTRSDKARGKSDNVPSEEVVKKMKNYWRQLLNAKLITQRKFDNLTKAERGGLSELDKAGFIKRQLVETRQITKHVAQILDSRMNTKYDENDKLIREVKVITLKSKLVSDFRKDFQFYKVREINNYHHAHDAYLNAVVGTALIKKYPKLESEFVYGDYKVYDVRKMIAKSEQEIGKATAKYFFYSNIMNFFKTEITLANGEIRKRPLIETNGETGEIVWDKGRDFATVRKVLSMPQVNIVKKTEVQTGGFSKESILPKRNSDKLIARKKDWDPKKYGGFDSPTVAYSVLVVAKVEKGKSKKLKSVKELLGITIMERSSFEKNPIDFLEAKGYKEVKKDLIIKLPKYSLFELENGRKRMLASAGELQKGNELALPSKYVNFLYLASHYEKLKGSPEDNEQKQLFVEQHKHYLDEIIEQISEFSKRVILADANLDKVLSAYNKHRDKPIREQAENIIHLFTLTNLGAPAAFKYFDTTIDRKRYTSTKEVLDATLIHQSITGLYETRIDLSQLGGDGGGSSGGSEAAAKGGTLNIEDEYRLHETSKEPDVSLGSTWLSDFPQAWAETGGMGLAVRQAPLIIPLKATSTPVSIKQYPMSQEARLGIKPHIQRLLDQGILVPCQSPWNTPLLPVKKPGTNDYRPVQDLREVNKRVEDIHPTVPNPYNLLSGLPPSHQWYTVLDLKDAFFCLRLHPTSQPLFAFEWRDPEMGISGQLTWTRLPQGFKNSPTLFNEALHRDLADFRIQHPDLILLQYVDDLLLAATSELDCQQGTRALLQTLGNLGYRASAKKAQICQKQVKYLGYLLKEGQRWLTEARKETVMGQPTPKTPRQLREFLGKAGFCRLFIPGFAEMAAPLYPLTKPGTLFNWGPDQQKAYQEIKQALLTAPALGLPDLTKPFELFVDEKQGYAKGVLTQKLGPWRRPVAYLSKKLDPVAAGWPPCLRMVAAIAVLTKDAGKLTMGQPLVILAPHAVEALVKQPPDRWLSNARMTHYQALLLDTDRVQFGPVVALNPATLLPLPEEGLQHNCLDILAEAHGTRPDLTDQPLPDADHTWYTDGSSLLQEGQRKAGAAVTTETEVIWAKALPAGTSAQRAELIALTQALKMAEGKKLNVYTDSRYAFATAHIHGEIYRRRGWLTSEGKEIKNKDEILALLKALFLPKRLSIIHCPGHQKGHSAEARGNRMADQAARKAAITETPDTSTLLIENSSPSGGSKRTADGSEFEAGKRTADGSEFEKRTADGSEFESPKKKAKVE

SEQ ID NO: 2662 - protein, 2120 aa, synthetic construct
MPAAKRVKLDGGDKKYSIGLDIGTNSVGWAVITDEYKVPSKKFKVLGNTDRHSIKKNLIGALLFDSGETAEATRLKRTARRRYTRRKNRICYLQEIFSNEMAKVDDSFFHRLEESFLVEEDKKHERHPIFGNIVDEVAYHEKYPTIYHLRKKLVDSTDKADLRLIYLALAHMIKFRGHFLIEGDLNPDNSDVDKLFIQLVQTYNQLFEENPINASGVDAKAILSARLSKSRRLENLIAQLPGEKKNGLFGNLIALSLGLTPNFKSNFDLAEDAKLQLSKDTYDDDLDNLLAQIGDQYADLFLAAKNLSDAILLSDILRVNTEITKAPLSASMIKRYDEHHQDLTLLKALVRQQLPEKYKEIFFDQSKNGYAGYIDGGASQEEFYKFIKPILEKMDGTEELLVKLNREDLLRKQRTFDNGSIPHQIHLGELHAILRRQEDFYPFLKDNREKIEKILTFRIPYYVGPLARGNSRFAWMTRKSEETITPWNFEEVVDKGASAQSFIERMTNFDKNLPNEKVLPKHSLLYEYFTVYNELTKVKYVTEGMRKPAFLSGEQKKAIVDLLFKTNRKVTVKQLKEDYFKKIECFDSVEISGVEDRFNASLGTYHDLLKIIKDKDFLDNEENEDILEDIVLTLTLFEDREMIEERLKTYAHLFDDKVMKQLKRRRYTGWGRLSRKLINGIRDKQSGKTILDFLKSDGFANRNFMQLIHDDSLTFKEDIQKAQVSGQGDSLHEHIANLAGSPAIKKGILQTVKVVDELVKVMGRHKPENIVIEMARENQTTQKGQKNSRERMKRIEEGIKELGSQILKEHPVENTQLQNEKLYLYYLQNGRDMYVDQELDINRLSDYDVDHIVPQSFLKDDSIDNKVLTRSDKARGKSDNVPSEEVVKKMKNYWRQLLNAKLITQRKFDNLTKAERGGLSELDKAGFIKRQLVETRQITKHVAQILDSRMNTKYDENDKLIREVKVITLKSKLVSDFRKDFQFYKVREINNYHHAHDAYLNAVVGTALIKKYPKLESEFVYGDYKVYDVRKMIAKSEQEIGKATAKYFFYSNIMNFFKTEITLANGEIRKRPLIETNGETGEIVWDKGRDFATVRKVLSMPQVNIVKKTEVQTGGFSKESILPKRNSDKLIARKKDWDPKKYGGFDSPTVAYSVLVVAKVEKGKSKKLKSVKELLGITIMERSSFEKNPIDFLEAKGYKEVKKDLIIKLPKYSLFELENGRKRMLASAGELQKGNELALPSKYVNFLYLASHYEKLKGSPEDNEQKQLFVEQHKHYLDEIIEQISEFSKRVILADANLDKVLSAYNKHRDKPIREQAENIIHLFTLTNLGAPAAFKYFDTTIDRKRYTSTKEVLDATLIHQSITGLYETRIDLSQLGGDGGGGGGSGGGGSGGGGSGGTLNIEDEYRLHETSKEPDVSLGSTWLSDFPQAWAETGGMGLAVRQAPLIIPLKATSTPVSIKQYPMSQEARLGIKPHIQRLLDQGILVPCQSPWNTPLLPVKKPGTNDYRPVQDLREVNKRVEDIHPTVPNPYNLLSGLPPSHQWYTVLDLKDAFFCLRLHPTSQPLFAFEWRDPEMGISGQLTWTRLPQGFKNSPTLFNEALHRDLADFRIQHPDLILLQYVDDLLLAATSELDCQQGTRALLQTLGNLGYRASAKKAQICQKQVKYLGYLLKEGQRWLTEARKETVMGQPTPKTPRQLREFLGKAGFCRLFIPGFAEMAAPLYPLTKPGTLFNWGPDQQKAYQEIKQALLTAPALGLPDLTKPFELFVDEKQGYAKGVLTQKLGPWRRPVAYLSKKLDPVAAGWPPCLRMVAAIAVLTKDAGKLTMGQPLVILAPHAVEALVKQPPDRWLSNARMTHYQALLLDTDRVQFGPVVALNPATLLPLPEEGLQHNCLDILAEAHGTRPDLTDQPLPDADHTWYTDGSSLLQEGQRKAGAAVTTETEVIWAKALPAGTSAQRAELIALTQALKMAEGKKLNVYTDSRYAFATAHIHGEIYRRRGWLTSEGKEIKNKDEILALLKALFLPKRLSIIHCPGHQKGHSAEARGNRMADQAARKAAITETPDTSTLLIENSSPSGGSKRTADGSEFEAGKRTADGSEFEKRTADGSEFESPKKKAKVE

SEQ ID NO: 2663 - protein, 2121 aa, synthetic construct
MPAAKRVKLDGGDKKYSIGLDIGTNSVGWAVITDEYKVPSKKFKVLGNTDRHSIKKNLIGALLFDSGETAEATRLKRTARRRYTRRKNRICYLQEIFSNEMAKVDDSFFHRLEESFLVEEDKKHERHPIFGNIVDEVAYHEKYPTIYHLRKKLVDSTDKADLRLIYLALAHMIKFRGHFLIEGDLNPDNSDVDKLFIQLVQTYNQLFEENPINASGVDAKAILSARLSKSRRLENLIAQLPGEKKNGLFGNLIALSLGLTPNFKSNFDLAEDAKLQLSKDTYDDDLDNLLAQIGDQYADLFLAAKNLSDAILLSDILRVNTEITKAPLSASMIKRYDEHHQDLTLLKALVRQQLPEKYKEIFFDQSKNGYAGYIDGGASQEEFYKFIKPILEKMDGTEELLVKLNREDLLRKQRTFDNGSIPHQIHLGELHAILRRQEDFYPFLKDNREKIEKILTFRIPYYVGPLARGNSRFAWMTRKSEETITPWNFEEVVDKGASAQSFIERMTNFDKNLPNEKVLPKHSLLYEYFTVYNELTKVKYVTEGMRKPAFLSGEQKKAIVDLLFKTNRKVTVKQLKEDYFKKIECFDSVEISGVEDRFNASLGTYHDLLKIIKDKDFLDNEENEDILEDIVLTLTLFEDREMIEERLKTYAHLFDDKVMKQLKRRRYTGWGRLSRKLINGIRDKQSGKTILDFLKSDGFANRNFMQLIHDDSLTFKEDIQKAQVSGQGDSLHEHIANLAGSPAIKKGILQTVKVVDELVKVMGRHKPENIVIEMARENQTTQKGQKNSRERMKRIEEGIKELGSQILKEHPVENTQLQNEKLYLYYLQNGRDMYVDQELDINRLSDYDVDHIVPQSFLKDDSIDNKVLTRSDKARGKSDNVPSEEVVKKMKNYWRQLLNAKLITQRKFDNLTKAERGGLSELDKAGFIKRQLVETRQITKHVAQILDSRMNTKYDENDKLIREVKVITLKSKLVSDFRKDFQFYKVREINNYHHAHDAYLNAVVGTALIKKYPKLESEFVYGDYKVYDVRKMIAKSEQEIGKATAKYFFYSNIMNFFKTEITLANGEIRKRPLIETNGETGEIVWDKGRDFATVRKVLSMPQVNIVKKTEVQTGGFSKESILPKRNSDKLIARKKDWDPKKYGGFDSPTVAYSVLVVAKVEKGKSKKLKSVKELLGITIMERSSFEKNPIDFLEAKGYKEVKKDLIIKLPKYSLFELENGRKRMLASAGELQKGNELALPSKYVNFLYLASHYEKLKGSPEDNEQKQLFVEQHKHYLDEIIEQISEFSKRVILADANLDKVLSAYNKHRDKPIREQAENIIHLFTLTNLGAPAAFKYFDTTIDRKRYTSTKEVLDATLIHQSITGLYETRIDLSQLGGDGGSGSETPGTSESATPESGGTLNIEDEYRLHETSKEPDVSLGSTWLSDFPQAWAETGGMGLAVRQAPLIIPLKATSTPVSIKQYPMSQEARLGIKPHIQRLLDQGILVPCQSPWNTPLLPVKKPGTNDYRPVQDLREVNKRVEDIHPTVPNPYNLLSGLPPSHQWYTVLDLKDAFFCLRLHPTSQPLFAFEWRDPEMGISGQLTWTRLPQGFKNSPTLFNEALHRDLADFRIQHPDLILLQYVDDLLLAATSELDCQQGTRALLQTLGNLGYRASAKKAQICQKQVKYLGYLLKEGQRWLTEARKETVMGQPTPKTPRQLREFLGKAGFCRLFIPGFAEMAAPLYPLTKPGTLFNWGPDQQKAYQEIKQALLTAPALGLPDLTKPFELFVDEKQGYAKGVLTQKLGPWRRPVAYLSKKLDPVAAGWPPCLRMVAAIAVLTKDAGKLTMGQPLVILAPHAVEALVKQPPDRWLSNARMTHYQALLLDTDRVQFGPVVALNPATLLPLPEEGLQHNCLDILAEAHGTRPDLTDQPLPDADHTWYTDGSSLLQEGQRKAGAAVTTETEVIWAKALPAGTSAQRAELIALTQALKMAEGKKLNVYTDSRYAFATAHIHGEIYRRRGWLTSEGKEIKNKDEILALLKALFLPKRLSIIHCPGHQKGHSAEARGNRMADQAARKAAITETPDTSTLLIENSSPSGGSKRTADGSEFEAGKRTADGSEFEKRTADGSEFESPKKKAKVE

SEQ ID NO: 2664 - protein, 2114 aa, synthetic construct
MPAAKRVKLDGGDKKYSIGLDIGTNSVGWAVITDEYKVPSKKFKVLGNTDRHSIKKNLIGALLFDSGETAEATRLKRTARRRYTRRKNRICYLQEIFSNEMAKVDDSFFHRLEESFLVEEDKKHERHPIFGNIVDEVAYHEKYPTIYHLRKKLVDSTDKADLRLIYLALAHMIKFRGHFLIEGDLNPDNSDVDKLFIQLVQTYNQLFEENPINASGVDAKAILSARLSKSRRLENLIAQLPGEKKNGLFGNLIALSLGLTPNFKSNFDLAEDAKLQLSKDTYDDDLDNLLAQIGDQYADLFLAAKNLSDAILLSDILRVNTEITKAPLSASMIKRYDEHHQDLTLLKALVRQQLPEKYKEIFFDQSKNGYAGYIDGGASQEEFYKFIKPILEKMDGTEELLVKLNREDLLRKQRTFDNGSIPHQIHLGELHAILRRQEDFYPFLKDNREKIEKILTFRIPYYVGPLARGNSRFAWMTRKSEETITPWNFEEVVDKGASAQSFIERMTNFDKNLPNEKVLPKHSLLYEYFTVYNELTKVKYVTEGMRKPAFLSGEQKKAIVDLLFKTNRKVTVKQLKEDYFKKIECFDSVEISGVEDRFNASLGTYHDLLKIIKDKDFLDNEENEDILEDIVLTLTLFEDREMIEERLKTYAHLFDDKVMKQLKRRRYTGWGRLSRKLINGIRDKQSGKTILDFLKSDGFANRNFMQLIHDDSLTFKEDIQKAQVSGQGDSLHEHIANLAGSPAIKKGILQTVKVVDELVKVMGRHKPENIVIEMARENQTTQKGQKNSRERMKRIEEGIKELGSQILKEHPVENTQLQNEKLYLYYLQNGRDMYVDQELDINRLSDYDVDHIVPQSFLKDDSIDNKVLTRSDKARGKSDNVPSEEVVKKMKNYWRQLLNAKLITQRKFDNLTKAERGGLSELDKAGFIKRQLVETRQITKHVAQILDSRMNTKYDENDKLIREVKVITLKSKLVSDFRKDFQFYKVREINNYHHAHDAYLNAVVGTALIKKYPKLESEFVYGDYKVYDVRKMIAKSEQEIGKATAKYFFYSNIMNFFKTEITLANGEIRKRPLIETNGETGEIVWDKGRDFATVRKVLSMPQVNIVKKTEVQTGGFSKESILPKRNSDKLIARKKDWDPKKYGGFDSPTVAYSVLVVAKVEKGKSKKLKSVKELLGITIMERSSFEKNPIDFLEAKGYKEVKKDLIIKLPKYSLFELENGRKRMLASAGELQKGNELALPSKYVNFLYLASHYEKLKGSPEDNEQKQLFVEQHKHYLDEIIEQISEFSKRVILADANLDKVLSAYNKHRDKPIREQAENIIHLFTLTNLGAPAAFKYFDTTIDRKRYTSTKEVLDATLIHQSITGLYETRIDLSQLGGDGGGGGGSSPAPGGTLNIEDEYRLHETSKEPDVSLGSTWLSDFPQAWAETGGMGLAVRQAPLIIPLKATSTPVSIKQYPMSQEARLGIKPHIQRLLDQGILVPCQSPWNTPLLPVKKPGTNDYRPVQDLREVNKRVEDIHPTVPNPYNLLSGLPPSHQWYTVLDLKDAFFCLRLHPTSQPLFAFEWRDPEMGISGQLTWTRLPQGFKNSPTLFNEALHRDLADFRIQHPDLILLQYVDDLLLAATSELDCQQGTRALLQTLGNLGYRASAKKAQICQKQVKYLGYLLKEGQRWLTEARKETVMGQPTPKTPRQLREFLGKAGFCRLFIPGFAEMAAPLYPLTKPGTLFNWGPDQQKAYQEIKQALLTAPALGLPDLTKPFELFVDEKQGYAKGVLTQKLGPWRRPVAYLSKKLDPVAAGWPPCLRMVAAIAVLTKDAGKLTMGQPLVILAPHAVEALVKQPPDRWLSNARMTHYQALLLDTDRVQFGPVVALNPATLLPLPEEGLQHNCLDILAEAHGTRPDLTDQPLPDADHTWYTDGSSLLQEGQRKAGAAVTTETEVIWAKALPAGTSAQRAELIALTQALKMAEGKKLNVYTDSRYAFATAHIHGEIYRRRGWLTSEGKEIKNKDEILALLKALFLPKRLSIIHCPGHQKGHSAEARGNRMADQAARKAAITETPDTSTLLIENSSPSGGSKRTADGSEFEAGKRTADGSEFEKRTADGSEFESPKKKAKVE

SEQ ID NO: 2665 - protein, 2117 aa, synthetic construct
MPAAKRVKLDGGDKKYSIGLDIGTNSVGWAVITDEYKVPSKKFKVLGNTDRHSIKKNLIGALLFDSGETAEATRLKRTARRRYTRRKNRICYLQEIFSNEMAKVDDSFFHRLEESFLVEEDKKHERHPIFGNIVDEVAYHEKYPTIYHLRKKLVDSTDKADLRLIYLALAHMIKFRGHFLIEGDLNPDNSDVDKLFIQLVQTYNQLFEENPINASGVDAKAILSARLSKSRRLENLIAQLPGEKKNGLFGNLIALSLGLTPNFKSNFDLAEDAKLQLSKDTYDDDLDNLLAQIGDQYADLFLAAKNLSDAILLSDILRVNTEITKAPLSASMIKRYDEHHQDLTLLKALVRQQLPEKYKEIFFDQSKNGYAGYIDGGASQEEFYKFIKPILEKMDGTEELLVKLNREDLLRKQRTFDNGSIPHQIHLGELHAILRRQEDFYPFLKDNREKIEKILTFRIPYYVGPLARGNSRFAWMTRKSEETITPWNFEEVVDKGASAQSFIERMTNFDKNLPNEKVLPKHSLLYEYFTVYNELTKVKYVTEGMRKPAFLSGEQKKAIVDLLFKTNRKVTVKQLKEDYFKKIECFDSVEISGVEDRFNASLGTYHDLLKIIKDKDFLDNEENEDILEDIVLTLTLFEDREMIEERLKTYAHLFDDKVMKQLKRRRYTGWGRLSRKLINGIRDKQSGKTILDFLKSDGFANRNFMQLIHDDSLTFKEDIQKAQVSGQGDSLHEHIANLAGSPAIKKGILQTVKVVDELVKVMGRHKPENIVIEMARENQTTQKGQKNSRERMKRIEEGIKELGSQILKEHPVENTQLQNEKLYLYYLQNGRDMYVDQELDINRLSDYDVDHIVPQSFLKDDSIDNKVLTRSDKARGKSDNVPSEEVVKKMKNYWRQLLNAKLITQRKFDNLTKAERGGLSELDKAGFIKRQLVETRQITKHVAQILDSRMNTKYDENDKLIREVKVITLKSKLVSDFRKDFQFYKVREINNYHHAHDAYLNAVVGTALIKKYPKLESEFVYGDYKVYDVRKMIAKSEQEIGKATAKYFFYSNIMNFFKTEITLANGEIRKRPLIETNGETGEIVWDKGRDFATVRKVLSMPQVNIVKKTEVQTGGFSKESILPKRNSDKLIARKKDWDPKKYGGFDSPTVAYSVLVVAKVEKGKSKKLKSVKELLGITIMERSSFEKNPIDFLEAKGYKEVKKDLIIKLPKYSLFELENGRKRMLASAGELQKGNELALPSKYVNFLYLASHYEKLKGSPEDNEQKQLFVEQHKHYLDEIIEQISEFSKRVILADANLDKVLSAYNKHRDKPIREQAENIIHLFTLTNLGAPAAFKYFDTTIDRKRYTSTKEVLDATLIHQSITGLYETRIDLSQLGGDGGGSSGSSGSSGSSGGTLNIEDEYRLHETSKEPDVSLGSTWLSDFPQAWAETGGMGLAVRQAPLIIPLKATSTPVSIKQYPMSQEARLGIKPHIQRLLDQGILVPCQSPWNTPLLPVKKPGTNDYRPVQDLREVNKRVEDIHPTVPNPYNLLSGLPPSHQWYTVLDLKDAFFCLRLHPTSQPLFAFEWRDPEMGISGQLTWTRLPQGFKNSPTLFNEALHRDLADFRIQHPDLILLQYVDDLLLAATSELDCQQGTRALLQTLGNLGYRASAKKAQICQKQVKYLGYLLKEGQRWLTEARKETVMGQPTPKTPRQLREFLGKAGFCRLFIPGFAEMAAPLYPLTKPGTLFNWGPDQQKAYQEIKQALLTAPALGLPDLTKPFELFVDEKQGYAKGVLTQKLGPWRRPVAYLSKKLDPVAAGWPPCLRMVAAIAVLTKDAGKLTMGQPLVILAPHAVEALVKQPPDRWLSNARMTHYQALLLDTDRVQFGPVVALNPATLLPLPEEGLQHNCLDILAEAHGTRPDLTDQPLPDADHTWYTDGSSLLQEGQRKAGAAVTTETEVIWAKALPAGTSAQRAELIALTQALKMAEGKKLNVYTDSRYAFATAHIHGEIYRRRGWLTSEGKEIKNKDEILALLKALFLPKRLSIIHCPGHQKGHSAEARGNRMADQAARKAAITETPDTSTLLIENSSPSGGSKRTADGSEFEAGKRTADGSEFEKRTADGSEFESPKKKAKVE

SEQ ID NO: 2666 - protein, 2116 aa, synthetic construct
MPAAKRVKLDGGDKKYSIGLDIGTNSVGWAVITDEYKVPSKKFKVLGNTDRHSIKKNLIGALLFDSGETAEATRLKRTARRRYTRRKNRICYLQEIFSNEMAKVDDSFFHRLEESFLVEEDKKHERHPIFGNIVDEVAYHEKYPTIYHLRKKLVDSTDKADLRLIYLALAHMIKFRGHFLIEGDLNPDNSDVDKLFIQLVQTYNQLFEENPINASGVDAKAILSARLSKSRRLENLIAQLPGEKKNGLFGNLIALSLGLTPNFKSNFDLAEDAKLQLSKDTYDDDLDNLLAQIGDQYADLFLAAKNLSDAILLSDILRVNTEITKAPLSASMIKRYDEHHQDLTLLKALVRQQLPEKYKEIFFDQSKNGYAGYIDGGASQEEFYKFIKPILEKMDGTEELLVKLNREDLLRKQRTFDNGSIPHQIHLGELHAILRRQEDFYPFLKDNREKIEKILTFRIPYYVGPLARGNSRFAWMTRKSEETITPWNFEEVVDKGASAQSFIERMTNFDKNLPNEKVLPKHSLLYEYFTVYNELTKVKYVTEGMRKPAFLSGEQKKAIVDLLFKTNRKVTVKQLKEDYFKKIECFDSVEISGVEDRFNASLGTYHDLLKIIKDKDFLDNEENEDILEDIVLTLTLFEDREMIEERLKTYAHLFDDKVMKQLKRRRYTGWGRLSRKLINGIRDKQSGKTILDFLKSDGFANRNFMQLIHDDSLTFKEDIQKAQVSGQGDSLHEHIANLAGSPAIKKGILQTVKVVDELVKVMGRHKPENIVIEMARENQTTQKGQKNSRERMKRIEEGIKELGSQILKEHPVENTQLQNEKLYLYYLQNGRDMYVDQELDINRLSDYDVDHIVPQSFLKDDSIDNKVLTRSDKARGKSDNVPSEEVVKKMKNYWRQLLNAKLITQRKFDNLTKAERGGLSELDKAGFIKRQLVETRQITKHVAQILDSRMNTKYDENDKLIREVKVITLKSKLVSDFRKDFQFYKVREINNYHHAHDAYLNAVVGTALIKKYPKLESEFVYGDYKVYDVRKMIAKSEQEIGKATAKYFFYSNIMNFFKTEITLANGEIRKRPLIETNGETGEIVWDKGRDFATVRKVLSMPQVNIVKKTEVQTGGFSKESILPKRNSDKLIARKKDWDPKKYGGFDSPTVAYSVLVVAKVEKGKSKKLKSVKELLGITIMERSSFEKNPIDFLEAKGYKEVKKDLIIKLPKYSLFELENGRKRMLASAGELQKGNELALPSKYVNFLYLASHYEKLKGSPEDNEQKQLFVEQHKHYLDEIIEQISEFSKRVILADANLDKVLSAYNKHRDKPIREQAENIIHLFTLTNLGAPAAFKYFDTTIDRKRYTSTKEVLDATLIHQSITGLYETRIDLSQLGGDGGEAAAKGGSGSSGGTLNIEDEYRLHETSKEPDVSLGSTWLSDFPQAWAETGGMGLAVRQAPLIIPLKATSTPVSIKQYPMSQEARLGIKPHIQRLLDQGILVPCQSPWNTPLLPVKKPGTNDYRPVQDLREVNKRVEDIHPTVPNPYNLLSGLPPSHQWYTVLDLKDAFFCLRLHPTSQPLFAFEWRDPEMGISGQLTWTRLPQGFKNSPTLFNEALHRDLADFRIQHPDLILLQYVDDLLLAATSELDCQQGTRALLQTLGNLGYRASAKKAQICQKQVKYLGYLLKEGQRWLTEARKETVMGQPTPKTPRQLREFLGKAGFCRLFIPGFAEMAAPLYPLTKPGTLFNWGPDQQKAYQEIKQALLTAPALGLPDLTKPFELFVDEKQGYAKGVLTQKLGPWRRPVAYLSKKLDPVAAGWPPCLRMVAAIAVLTKDAGKLTMGQPLVILAPHAVEALVKQPPDRWLSNARMTHYQALLLDTDRVQFGPVVALNPATLLPLPEEGLQHNCLDILAEAHGTRPDLTDQPLPDADHTWYTDGSSLLQEGQRKAGAAVTTETEVIWAKALPAGTSAQRAELIALTQALKMAEGKKLNVYTDSRYAFATAHIHGEIYRRRGWLTSEGKEIKNKDEILALLKALFLPKRLSIIHCPGHQKGHSAEARGNRMADQAARKAAITETPDTSTLLIENSSPSGGSKRTADGSEFEAGKRTADGSEFEKRTADGSEFESPKKKAKVE

SEQ ID NO: 2667 - protein, 2114 aa, synthetic construct
MPAAKRVKLDGGDKKYSIGLDIGTNSVGWAVITDEYKVPSKKFKVLGNTDRHSIKKNLIGALLFDSGETAEATRLKRTARRRYTRRKNRICYLQEIFSNEMAKVDDSFFHRLEESFLVEEDKKHERHPIFGNIVDEVAYHEKYPTIYHLRKKLVDSTDKADLRLIYLALAHMIKFRGHFLIEGDLNPDNSDVDKLFIQLVQTYNQLFEENPINASGVDAKAILSARLSKSRRLENLIAQLPGEKKNGLFGNLIALSLGLTPNFKSNFDLAEDAKLQLSKDTYDDDLDNLLAQIGDQYADLFLAAKNLSDAILLSDILRVNTEITKAPLSASMIKRYDEHHQDLTLLKALVRQQLPEKYKEIFFDQSKNGYAGYIDGGASQEEFYKFIKPILEKMDGTEELLVKLNREDLLRKQRTFDNGSIPHQIHLGELHAILRRQEDFYPFLKDNREKIEKILTFRIPYYVGPLARGNSRFAWMTRKSEETITPWNFEEVVDKGASAQSFIERMTNFDKNLPNEKVLPKHSLLYEYFTVYNELTKVKYVTEGMRKPAFLSGEQKKAIVDLLFKTNRKVTVKQLKEDYFKKIECFDSVEISGVEDRFNASLGTYHDLLKIIKDKDFLDNEENEDILEDIVLTLTLFEDREMIEERLKTYAHLFDDKVMKQLKRRRYTGWGRLSRKLINGIRDKQSGKTILDFLKSDGFANRNFMQLIHDDSLTFKEDIQKAQVSGQGDSLHEHIANLAGSPAIKKGILQTVKVVDELVKVMGRHKPENIVIEMARENQTTQKGQKNSRERMKRIEEGIKELGSQILKEHPVENTQLQNEKLYLYYLQNGRDMYVDQELDINRLSDYDVDHIVPQSFLKDDSIDNKVLTRSDKARGKSDNVPSEEVVKKMKNYWRQLLNAKLITQRKFDNLTKAERGGLSELDKAGFIKRQLVETRQITKHVAQILDSRMNTKYDENDKLIREVKVITLKSKLVSDFRKDFQFYKVREINNYHHAHDAYLNAVVGTALIKKYPKLESEFVYGDYKVYDVRKMIAKSEQEIGKATAKYFFYSNIMNFFKTEITLANGEIRKRPLIETNGETGEIVWDKGRDFATVRKVLSMPQVNIVKKTEVQTGGFSKESILPKRNSDKLIARKKDWDPKKYGGFDSPTVAYSVLVVAKVEKGKSKKLKSVKELLGITIMERSSFEKNPIDFLEAKGYKEVKKDLIIKLPKYSLFELENGRKRMLASAGELQKGNELALPSKYVNFLYLASHYEKLKGSPEDNEQKQLFVEQHKHYLDEIIEQISEFSKRVILADANLDKVLSAYNKHRDKPIREQAENIIHLFTLTNLGAPAAFKYFDTTIDRKRYTSTKEVLDATLIHQSITGLYETRIDLSQLGGDGGGGSPAPGGGGGTLNIEDEYRLHETSKEPDVSLGSTWLSDFPQAWAETGGMGLAVRQAPLIIPLKATSTPVSIKQYPMSQEARLGIKPHIQRLLDQGILVPCQSPWNTPLLPVKKPGTNDYRPVQDLREVNKRVEDIHPTVPNPYNLLSGLPPSHQWYTVLDLKDAFFCLRLHPTSQPLFAFEWRDPEMGISGQLTWTRLPQGFKNSPTLFNEALHRDLADFRIQHPDLILLQYVDDLLLAATSELDCQQGTRALLQTLGNLGYRASAKKAQICQKQVKYLGYLLKEGQRWLTEARKETVMGQPTPKTPRQLREFLGKAGFCRLFIPGFAEMAAPLYPLTKPGTLFNWGPDQQKAYQEIKQALLTAPALGLPDLTKPFELFVDEKQGYAKGVLTQKLGPWRRPVAYLSKKLDPVAAGWPPCLRMVAAIAVLTKDAGKLTMGQPLVILAPHAVEALVKQPPDRWLSNARMTHYQALLLDTDRVQFGPVVALNPATLLPLPEEGLQHNCLDILAEAHGTRPDLTDQPLPDADHTWYTDGSSLLQEGQRKAGAAVTTETEVIWAKALPAGTSAQRAELIALTQALKMAEGKKLNVYTDSRYAFATAHIHGEIYRRRGWLTSEGKEIKNKDEILALLKALFLPKRLSIIHCPGHQKGHSAEARGNRMADQAARKAAITETPDTSTLLIENSSPSGGSKRTADGSEFEAGKRTADGSEFEKRTADGSEFESPKKKAKVE

SEQ ID NO: 2668 - protein, 2116 aa, synthetic construct
MPAAKRVKLDGGDKKYSIGLDIGTNSVGWAVITDEYKVPSKKFKVLGNTDRHSIKKNLIGALLFDSGETAEATRLKRTARRRYTRRKNRICYLQEIFSNEMAKVDDSFFHRLEESFLVEEDKKHERHPIFGNIVDEVAYHEKYPTIYHLRKKLVDSTDKADLRLIYLALAHMIKFRGHFLIEGDLNPDNSDVDKLFIQLVQTYNQLFEENPINASGVDAKAILSARLSKSRRLENLIAQLPGEKKNGLFGNLIALSLGLTPNFKSNFDLAEDAKLQLSKDTYDDDLDNLLAQIGDQYADLFLAAKNLSDAILLSDILRVNTEITKAPLSASMIKRYDEHHQDLTLLKALVRQQLPEKYKEIFFDQSKNGYAGYIDGGASQEEFYKFIKPILEKMDGTEELLVKLNREDLLRKQRTFDNGSIPHQIHLGELHAILRRQEDFYPFLKDNREKIEKILTFRIPYYVGPLARGNSRFAWMTRKSEETITPWNFEEVVDKGASAQSFIERMTNFDKNLPNEKVLPKHSLLYEYFTVYNELTKVKYVTEGMRKPAFLSGEQKKAIVDLLFKTNRKVTVKQLKEDYFKKIECFDSVEISGVEDRFNASLGTYHDLLKIIKDKDFLDNEENEDILEDIVLTLTLFEDREMIEERLKTYAHLFDDKVMKQLKRRRYTGWGRLSRKLINGIRDKQSGKTILDFLKSDGFANRNFMQLIHDDSLTFKEDIQKAQVSGQGDSLHEHIANLAGSPAIKKGILQTVKVVDELVKVMGRHKPENIVIEMARENQTTQKGQKNSRERMKRIEEGIKELGSQILKEHPVENTQLQNEKLYLYYLQNGRDMYVDQELDINRLSDYDVDHIVPQSFLKDDSIDNKVLTRSDKARGKSDNVPSEEVVKKMKNYWRQLLNAKLITQRKFDNLTKAERGGLSELDKAGFIKRQLVETRQITKHVAQILDSRMNTKYDENDKLIREVKVITLKSKLVSDFRKDFQFYKVREINNYHHAHDAYLNAVVGTALIKKYPKLESEFVYGDYKVYDVRKMIAKSEQEIGKATAKYFFYSNIMNFFKTEITLANGEIRKRPLIETNGETGEIVWDKGRDFATVRKVLSMPQVNIVKKTEVQTGGFSKESILPKRNSDKLIARKKDWDPKKYGGFDSPTVAYSVLVVAKVEKGKSKKLKSVKELLGITIMERSSFEKNPIDFLEAKGYKEVKKDLIIKLPKYSLFELENGRKRMLASAGELQKGNELALPSKYVNFLYLASHYEKLKGSPEDNEQKQLFVEQHKHYLDEIIEQISEFSKRVILADANLDKVLSAYNKHRDKPIREQAENIIHLFTLTNLGAPAAFKYFDTTIDRKRYTSTKEVLDATLIHQSITGLYETRIDLSQLGGDGGPAPEAAAKGGGGGTLNIEDEYRLHETSKEPDVSLGSTWLSDFPQAWAETGGMGLAVRQAPLIIPLKATSTPVSIKQYPMSQEARLGIKPHIQRLLDQGILVPCQSPWNTPLLPVKKPGTNDYRPVQDLREVNKRVEDIHPTVPNPYNLLSGLPPSHQWYTVLDLKDAFFCLRLHPTSQPLFAFEWRDPEMGISGQLTWTRLPQGFKNSPTLFNEALHRDLADFRIQHPDLILLQYVDDLLLAATSELDCQQGTRALLQTLGNLGYRASAKKAQICQKQVKYLGYLLKEGQRWLTEARKETVMGQPTPKTPRQLREFLGKAGFCRLFIPGFAEMAAPLYPLTKPGTLFNWGPDQQKAYQEIKQALLTAPALGLPDLTKPFELFVDEKQGYAKGVLTQKLGPWRRPVAYLSKKLDPVAAGWPPCLRMVAAIAVLTKDAGKLTMGQPLVILAPHAVEALVKQPPDRWLSNARMTHYQALLLDTDRVQFGPVVALNPATLLPLPEEGLQHNCLDILAEAHGTRPDLTDQPLPDADHTWYTDGSSLLQEGQRKAGAAVTTETEVIWAKALPAGTSAQRAELIALTQALKMAEGKKLNVYTDSRYAFATAHIHGEIYRRRGWLTSEGKEIKNKDEILALLKALFLPKRLSIIHCPGHQKGHSAEARGNRMADQAARKAAITETPDTSTLLIENSSPSGGSKRTADGSEFEAGKRTADGSEFEKRTADGSEFESPKKKAKVE

SEQ ID NO: 2669 - protein, 2120 aa, synthetic construct
MPAAKRVKLDGGDKKYSIGLDIGTNSVGWAVITDEYKVPSKKFKVLGNTDRHSIKKNLIGALLFDSGETAEATRLKRTARRRYTRRKNRICYLQEIFSNEMAKVDDSFFHRLEESFLVEEDKKHERHPIFGNIVDEVAYHEKYPTIYHLRKKLVDSTDKADLRLIYLALAHMIKFRGHFLIEGDLNPDNSDVDKLFIQLVQTYNQLFEENPINASGVDAKAILSARLSKSRRLENLIAQLPGEKKNGLFGNLIALSLGLTPNFKSNFDLAEDAKLQLSKDTYDDDLDNLLAQIGDQYADLFLAAKNLSDAILLSDILRVNTEITKAPLSASMIKRYDEHHQDLTLLKALVRQQLPEKYKEIFFDQSKNGYAGYIDGGASQEEFYKFIKPILEKMDGTEELLVKLNREDLLRKQRTFDNGSIPHQIHLGELHAILRRQEDFYPFLKDNREKIEKILTFRIPYYVGPLARGNSRFAWMTRKSEETITPWNFEEVVDKGASAQSFIERMTNFDKNLPNEKVLPKHSLLYEYFTVYNELTKVKYVTEGMRKPAFLSGEQKKAIVDLLFKTNRKVTVKQLKEDYFKKIECFDSVEISGVEDRFNASLGTYHDLLKIIKDKDFLDNEENEDILEDIVLTLTLFEDREMIEERLKTYAHLFDDKVMKQLKRRRYTGWGRLSRKLINGIRDKQSGKTILDFLKSDGFANRNFMQLIHDDSLTFKEDIQKAQVSGQGDSLHEHIANLAGSPAIKKGILQTVKVVDELVKVMGRHKPENIVIEMARENQTTQKGQKNSRERMKRIEEGIKELGSQILKEHPVENTQLQNEKLYLYYLQNGRDMYVDQELDINRLSDYDVDHIVPQSFLKDDSIDNKVLTRSDKARGKSDNVPSEEVVKKMKNYWRQLLNAKLITQRKFDNLTKAERGGLSELDKAGFIKRQLVETRQITKHVAQILDSRMNTKYDENDKLIREVKVITLKSKLVSDFRKDFQFYKVREINNYHHAHDAYLNAVVGTALIKKYPKLESEFVYGDYKVYDVRKMIAKSEQEIGKATAKYFFYSNIMNFFKTEITLANGEIRKRPLIETNGETGEIVWDKGRDFATVRKVLSMPQVNIVKKTEVQTGGFSKESILPKRNSDKLIARKKDWDPKKYGGFDSPTVAYSVLVVAKVEKGKSKKLKSVKELLGITIMERSSFEKNPIDFLEAKGYKEVKKDLIIKLPKYSLFELENGRKRMLASAGELQKGNELALPSKYVNFLYLASHYEKLKGSPEDNEQKQLFVEQHKHYLDEIIEQISEFSKRVILADANLDKVLSAYNKHRDKPIREQAENIIHLFTLTNLGAPAAFKYFDTTIDRKRYTSTKEVLDATLIHQSITGLYETRIDLSQLGGDGGGSSGSSGSSGSSGSSGGTLNIEDEYRLHETSKEPDVSLGSTWLSDFPQAWAETGGMGLAVRQAPLIIPLKATSTPVSIKQYPMSQEARLGIKPHIQRLLDQGILVPCQSPWNTPLLPVKKPGTNDYRPVQDLREVNKRVEDIHPTVPNPYNLLSGLPPSHQWYTVLDLKDAFFCLRLHPTSQPLFAFEWRDPEMGISGQLTWTRLPQGFKNSPTLFNEALHRDLADFRIQHPDLILLQYVDDLLLAATSELDCQQGTRALLQTLGNLGYRASAKKAQICQKQVKYLGYLLKEGQRWLTEARKETVMGQPTPKTPRQLREFLGKAGFCRLFIPGFAEMAAPLYPLTKPGTLFNWGPDQQKAYQEIKQALLTAPALGLPDLTKPFELFVDEKQGYAKGVLTQKLGPWRRPVAYLSKKLDPVAAGWPPCLRMVAAIAVLTKDAGKLTMGQPLVILAPHAVEALVKQPPDRWLSNARMTHYQALLLDTDRVQFGPVVALNPATLLPLPEEGLQHNCLDILAEAHGTRPDLTDQPLPDADHTWYTDGSSLLQEGQRKAGAAVTTETEVIWAKALPAGTSAQRAELIALTQALKMAEGKKLNVYTDSRYAFATAHIHGEIYRRRGWLTSEGKEIKNKDEILALLKALFLPKRLSIIHCPGHQKGHSAEARGNRMADQAARKAAITETPDTSTLLIENSSPSGGSKRTADGSEFEAGKRTADGSEFEKRTADGSEFESPKKKAKVE

SEQ ID NO: 2670 - protein, 2114 aa, synthetic construct
MPAAKRVKLDGGDKKYSIGLDIGTNSVGWAVITDEYKVPSKKFKVLGNTDRHSIKKNLIGALLFDSGETAEATRLKRTARRRYTRRKNRICYLQEIFSNEMAKVDDSFFHRLEESFLVEEDKKHERHPIFGNIVDEVAYHEKYPTIYHLRKKLVDSTDKADLRLIYLALAHMIKFRGHFLIEGDLNPDNSDVDKLFIQLVQTYNQLFEENPINASGVDAKAILSARLSKSRRLENLIAQLPGEKKNGLFGNLIALSLGLTPNFKSNFDLAEDAKLQLSKDTYDDDLDNLLAQIGDQYADLFLAAKNLSDAILLSDILRVNTEITKAPLSASMIKRYDEHHQDLTLLKALVRQQLPEKYKEIFFDQSKNGYAGYIDGGASQEEFYKFIKPILEKMDGTEELLVKLNREDLLRKQRTFDNGSIPHQIHLGELHAILRRQEDFYPFLKDNREKIEKILTFRIPYYVGPLARGNSRFAWMTRKSEETITPWNFEEVVDKGASAQSFIERMTNFDKNLPNEKVLPKHSLLYEYFTVYNELTKVKYVTEGMRKPAFLSGEQKKAIVDLLFKTNRKVTVKQLKEDYFKKIECFDSVEISGVEDRFNASLGTYHDLLKIIKDKDFLDNEENEDILEDIVLTLTLFEDREMIEERLKTYAHLFDDKVMKQLKRRRYTGWGRLSRKLINGIRDKQSGKTILDFLKSDGFANRNFMQLIHDDSLTFKEDIQKAQVSGQGDSLHEHIANLAGSPAIKKGILQTVKVVDELVKVMGRHKPENIVIEMARENQTTQKGQKNSRERMKRIEEGIKELGSQILKEHPVENTQLQNEKLYLYYLQNGRDMYVDQELDINRLSDYDVDHIVPQSFLKDDSIDNKVLTRSDKARGKSDNVPSEEVVKKMKNYWRQLLNAKLITQRKFDNLTKAERGGLSELDKAGFIKRQLVETRQITKHVAQILDSRMNTKYDENDKLIREVKVITLKSKLVSDFRKDFQFYKVREINNYHHAHDAYLNAVVGTALIKKYPKLESEFVYGDYKVYDVRKMIAKSEQEIGKATAKYFFYSNIMNFFKTEITLANGEIRKRPLIETNGETGEIVWDKGRDFATVRKVLSMPQVNIVKKTEVQTGGFSKESILPKRNSDKLIARKKDWDPKKYGGFDSPTVAYSVLVVAKVEKGKSKKLKSVKELLGITIMERSSFEKNPIDFLEAKGYKEVKKDLIIKLPKYSLFELENGRKRMLASAGELQKGNELALPSKYVNFLYLASHYEKLKGSPEDNEQKQLFVEQHKHYLDEIIEQISEFSKRVILADANLDKVLSAYNKHRDKPIREQAENIIHLFTLTNLGAPAAFKYFDTTIDRKRYTSTKEVLDATLIHQSITGLYETRIDLSQLGGDGGGGGGGSGSSGGTLNIEDEYRLHETSKEPDVSLGSTWLSDFPQAWAETGGMGLAVRQAPLIIPLKATSTPVSIKQYPMSQEARLGIKPHIQRLLDQGILVPCQSPWNTPLLPVKKPGTNDYRPVQDLREVNKRVEDIHPTVPNPYNLLSGLPPSHQWYTVLDLKDAFFCLRLHPTSQPLFAFEWRDPEMGISGQLTWTRLPQGFKNSPTLFNEALHRDLADFRIQHPDLILLQYVDDLLLAATSELDCQQGTRALLQTLGNLGYRASAKKAQICQKQVKYLGYLLKEGQRWLTEARKETVMGQPTPKTPRQLREFLGKAGFCRLFIPGFAEMAAPLYPLTKPGTLFNWGPDQQKAYQEIKQALLTAPALGLPDLTKPFELFVDEKQGYAKGVLTQKLGPWRRPVAYLSKKLDPVAAGWPPCLRMVAAIAVLTKDAGKLTMGQPLVILAPHAVEALVKQPPDRWLSNARMTHYQALLLDTDRVQFGPVVALNPATLLPLPEEGLQHNCLDILAEAHGTRPDLTDQPLPDADHTWYTDGSSLLQEGQRKAGAAVTTETEVIWAKALPAGTSAQRAELIALTQALKMAEGKKLNVYTDSRYAFATAHIHGEIYRRRGWLTSEGKEIKNKDEILALLKALFLPKRLSIIHCPGHQKGHSAEARGNRMADQAARKAAITETPDTSTLLIENSSPSGGSKRTADGSEFEAGKRTADGSEFEKRTADGSEFESPKKKAKVE

SEQ ID NO: 2671 - protein, 2111 aa, synthetic construct
MPAAKRVKLDGGDKKYSIGLDIGTNSVGWAVITDEYKVPSKKFKVLGNTDRHSIKKNLIGALLFDSGETAEATRLKRTARRRYTRRKNRICYLQEIFSNEMAKVDDSFFHRLEESFLVEEDKKHERHPIFGNIVDEVAYHEKYPTIYHLRKKLVDSTDKADLRLIYLALAHMIKFRGHFLIEGDLNPDNSDVDKLFIQLVQTYNQLFEENPINASGVDAKAILSARLSKSRRLENLIAQLPGEKKNGLFGNLIALSLGLTPNFKSNFDLAEDAKLQLSKDTYDDDLDNLLAQIGDQYADLFLAAKNLSDAILLSDILRVNTEITKAPLSASMIKRYDEHHQDLTLLKALVRQQLPEKYKEIFFDQSKNGYAGYIDGGASQEEFYKFIKPILEKMDGTEELLVKLNREDLLRKQRTFDNGSIPHQIHLGELHAILRRQEDFYPFLKDNREKIEKILTFRIPYYVGPLARGNSRFAWMTRKSEETITPWNFEEVVDKGASAQSFIERMTNFDKNLPNEKVLPKHSLLYEYFTVYNELTKVKYVTEGMRKPAFLSGEQKKAIVDLLFKTNRKVTVKQLKEDYFKKIECFDSVEISGVEDRFNASLGTYHDLLKIIKDKDFLDNEENEDILEDIVLTLTLFEDREMIEERLKTYAHLFDDKVMKQLKRRRYTGWGRLSRKLINGIRDKQSGKTILDFLKSDGFANRNFMQLIHDDSLTFKEDIQKAQVSGQGDSLHEHIANLAGSPAIKKGILQTVKVVDELVKVMGRHKPENIVIEMARENQTTQKGQKNSRERMKRIEEGIKELGSQILKEHPVENTQLQNEKLYLYYLQNGRDMYVDQELDINRLSDYDVDHIVPQSFLKDDSIDNKVLTRSDKARGKSDNVPSEEVVKKMKNYWRQLLNAKLITQRKFDNLTKAERGGLSELDKAGFIKRQLVETRQITKHVAQILDSRMNTKYDENDKLIREVKVITLKSKLVSDFRKDFQFYKVREINNYHHAHDAYLNAVVGTALIKKYPKLESEFVYGDYKVYDVRKMIAKSEQEIGKATAKYFFYSNIMNFFKTEITLANGEIRKRPLIETNGETGEIVWDKGRDFATVRKVLSMPQVNIVKKTEVQTGGFSKESILPKRNSDKLIARKKDWDPKKYGGFDSPTVAYSVLVVAKVEKGKSKKLKSVKELLGITIMERSSFEKNPIDFLEAKGYKEVKKDLIIKLPKYSLFELENGRKRMLASAGELQKGNELALPSKYVNFLYLASHYEKLKGSPEDNEQKQLFVEQHKHYLDEIIEQISEFSKRVILADANLDKVLSAYNKHRDKPIREQAENIIHLFTLTNLGAPAAFKYFDTTIDRKRYTSTKEVLDATLIHQSITGLYETRIDLSQLGGDGGGGSPAPGGTLNIEDEYRLHETSKEPDVSLGSTWLSDFPQAWAETGGMGLAVRQAPLIIPLKATSTPVSIKQYPMSQEARLGIKPHIQRLLDQGILVPCQSPWNTPLLPVKKPGTNDYRPVQDLREVNKRVEDIHPTVPNPYNLLSGLPPSHQWYTVLDLKDAFFCLRLHPTSQPLFAFEWRDPEMGISGQLTWTRLPQGFKNSPTLFNEALHRDLADFRIQHPDLILLQYVDDLLLAATSELDCQQGTRALLQTLGNLGYRASAKKAQICQKQVKYLGYLLKEGQRWLTEARKETVMGQPTPKTPRQLREFLGKAGFCRLFIPGFAEMAAPLYPLTKPGTLFNWGPDQQKAYQEIKQALLTAPALGLPDLTKPFELFVDEKQGYAKGVLTQKLGPWRRPVAYLSKKLDPVAAGWPPCLRMVAAIAVLTKDAGKLTMGQPLVILAPHAVEALVKQPPDRWLSNARMTHYQALLLDTDRVQFGPVVALNPATLLPLPEEGLQHNCLDILAEAHGTRPDLTDQPLPDADHTWYTDGSSLLQEGQRKAGAAVTTETEVIWAKALPAGTSAQRAELIALTQALKMAEGKKLNVYTDSRYAFATAHIHGEIYRRRGWLTSEGKEIKNKDEILALLKALFLPKRLSIIHCPGHQKGHSAEARGNRMADQAARKAAITETPDTSTLLIENSSPSGGSKRTADGSEFEAGKRTADGSEFEKRTADGSEFESPKKKAKVE

SEQ ID NO: 2672 - protein, 2111 aa, synthetic construct
MPAAKRVKLDGGDKKYSIGLDIGTNSVGWAVITDEYKVPSKKFKVLGNTDRHSIKKNLIGALLFDSGETAEATRLKRTARRRYTRRKNRICYLQEIFSNEMAKVDDSFFHRLEESFLVEEDKKHERHPIFGNIVDEVAYHEKYPTIYHLRKKLVDSTDKADLRLIYLALAHMIKFRGHFLIEGDLNPDNSDVDKLFIQLVQTYNQLFEENPINASGVDAKAILSARLSKSRRLENLIAQLPGEKKNGLFGNLIALSLGLTPNFKSNFDLAEDAKLQLSKDTYDDDLDNLLAQIGDQYADLFLAAKNLSDAILLSDILRVNTEITKAPLSASMIKRYDEHHQDLTLLKALVRQQLPEKYKEIFFDQSKNGYAGYIDGGASQEEFYKFIKPILEKMDGTEELLVKLNREDLLRKQRTFDNGSIPHQIHLGELHAILRRQEDFYPFLKDNREKIEKILTFRIPYYVGPLARGNSRFAWMTRKSEETITPWNFEEVVDKGASAQSFIERMTNFDKNLPNEKVLPKHSLLYEYFTVYNELTKVKYVTEGMRKPAFLSGEQKKAIVDLLFKTNRKVTVKQLKEDYFKKIECFDSVEISGVEDRFNASLGTYHDLLKIIKDKDFLDNEENEDILEDIVLTLTLFEDREMIEERLKTYAHLFDDKVMKQLKRRRYTGWGRLSRKLINGIRDKQSGKTILDFLKSDGFANRNFMQLIHDDSLTFKEDIQKAQVSGQGDSLHEHIANLAGSPAIKKGILQTVKVVDELVKVMGRHKPENIVIEMARENQTTQKGQKNSRERMKRIEEGIKELGSQILKEHPVENTQLQNEKLYLYYLQNGRDMYVDQELDINRLSDYDVDHIVPQSFLKDDSIDNKVLTRSDKARGKSDNVPSEEVVKKMKNYWRQLLNAKLITQRKFDNLTKAERGGLSELDKAGFIKRQLVETRQITKHVAQILDSRMNTKYDENDKLIREVKVITLKSKLVSDFRKDFQFYKVREINNYHHAHDAYLNAVVGTALIKKYPKLESEFVYGDYKVYDVRKMIAKSEQEIGKATAKYFFYSNIMNFFKTEITLANGEIRKRPLIETNGETGEIVWDKGRDFATVRKVLSMPQVNIVKKTEVQTGGFSKESILPKRNSDKLIARKKDWDPKKYGGFDSPTVAYSVLVVAKVEKGKSKKLKSVKELLGITIMERSSFEKNPIDFLEAKGYKEVKKDLIIKLPKYSLFELENGRKRMLASAGELQKGNELALPSKYVNFLYLASHYEKLKGSPEDNEQKQLFVEQHKHYLDEIIEQISEFSKRVILADANLDKVLSAYNKHRDKPIREQAENIIHLFTLTNLGAPAAFKYFDTTIDRKRYTSTKEVLDATLIHQSITGLYETRIDLSQLGGDGGGGGPAPGGTLNIEDEYRLHETSKEPDVSLGSTWLSDFPQAWAETGGMGLAVRQAPLIIPLKATSTPVSIKQYPMSQEARLGIKPHIQRLLDQGILVPCQSPWNTPLLPVKKPGTNDYRPVQDLREVNKRVEDIHPTVPNPYNLLSGLPPSHQWYTVLDLKDAFFCLRLHPTSQPLFAFEWRDPEMGISGQLTWTRLPQGFKNSPTLFNEALHRDLADFRIQHPDLILLQYVDDLLLAATSELDCQQGTRALLQTLGNLGYRASAKKAQICQKQVKYLGYLLKEGQRWLTEARKETVMGQPTPKTPRQLREFLGKAGFCRLFIPGFAEMAAPLYPLTKPGTLFNWGPDQQKAYQEIKQALLTAPALGLPDLTKPFELFVDEKQGYAKGVLTQKLGPWRRPVAYLSKKLDPVAAGWPPCLRMVAAIAVLTKDAGKLTMGQPLVILAPHAVEALVKQPPDRWLSNARMTHYQALLLDTDRVQFGPVVALNPATLLPLPEEGLQHNCLDILAEAHGTRPDLTDQPLPDADHTWYTDGSSLLQEGQRKAGAAVTTETEVIWAKALPAGTSAQRAELIALTQALKMAEGKKLNVYTDSRYAFATAHIHGEIYRRRGWLTSEGKEIKNKDEILALLKALFLPKRLSIIHCPGHQKGHSAEARGNRMADQAARKAAITETPDTSTLLIENSSPSGGSKRTADGSEFEAGKRTADGSEFEKRTADGSEFESPKKKAKVE

SEQ ID NO: 2673 - protein, 2116 aa, synthetic construct
MPAAKRVKLDGGDKKYSIGLDIGTNSVGWAVITDEYKVPSKKFKVLGNTDRHSIKKNLIGALLFDSGETAEATRLKRTARRRYTRRKNRICYLQEIFSNEMAKVDDSFFHRLEESFLVEEDKKHERHPIFGNIVDEVAYHEKYPTIYHLRKKLVDSTDKADLRLIYLALAHMIKFRGHFLIEGDLNPDNSDVDKLFIQLVQTYNQLFEENPINASGVDAKAILSARLSKSRRLENLIAQLPGEKKNGLFGNLIALSLGLTPNFKSNFDLAEDAKLQLSKDTYDDDLDNLLAQIGDQYADLFLAAKNLSDAILLSDILRVNTEITKAPLSASMIKRYDEHHQDLTLLKALVRQQLPEKYKEIFFDQSKNGYAGYIDGGASQEEFYKFIKPILEKMDGTEELLVKLNREDLLRKQRTFDNGSIPHQIHLGELHAILRRQEDFYPFLKDNREKIEKILTFRIPYYVGPLARGNSRFAWMTRKSEETITPWNFEEVVDKGASAQSFIERMTNFDKNLPNEKVLPKHSLLYEYFTVYNELTKVKYVTEGMRKPAFLSGEQKKAIVDLLFKTNRKVTVKQLKEDYFKKIECFDSVEISGVEDRFNASLGTYHDLLKIIKDKDFLDNEENEDILEDIVLTLTLFEDREMIEERLKTYAHLFDDKVMKQLKRRRYTGWGRLSRKLINGIRDKQSGKTILDFLKSDGFANRNFMQLIHDDSLTFKEDIQKAQVSGQGDSLHEHIANLAGSPAIKKGILQTVKVVDELVKVMGRHKPENIVIEMARENQTTQKGQKNSRERMKRIEEGIKELGSQILKEHPVENTQLQNEKLYLYYLQNGRDMYVDQELDINRLSDYDVDHIVPQSFLKDDSIDNKVLTRSDKARGKSDNVPSEEVVKKMKNYWRQLLNAKLITQRKFDNLTKAERGGLSELDKAGFIKRQLVETRQITKHVAQILDSRMNTKYDENDKLIREVKVITLKSKLVSDFRKDFQFYKVREINNYHHAHDAYLNAVVGTALIKKYPKLESEFVYGDYKVYDVRKMIAKSEQEIGKATAKYFFYSNIMNFFKTEITLANGEIRKRPLIETNGETGEIVWDKGRDFATVRKVLSMPQVNIVKKTEVQTGGFSKESILPKRNSDKLIARKKDWDPKKYGGFDSPTVAYSVLVVAKVEKGKSKKLKSVKELLGITIMERSSFEKNPIDFLEAKGYKEVKKDLIIKLPKYSLFELENGRKRMLASAGELQKGNELALPSKYVNFLYLASHYEKLKGSPEDNEQKQLFVEQHKHYLDEIIEQISEFSKRVILADANLDKVLSAYNKHRDKPIREQAENIIHLFTLTNLGAPAAFKYFDTTIDRKRYTSTKEVLDATLIHQSITGLYETRIDLSQLGGDGGGGSEAAAKGSSGGTLNIEDEYRLHETSKEPDVSLGSTWLSDFPQAWAETGGMGLAVRQAPLIIPLKATSTPVSIKQYPMSQEARLGIKPHIQRLLDQGILVPCQSPWNTPLLPVKKPGTNDYRPVQDLREVNKRVEDIHPTVPNPYNLLSGLPPSHQWYTVLDLKDAFFCLRLHPTSQPLFAFEWRDPEMGISGQLTWTRLPQGFKNSPTLFNEALHRDLADFRIQHPDLILLQYVDDLLLAATSELDCQQGTRALLQTLGNLGYRASAKKAQICQKQVKYLGYLLKEGQRWLTEARKETVMGQPTPKTPRQLREFLGKAGFCRLFIPGFAEMAAPLYPLTKPGTLFNWGPDQQKAYQEIKQALLTAPALGLPDLTKPFELFVDEKQGYAKGVLTQKLGPWRRPVAYLSKKLDPVAAGWPPCLRMVAAIAVLTKDAGKLTMGQPLVILAPHAVEALVKQPPDRWLSNARMTHYQALLLDTDRVQFGPVVALNPATLLPLPEEGLQHNCLDILAEAHGTRPDLTDQPLPDADHTWYTDGSSLLQEGQRKAGAAVTTETEVIWAKALPAGTSAQRAELIALTQALKMAEGKKLNVYTDSRYAFATAHIHGEIYRRRGWLTSEGKEIKNKDEILALLKALFLPKRLSIIHCPGHQKGHSAEARGNRMADQAARKAAITETPDTSTLLIENSSPSGGSKRTADGSEFEAGKRTADGSEFEKRTADGSEFESPKKKAKVE

SEQ ID NO: 2674 - protein, 2116 aa, synthetic construct
MPAAKRVKLDGGDKKYSIGLDIGTNSVGWAVITDEYKVPSKKFKVLGNTDRHSIKKNLIGALLFDSGETAEATRLKRTARRRYTRRKNRICYLQEIFSNEMAKVDDSFFHRLEESFLVEEDKKHERHPIFGNIVDEVAYHEKYPTIYHLRKKLVDSTDKADLRLIYLALAHMIKFRGHFLIEGDLNPDNSDVDKLFIQLVQTYNQLFEENPINASGVDAKAILSARLSKSRRLENLIAQLPGEKKNGLFGNLIALSLGLTPNFKSNFDLAEDAKLQLSKDTYDDDLDNLLAQIGDQYADLFLAAKNLSDAILLSDILRVNTEITKAPLSASMIKRYDEHHQDLTLLKALVRQQLPEKYKEIFFDQSKNGYAGYIDGGASQEEFYKFIKPILEKMDGTEELLVKLNREDLLRKQRTFDNGSIPHQIHLGELHAILRRQEDFYPFLKDNREKIEKILTFRIPYYVGPLARGNSRFAWMTRKSEETITPWNFEEVVDKGASAQSFIERMTNFDKNLPNEKVLPKHSLLYEYFTVYNELTKVKYVTEGMRKPAFLSGEQKKAIVDLLFKTNRKVTVKQLKEDYFKKIECFDSVEISGVEDRFNASLGTYHDLLKIIKDKDFLDNEENEDILEDIVLTLTLFEDREMIEERLKTYAHLFDDKVMKQLKRRRYTGWGRLSRKLINGIRDKQSGKTILDFLKSDGFANRNFMQLIHDDSLTFKEDIQKAQVSGQGDSLHEHIANLAGSPAIKKGILQTVKVVDELVKVMGRHKPENIVIEMARENQTTQKGQKNSRERMKRIEEGIKELGSQILKEHPVENTQLQNEKLYLYYLQNGRDMYVDQELDINRLSDYDVDHIVPQSFLKDDSIDNKVLTRSDKARGKSDNVPSEEVVKKMKNYWRQLLNAKLITQRKFDNLTKAERGGLSELDKAGFIKRQLVETRQITKHVAQILDSRMNTKYDENDKLIREVKVITLKSKLVSDFRKDFQFYKVREINNYHHAHDAYLNAVVGTALIKKYPKLESEFVYGDYKVYDVRKMIAKSEQEIGKATAKYFFYSNIMNFFKTEITLANGEIRKRPLIETNGETGEIVWDKGRDFATVRKVLSMPQVNIVKKTEVQTGGFSKESILPKRNSDKLIARKKDWDPKKYGGFDSPTVAYSVLVVAKVEKGKSKKLKSVKELLGITIMERSSFEKNPIDFLEAKGYKEVKKDLIIKLPKYSLFELENGRKRMLASAGELQKGNELALPSKYVNFLYLASHYEKLKGSPEDNEQKQLFVEQHKHYLDEIIEQISEFSKRVILADANLDKVLSAYNKHRDKPIREQAENIIHLFTLTNLGAPAAFKYFDTTIDRKRYTSTKEVLDATLIHQSITGLYETRIDLSQLGGDGGEAAAKPAPGGSGGTLNIEDEYRLHETSKEPDVSLGSTWLSDFPQAWAETGGMGLAVRQAPLIIPLKATSTPVSIKQYPMSQEARLGIKPHIQRLLDQGILVPCQSPWNTPLLPVKKPGTNDYRPVQDLREVNKRVEDIHPTVPNPYNLLSGLPPSHQWYTVLDLKDAFFCLRLHPTSQPLFAFEWRDPEMGISGQLTWTRLPQGFKNSPTLFNEALHRDLADFRIQHPDLILLQYVDDLLLAATSELDCQQGTRALLQTLGNLGYRASAKKAQICQKQVKYLGYLLKEGQRWLTEARKETVMGQPTPKTPRQLREFLGKAGFCRLFIPGFAEMAAPLYPLTKPGTLFNWGPDQQKAYQEIKQALLTAPALGLPDLTKPFELFVDEKQGYAKGVLTQKLGPWRRPVAYLSKKLDPVAAGWPPCLRMVAAIAVLTKDAGKLTMGQPLVILAPHAVEALVKQPPDRWLSNARMTHYQALLLDTDRVQFGPVVALNPATLLPLPEEGLQHNCLDILAEAHGTRPDLTDQPLPDADHTWYTDGSSLLQEGQRKAGAAVTTETEVIWAKALPAGTSAQRAELIALTQALKMAEGKKLNVYTDSRYAFATAHIHGEIYRRRGWLTSEGKEIKNKDEILALLKALFLPKRLSIIHCPGHQKGHSAEARGNRMADQAARKAAITETPDTSTLLIENSSPSGGSKRTADGSEFEAGKRTADGSEFEKRTADGSEFESPKKKAKVE

SEQ ID NO: 2675 - protein, 2114 aa, synthetic construct
MPAAKRVKLDGGDKKYSIGLDIGTNSVGWAVITDEYKVPSKKFKVLGNTDRHSIKKNLIGALLFDSGETAEATRLKRTARRRYTRRKNRICYLQEIFSNEMAKVDDSFFHRLEESFLVEEDKKHERHPIFGNIVDEVAYHEKYPTIYHLRKKLVDSTDKADLRLIYLALAHMIKFRGHFLIEGDLNPDNSDVDKLFIQLVQTYNQLFEENPINASGVDAKAILSARLSKSRRLENLIAQLPGEKKNGLFGNLIALSLGLTPNFKSNFDLAEDAKLQLSKDTYDDDLDNLLAQIGDQYADLFLAAKNLSDAILLSDILRVNTEITKAPLSASMIKRYDEHHQDLTLLKALVRQQLPEKYKEIFFDQSKNGYAGYIDGGASQEEFYKFIKPILEKMDGTEELLVKLNREDLLRKQRTFDNGSIPHQIHLGELHAILRRQEDFYPFLKDNREKIEKILTFRIPYYVGPLARGNSRFAWMTRKSEETITPWNFEEVVDKGASAQSFIERMTNFDKNLPNEKVLPKHSLLYEYFTVYNELTKVKYVTEGMRKPAFLSGEQKKAIVDLLFKTNRKVTVKQLKEDYFKKIECFDSVEISGVEDRFNASLGTYHDLLKIIKDKDFLDNEENEDILEDIVLTLTLFEDREMIEERLKTYAHLFDDKVMKQLKRRRYTGWGRLSRKLINGIRDKQSGKTILDFLKSDGFANRNFMQLIHDDSLTFKEDIQKAQVSGQGDSLHEHIANLAGSPAIKKGILQTVKVVDELVKVMGRHKPENIVIEMARENQTTQKGQKNSRERMKRIEEGIKELGSQILKEHPVENTQLQNEKLYLYYLQNGRDMYVDQELDINRLSDYDVDHIVPQSFLKDDSIDNKVLTRSDKARGKSDNVPSEEVVKKMKNYWRQLLNAKLITQRKFDNLTKAERGGLSELDKAGFIKRQLVETRQITKHVAQILDSRMNTKYDENDKLIREVKVITLKSKLVSDFRKDFQFYKVREINNYHHAHDAYLNAVVGTALIKKYPKLESEFVYGDYKVYDVRKMIAKSEQEIGKATAKYFFYSNIMNFFKTEITLANGEIRKRPLIETNGETGEIVWDKGRDFATVRKVLSMPQVNIVKKTEVQTGGFSKESILPKRNSDKLIARKKDWDPKKYGGFDSPTVAYSVLVVAKVEKGKSKKLKSVKELLGITIMERSSFEKNPIDFLEAKGYKEVKKDLIIKLPKYSLFELENGRKRMLASAGELQKGNELALPSKYVNFLYLASHYEKLKGSPEDNEQKQLFVEQHKHYLDEIIEQISEFSKRVILADANLDKVLSAYNKHRDKPIREQAENIIHLFTLTNLGAPAAFKYFDTTIDRKRYTSTKEVLDATLIHQSITGLYETRIDLSQLGGDGGGGSGSSGGGGGTLNIEDEYRLHETSKEPDVSLGSTWLSDFPQAWAETGGMGLAVRQAPLIIPLKATSTPVSIKQYPMSQEARLGIKPHIQRLLDQGILVPCQSPWNTPLLPVKKPGTNDYRPVQDLREVNKRVEDIHPTVPNPYNLLSGLPPSHQWYTVLDLKDAFFCLRLHPTSQPLFAFEWRDPEMGISGQLTWTRLPQGFKNSPTLFNEALHRDLADFRIQHPDLILLQYVDDLLLAATSELDCQQGTRALLQTLGNLGYRASAKKAQICQKQVKYLGYLLKEGQRWLTEARKETVMGQPTPKTPRQLREFLGKAGFCRLFIPGFAEMAAPLYPLTKPGTLFNWGPDQQKAYQEIKQALLTAPALGLPDLTKPFELFVDEKQGYAKGVLTQKLGPWRRPVAYLSKKLDPVAAGWPPCLRMVAAIAVLTKDAGKLTMGQPLVILAPHAVEALVKQPPDRWLSNARMTHYQALLLDTDRVQFGPVVALNPATLLPLPEEGLQHNCLDILAEAHGTRPDLTDQPLPDADHTWYTDGSSLLQEGQRKAGAAVTTETEVIWAKALPAGTSAQRAELIALTQALKMAEGKKLNVYTDSRYAFATAHIHGEIYRRRGWLTSEGKEIKNKDEILALLKALFLPKRLSIIHCPGHQKGHSAEARGNRMADQAARKAAITETPDTSTLLIENSSPSGGSKRTADGSEFEAGKRTADGSEFEKRTADGSEFESPKKKAKVE

SEQ ID NO: 2676 - protein, 2111 aa, synthetic construct
MPAAKRVKLDGGDKKYSIGLDIGTNSVGWAVITDEYKVPSKKFKVLGNTDRHSIKKNLIGALLFDSGETAEATRLKRTARRRYTRRKNRICYLQEIFSNEMAKVDDSFFHRLEESFLVEEDKKHERHPIFGNIVDEVAYHEKYPTIYHLRKKLVDSTDKADLRLIYLALAHMIKFRGHFLIEGDLNPDNSDVDKLFIQLVQTYNQLFEENPINASGVDAKAILSARLSKSRRLENLIAQLPGEKKNGLFGNLIALSLGLTPNFKSNFDLAEDAKLQLSKDTYDDDLDNLLAQIGDQYADLFLAAKNLSDAILLSDILRVNTEITKAPLSASMIKRYDEHHQDLTLLKALVRQQLPEKYKEIFFDQSKNGYAGYIDGGASQEEFYKFIKPILEKMDGTEELLVKLNREDLLRKQRTFDNGSIPHQIHLGELHAILRRQEDFYPFLKDNREKIEKILTFRIPYYVGPLARGNSRFAWMTRKSEETITPWNFEEVVDKGASAQSFIERMTNFDKNLPNEKVLPKHSLLYEYFTVYNELTKVKYVTEGMRKPAFLSGEQKKAIVDLLFKTNRKVTVKQLKEDYFKKIECFDSVEISGVEDRFNASLGTYHDLLKIIKDKDFLDNEENEDILEDIVLTLTLFEDREMIEERLKTYAHLFDDKVMKQLKRRRYTGWGRLSRKLINGIRDKQSGKTILDFLKSDGFANRNFMQLIHDDSLTFKEDIQKAQVSGQGDSLHEHIANLAGSPAIKKGILQTVKVVDELVKVMGRHKPENIVIEMARENQTTQKGQKNSRERMKRIEEGIKELGSQILKEHPVENTQLQNEKLYLYYLQNGRDMYVDQELDINRLSDYDVDHIVPQSFLKDDSIDNKVLTRSDKARGKSDNVPSEEVVKKMKNYWRQLLNAKLITQRKFDNLTKAERGGLSELDKAGFIKRQLVETRQITKHVAQILDSRMNTKYDENDKLIREVKVITLKSKLVSDFRKDFQFYKVREINNYHHAHDAYLNAVVGTALIKKYPKLESEFVYGDYKVYDVRKMIAKSEQEIGKATAKYFFYSNIMNFFKTEITLANGEIRKRPLIETNGETGEIVWDKGRDFATVRKVLSMPQVNIVKKTEVQTGGFSKESILPKRNSDKLIARKKDWDPKKYGGFDSPTVAYSVLVVAKVEKGKSKKLKSVKELLGITIMERSSFEKNPIDFLEAKGYKEVKKDLIIKLPKYSLFELENGRKRMLASAGELQKGNELALPSKYVNFLYLASHYEKLKGSPEDNEQKQLFVEQHKHYLDEIIEQISEFSKRVILADANLDKVLSAYNKHRDKPIREQAENIIHLFTLTNLGAPAAFKYFDTTIDRKRYTSTKEVLDATLIHQSITGLYETRIDLSQLGGDGGGSSGGGGGTLNIEDEYRLHETSKEPDVSLGSTWLSDFPQAWAETGGMGLAVRQAPLIIPLKATSTPVSIKQYPMSQEARLGIKPHIQRLLDQGILVPCQSPWNTPLLPVKKPGTNDYRPVQDLREVNKRVEDIHPTVPNPYNLLSGLPPSHQWYTVLDLKDAFFCLRLHPTSQPLFAFEWRDPEMGISGQLTWTRLPQGFKNSPTLFNEALHRDLADFRIQHPDLILLQYVDDLLLAATSELDCQQGTRALLQTLGNLGYRASAKKAQICQKQVKYLGYLLKEGQRWLTEARKETVMGQPTPKTPRQLREFLGKAGFCRLFIPGFAEMAAPLYPLTKPGTLFNWGPDQQKAYQEIKQALLTAPALGLPDLTKPFELFVDEKQGYAKGVLTQKLGPWRRPVAYLSKKLDPVAAGWPPCLRMVAAIAVLTKDAGKLTMGQPLVILAPHAVEALVKQPPDRWLSNARMTHYQALLLDTDRVQFGPVVALNPATLLPLPEEGLQHNCLDILAEAHGTRPDLTDQPLPDADHTWYTDGSSLLQEGQRKAGAAVTTETEVIWAKALPAGTSAQRAELIALTQALKMAEGKKLNVYTDSRYAFATAHIHGEIYRRRGWLTSEGKEIKNKDEILALLKALFLPKRLSIIHCPGHQKGHSAEARGNRMADQAARKAAITETPDTSTLLIENSSPSGGSKRTADGSEFEAGKRTADGSEFEKRTADGSEFESPKKKAKVE

SEQ ID NO: 2677 - protein, 2116 aa, synthetic construct
MPAAKRVKLDGGDKKYSIGLDIGTNSVGWAVITDEYKVPSKKFKVLGNTDRHSIKKNLIGALLFDSGETAEATRLKRTARRRYTRRKNRICYLQEIFSNEMAKVDDSFFHRLEESFLVEEDKKHERHPIFGNIVDEVAYHEKYPTIYHLRKKLVDSTDKADLRLIYLALAHMIKFRGHFLIEGDLNPDNSDVDKLFIQLVQTYNQLFEENPINASGVDAKAILSARLSKSRRLENLIAQLPGEKKNGLFGNLIALSLGLTPNFKSNFDLAEDAKLQLSKDTYDDDLDNLLAQIGDQYADLFLAAKNLSDAILLSDILRVNTEITKAPLSASMIKRYDEHHQDLTLLKALVRQQLPEKYKEIFFDQSKNGYAGYIDGGASQEEFYKFIKPILEKMDGTEELLVKLNREDLLRKQRTFDNGSIPHQIHLGELHAILRRQEDFYPFLKDNREKIEKILTFRIPYYVGPLARGNSRFAWMTRKSEETITPWNFEEVVDKGASAQSFIERMTNFDKNLPNEKVLPKHSLLYEYFTVYNELTKVKYVTEGMRKPAFLSGEQKKAIVDLLFKTNRKVTVKQLKEDYFKKIECFDSVEISGVEDRFNASLGTYHDLLKIIKDKDFLDNEENEDILEDIVLTLTLFEDREMIEERLKTYAHLFDDKVMKQLKRRRYTGWGRLSRKLINGIRDKQSGKTILDFLKSDGFANRNFMQLIHDDSLTFKEDIQKAQVSGQGDSLHEHIANLAGSPAIKKGILQTVKVVDELVKVMGRHKPENIVIEMARENQTTQKGQKNSRERMKRIEEGIKELGSQILKEHPVENTQLQNEKLYLYYLQNGRDMYVDQELDINRLSDYDVDHIVPQSFLKDDSIDNKVLTRSDKARGKSDNVPSEEVVKKMKNYWRQLLNAKLITQRKFDNLTKAERGGLSELDKAGFIKRQLVETRQITKHVAQILDSRMNTKYDENDKLIREVKVITLKSKLVSDFRKDFQFYKVREINNYHHAHDAYLNAVVGTALIKKYPKLESEFVYGDYKVYDVRKMIAKSEQEIGKATAKYFFYSNIMNFFKTEITLANGEIRKRPLIETNGETGEIVWDKGRDFATVRKVLSMPQVNIVKKTEVQTGGFSKESILPKRNSDKLIARKKDWDPKKYGGFDSPTVAYSVLVVAKVEKGKSKKLKSVKELLGITIMERSSFEKNPIDFLEAKGYKEVKKDLIIKLPKYSLFELENGRKRMLASAGELQKGNELALPSKYVNFLYLASHYEKLKGSPEDNEQKQLFVEQHKHYLDEIIEQISEFSKRVILADANLDKVLSAYNKHRDKPIREQAENIIHLFTLTNLGAPAAFKYFDTTIDRKRYTSTKEVLDATLIHQSITGLYETRIDLSQLGGDGGGGGEAAAKGSSGGTLNIEDEYRLHETSKEPDVSLGSTWLSDFPQAWAETGGMGLAVRQAPLIIPLKATSTPVSIKQYPMSQEARLGIKPHIQRLLDQGILVPCQSPWNTPLLPVKKPGTNDYRPVQDLREVNKRVEDIHPTVPNPYNLLSGLPPSHQWYTVLDLKDAFFCLRLHPTSQPLFAFEWRDPEMGISGQLTWTRLPQGFKNSPTLFNEALHRDLADFRIQHPDLILLQYVDDLLLAATSELDCQQGTRALLQTLGNLGYRASAKKAQICQKQVKYLGYLLKEGQRWLTEARKETVMGQPTPKTPRQLREFLGKAGFCRLFIPGFAEMAAPLYPLTKPGTLFNWGPDQQKAYQEIKQALLTAPALGLPDLTKPFELFVDEKQGYAKGVLTQKLGPWRRPVAYLSKKLDPVAAGWPPCLRMVAAIAVLTKDAGKLTMGQPLVILAPHAVEALVKQPPDRWLSNARMTHYQALLLDTDRVQFGPVVALNPATLLPLPEEGLQHNCLDILAEAHGTRPDLTDQPLPDADHTWYTDGSSLLQEGQRKAGAAVTTETEVIWAKALPAGTSAQRAELIALTQALKMAEGKKLNVYTDSRYAFATAHIHGEIYRRRGWLTSEGKEIKNKDEILALLKALFLPKRLSIIHCPGHQKGHSAEARGNRMADQAARKAAITETPDTSTLLIENSSPSGGSKRTADGSEFEAGKRTADGSEFEKRTADGSEFESPKKKAKVE

SEQ ID NO: 2678 - protein, 2130 aa, synthetic construct
MPAAKRVKLDGGDKKYSIGLDIGTNSVGWAVITDEYKVPSKKFKVLGNTDRHSIKKNLIGALLFDSGETAEATRLKRTARRRYTRRKNRICYLQEIFSNEMAKVDDSFFHRLEESFLVEEDKKHERHPIFGNIVDEVAYHEKYPTIYHLRKKLVDSTDKADLRLIYLALAHMIKFRGHFLIEGDLNPDNSDVDKLFIQLVQTYNQLFEENPINASGVDAKAILSARLSKSRRLENLIAQLPGEKKNGLFGNLIALSLGLTPNFKSNFDLAEDAKLQLSKDTYDDDLDNLLAQIGDQYADLFLAAKNLSDAILLSDILRVNTEITKAPLSASMIKRYDEHHQDLTLLKALVRQQLPEKYKEIFFDQSKNGYAGYIDGGASQEEFYKFIKPILEKMDGTEELLVKLNREDLLRKQRTFDNGSIPHQIHLGELHAILRRQEDFYPFLKDNREKIEKILTFRIPYYVGPLARGNSRFAWMTRKSEETITPWNFEEVVDKGASAQSFIERMTNFDKNLPNEKVLPKHSLLYEYFTVYNELTKVKYVTEGMRKPAFLSGEQKKAIVDLLFKTNRKVTVKQLKEDYFKKIECFDSVEISGVEDRFNASLGTYHDLLKIIKDKDFLDNEENEDILEDIVLTLTLFEDREMIEERLKTYAHLFDDKVMKQLKRRRYTGWGRLSRKLINGIRDKQSGKTILDFLKSDGFANRNFMQLIHDDSLTFKEDIQKAQVSGQGDSLHEHIANLAGSPAIKKGILQTVKVVDELVKVMGRHKPENIVIEMARENQTTQKGQKNSRERMKRIEEGIKELGSQILKEHPVENTQLQNEKLYLYYLQNGRDMYVDQELDINRLSDYDVDHIVPQSFLKDDSIDNKVLTRSDKARGKSDNVPSEEVVKKMKNYWRQLLNAKLITQRKFDNLTKAERGGLSELDKAGFIKRQLVETRQITKHVAQILDSRMNTKYDENDKLIREVKVITLKSKLVSDFRKDFQFYKVREINNYHHAHDAYLNAVVGTALIKKYPKLESEFVYGDYKVYDVRKMIAKSEQEIGKATAKYFFYSNIMNFFKTEITLANGEIRKRPLIETNGETGEIVWDKGRDFATVRKVLSMPQVNIVKKTEVQTGGFSKESILPKRNSDKLIARKKDWDPKKYGGFDSPTVAYSVLVVAKVEKGKSKKLKSVKELLGITIMERSSFEKNPIDFLEAKGYKEVKKDLIIKLPKYSLFELENGRKRMLASAGELQKGNELALPSKYVNFLYLASHYEKLKGSPEDNEQKQLFVEQHKHYLDEIIEQISEFSKRVILADANLDKVLSAYNKHRDKPIREQAENIIHLFTLTNLGAPAAFKYFDTTIDRKRYTSTKEVLDATLIHQSITGLYETRIDLSQLGGDGGEAAAKEAAAKEAAAKEAAAKEAAAKGGTLNIEDEYRLHETSKEPDVSLGSTWLSDFPQAWAETGGMGLAVRQAPLIIPLKATSTPVSIKQYPMSQEARLGIKPHIQRLLDQGILVPCQSPWNTPLLPVKKPGTNDYRPVQDLREVNKRVEDIHPTVPNPYNLLSGLPPSHQWYTVLDLKDAFFCLRLHPTSQPLFAFEWRDPEMGISGQLTWTRLPQGFKNSPTLFNEALHRDLADFRIQHPDLILLQYVDDLLLAATSELDCQQGTRALLQTLGNLGYRASAKKAQICQKQVKYLGYLLKEGQRWLTEARKETVMGQPTPKTPRQLREFLGKAGFCRLFIPGFAEMAAPLYPLTKPGTLFNWGPDQQKAYQEIKQALLTAPALGLPDLTKPFELFVDEKQGYAKGVLTQKLGPWRRPVAYLSKKLDPVAAGWPPCLRMVAAIAVLTKDAGKLTMGQPLVILAPHAVEALVKQPPDRWLSNARMTHYQALLLDTDRVQFGPVVALNPATLLPLPEEGLQHNCLDILAEAHGTRPDLTDQPLPDADHTWYTDGSSLLQEGQRKAGAAVTTETEVIWAKALPAGTSAQRAELIALTQALKMAEGKKLNVYTDSRYAFATAHIHGEIYRRRGWLTSEGKEIKNKDEILALLKALFLPKRLSIIHCPGHQKGHSAEARGNRMADQAARKAAITETPDTSTLLIENSSPSGGSKRTADGSEFEAGKRTADGSEFEKRTADGSEFESPKKKAKVE

SEQ ID NO: 2679 - protein, 2114 aa, synthetic construct
MPAAKRVKLDGGDKKYSIGLDIGTNSVGWAVITDEYKVPSKKFKVLGNTDRHSIKKNLIGALLFDSGETAEATRLKRTARRRYTRRKNRICYLQEIFSNEMAKVDDSFFHRLEESFLVEEDKKHERHPIFGNIVDEVAYHEKYPTIYHLRKKLVDSTDKADLRLIYLALAHMIKFRGHFLIEGDLNPDNSDVDKLFIQLVQTYNQLFEENPINASGVDAKAILSARLSKSRRLENLIAQLPGEKKNGLFGNLIALSLGLTPNFKSNFDLAEDAKLQLSKDTYDDDLDNLLAQIGDQYADLFLAAKNLSDAILLSDILRVNTEITKAPLSASMIKRYDEHHQDLTLLKALVRQQLPEKYKEIFFDQSKNGYAGYIDGGASQEEFYKFIKPILEKMDGTEELLVKLNREDLLRKQRTFDNGSIPHQIHLGELHAILRRQEDFYPFLKDNREKIEKILTFRIPYYVGPLARGNSRFAWMTRKSEETITPWNFEEVVDKGASAQSFIERMTNFDKNLPNEKVLPKHSLLYEYFTVYNELTKVKYVTEGMRKPAFLSGEQKKAIVDLLFKTNRKVTVKQLKEDYFKKIECFDSVEISGVEDRFNASLGTYHDLLKIIKDKDFLDNEENEDILEDIVLTLTLFEDREMIEERLKTYAHLFDDKVMKQLKRRRYTGWGRLSRKLINGIRDKQSGKTILDFLKSDGFANRNFMQLIHDDSLTFKEDIQKAQVSGQGDSLHEHIANLAGSPAIKKGILQTVKVVDELVKVMGRHKPENIVIEMARENQTTQKGQKNSRERMKRIEEGIKELGSQILKEHPVENTQLQNEKLYLYYLQNGRDMYVDQELDINRLSDYDVDHIVPQSFLKDDSIDNKVLTRSDKARGKSDNVPSEEVVKKMKNYWRQLLNAKLITQRKFDNLTKAERGGLSELDKAGFIKRQLVETRQITKHVAQILDSRMNTKYDENDKLIREVKVITLKSKLVSDFRKDFQFYKVREINNYHHAHDAYLNAVVGTALIKKYPKLESEFVYGDYKVYDVRKMIAKSEQEIGKATAKYFFYSNIMNFFKTEITLANGEIRKRPLIETNGETGEIVWDKGRDFATVRKVLSMPQVNIVKKTEVQTGGFSKESILPKRNSDKLIARKKDWDPKKYGGFDSPTVAYSVLVVAKVEKGKSKKLKSVKELLGITIMERSSFEKNPIDFLEAKGYKEVKKDLIIKLPKYSLFELENGRKRMLASAGELQKGNELALPSKYVNFLYLASHYEKLKGSPEDNEQKQLFVEQHKHYLDEIIEQISEFSKRVILADANLDKVLSAYNKHRDKPIREQAENIIHLFTLTNLGAPAAFKYFDTTIDRKRYTSTKEVLDATLIHQSITGLYETRIDLSQLGGDGGGGSGSSPAPGGTLNIEDEYRLHETSKEPDVSLGSTWLSDFPQAWAETGGMGLAVRQAPLIIPLKATSTPVSIKQYPMSQEARLGIKPHIQRLLDQGILVPCQSPWNTPLLPVKKPGTNDYRPVQDLREVNKRVEDIHPTVPNPYNLLSGLPPSHQWYTVLDLKDAFFCLRLHPTSQPLFAFEWRDPEMGISGQLTWTRLPQGFKNSPTLFNEALHRDLADFRIQHPDLILLQYVDDLLLAATSELDCQQGTRALLQTLGNLGYRASAKKAQICQKQVKYLGYLLKEGQRWLTEARKETVMGQPTPKTPRQLREFLGKAGFCRLFIPGFAEMAAPLYPLTKPGTLFNWGPDQQKAYQEIKQALLTAPALGLPDLTKPFELFVDEKQGYAKGVLTQKLGPWRRPVAYLSKKLDPVAAGWPPCLRMVAAIAVLTKDAGKLTMGQPLVILAPHAVEALVKQPPDRWLSNARMTHYQALLLDTDRVQFGPVVALNPATLLPLPEEGLQHNCLDILAEAHGTRPDLTDQPLPDADHTWYTDGSSLLQEGQRKAGAAVTTETEVIWAKALPAGTSAQRAELIALTQALKMAEGKKLNVYTDSRYAFATAHIHGEIYRRRGWLTSEGKEIKNKDEILALLKALFLPKRLSIIHCPGHQKGHSAEARGNRMADQAARKAAITETPDTSTLLIENSSPSGGSKRTADGSEFEAGKRTADGSEFEKRTADGSEFESPKKKAKVE

SEQ ID NO: 2680 - protein, 2120 aa, synthetic construct
MPAAKRVKLDGGDKKYSIGLDIGTNSVGWAVITDEYKVPSKKFKVLGNTDRHSIKKNLIGALLFDSGETAEATRLKRTARRRYTRRKNRICYLQEIFSNEMAKVDDSFFHRLEESFLVEEDKKHERHPIFGNIVDEVAYHEKYPTIYHLRKKLVDSTDKADLRLIYLALAHMIKFRGHFLIEGDLNPDNSDVDKLFIQLVQTYNQLFEENPINASGVDAKAILSARLSKSRRLENLIAQLPGEKKNGLFGNLIALSLGLTPNFKSNFDLAEDAKLQLSKDTYDDDLDNLLAQIGDQYADLFLAAKNLSDAILLSDILRVNTEITKAPLSASMIKRYDEHHQDLTLLKALVRQQLPEKYKEIFFDQSKNGYAGYIDGGASQEEFYKFIKPILEKMDGTEELLVKLNREDLLRKQRTFDNGSIPHQIHLGELHAILRRQEDFYPFLKDNREKIEKILTFRIPYYVGPLARGNSRFAWMTRKSEETITPWNFEEVVDKGASAQSFIERMTNFDKNLPNEKVLPKHSLLYEYFTVYNELTKVKYVTEGMRKPAFLSGEQKKAIVDLLFKTNRKVTVKQLKEDYFKKIECFDSVEISGVEDRFNASLGTYHDLLKIIKDKDFLDNEENEDILEDIVLTLTLFEDREMIEERLKTYAHLFDDKVMKQLKRRRYTGWGRLSRKLINGIRDKQSGKTILDFLKSDGFANRNFMQLIHDDSLTFKEDIQKAQVSGQGDSLHEHIANLAGSPAIKKGILQTVKVVDELVKVMGRHKPENIVIEMARENQTTQKGQKNSRERMKRIEEGIKELGSQILKEHPVENTQLQNEKLYLYYLQNGRDMYVDQELDINRLSDYDVDHIVPQSFLKDDSIDNKVLTRSDKARGKSDNVPSEEVVKKMKNYWRQLLNAKLITQRKFDNLTKAERGGLSELDKAGFIKRQLVETRQITKHVAQILDSRMNTKYDENDKLIREVKVITLKSKLVSDFRKDFQFYKVREINNYHHAHDAYLNAVVGTALIKKYPKLESEFVYGDYKVYDVRKMIAKSEQEIGKATAKYFFYSNIMNFFKTEITLANGEIRKRPLIETNGETGEIVWDKGRDFATVRKVLSMPQVNIVKKTEVQTGGFSKESILPKRNSDKLIARKKDWDPKKYGGFDSPTVAYSVLVVAKVEKGKSKKLKSVKELLGITIMERSSFEKNPIDFLEAKGYKEVKKDLIIKLPKYSLFELENGRKRMLASAGELQKGNELALPSKYVNFLYLASHYEKLKGSPEDNEQKQLFVEQHKHYLDEIIEQISEFSKRVILADANLDKVLSAYNKHRDKPIREQAENIIHLFTLTNLGAPAAFKYFDTTIDRKRYTSTKEVLDATLIHQSITGLYETRIDLSQLGGDGGGGSGGSGGSGGSGGSGGTLNIEDEYRLHETSKEPDVSLGSTWLSDFPQAWAETGGMGLAVRQAPLIIPLKATSTPVSIKQYPMSQEARLGIKPHIQRLLDQGILVPCQSPWNTPLLPVKKPGTNDYRPVQDLREVNKRVEDIHPTVPNPYNLLSGLPPSHQWYTVLDLKDAFFCLRLHPTSQPLFAFEWRDPEMGISGQLTWTRLPQGFKNSPTLFNEALHRDLADFRIQHPDLILLQYVDDLLLAATSELDCQQGTRALLQTLGNLGYRASAKKAQICQKQVKYLGYLLKEGQRWLTEARKETVMGQPTPKTPRQLREFLGKAGFCRLFIPGFAEMAAPLYPLTKPGTLFNWGPDQQKAYQEIKQALLTAPALGLPDLTKPFELFVDEKQGYAKGVLTQKLGPWRRPVAYLSKKLDPVAAGWPPCLRMVAAIAVLTKDAGKLTMGQPLVILAPHAVEALVKQPPDRWLSNARMTHYQALLLDTDRVQFGPVVALNPATLLPLPEEGLQHNCLDILAEAHGTRPDLTDQPLPDADHTWYTDGSSLLQEGQRKAGAAVTTETEVIWAKALPAGTSAQRAELIALTQALKMAEGKKLNVYTDSRYAFATAHIHGEIYRRRGWLTSEGKEIKNKDEILALLKALFLPKRLSIIHCPGHQKGHSAEARGNRMADQAARKAAITETPDTSTLLIENSSPSGGSKRTADGSEFEAGKRTADGSEFEKRTADGSEFESPKKKAKVE

SEQ ID NO: 2681 - protein, 2116 aa, synthetic construct
MPAAKRVKLDGGDKKYSIGLDIGTNSVGWAVITDEYKVPSKKFKVLGNTDRHSIKKNLIGALLFDSGETAEATRLKRTARRRYTRRKNRICYLQEIFSNEMAKVDDSFFHRLEESFLVEEDKKHERHPIFGNIVDEVAYHEKYPTIYHLRKKLVDSTDKADLRLIYLALAHMIKFRGHFLIEGDLNPDNSDVDKLFIQLVQTYNQLFEENPINASGVDAKAILSARLSKSRRLENLIAQLPGEKKNGLFGNLIALSLGLTPNFKSNFDLAEDAKLQLSKDTYDDDLDNLLAQIGDQYADLFLAAKNLSDAILLSDILRVNTEITKAPLSASMIKRYDEHHQDLTLLKALVRQQLPEKYKEIFFDQSKNGYAGYIDGGASQEEFYKFIKPILEKMDGTEELLVKLNREDLLRKQRTFDNGSIPHQIHLGELHAILRRQEDFYPFLKDNREKIEKILTFRIPYYVGPLARGNSRFAWMTRKSEETITPWNFEEVVDKGASAQSFIERMTNFDKNLPNEKVLPKHSLLYEYFTVYNELTKVKYVTEGMRKPAFLSGEQKKAIVDLLFKTNRKVTVKQLKEDYFKKIECFDSVEISGVEDRFNASLGTYHDLLKIIKDKDFLDNEENEDILEDIVLTLTLFEDREMIEERLKTYAHLFDDKVMKQLKRRRYTGWGRLSRKLINGIRDKQSGKTILDFLKSDGFANRNFMQLIHDDSLTFKEDIQKAQVSGQGDSLHEHIANLAGSPAIKKGILQTVKVVDELVKVMGRHKPENIVIEMARENQTTQKGQKNSRERMKRIEEGIKELGSQILKEHPVENTQLQNEKLYLYYLQNGRDMYVDQELDINRLSDYDVDHIVPQSFLKDDSIDNKVLTRSDKARGKSDNVPSEEVVKKMKNYWRQLLNAKLITQRKFDNLTKAERGGLSELDKAGFIKRQLVETRQITKHVAQILDSRMNTKYDENDKLIREVKVITLKSKLVSDFRKDFQFYKVREINNYHHAHDAYLNAVVGTALIKKYPKLESEFVYGDYKVYDVRKMIAKSEQEIGKATAKYFFYSNIMNFFKTEITLANGEIRKRPLIETNGETGEIVWDKGRDFATVRKVLSMPQVNIVKKTEVQTGGFSKESILPKRNSDKLIARKKDWDPKKYGGFDSPTVAYSVLVVAKVEKGKSKKLKSVKELLGITIMERSSFEKNPIDFLEAKGYKEVKKDLIIKLPKYSLFELENGRKRMLASAGELQKGNELALPSKYVNFLYLASHYEKLKGSPEDNEQKQLFVEQHKHYLDEIIEQISEFSKRVILADANLDKVLSAYNKHRDKPIREQAENIIHLFTLTNLGAPAAFKYFDTTIDRKRYTSTKEVLDATLIHQSITGLYETRIDLSQLGGDGGEAAAKPAPGGGGGTLNIEDEYRLHETSKEPDVSLGSTWLSDFPQAWAETGGMGLAVRQAPLIIPLKATSTPVSIKQYPMSQEARLGIKPHIQRLLDQGILVPCQSPWNTPLLPVKKPGTNDYRPVQDLREVNKRVEDIHPTVPNPYNLLSGLPPSHQWYTVLDLKDAFFCLRLHPTSQPLFAFEWRDPEMGISGQLTWTRLPQGFKNSPTLFNEALHRDLADFRIQHPDLILLQYVDDLLLAATSELDCQQGTRALLQTLGNLGYRASAKKAQICQKQVKYLGYLLKEGQRWLTEARKETVMGQPTPKTPRQLREFLGKAGFCRLFIPGFAEMAAPLYPLTKPGTLFNWGPDQQKAYQEIKQALLTAPALGLPDLTKPFELFVDEKQGYAKGVLTQKLGPWRRPVAYLSKKLDPVAAGWPPCLRMVAAIAVLTKDAGKLTMGQPLVILAPHAVEALVKQPPDRWLSNARMTHYQALLLDTDRVQFGPVVALNPATLLPLPEEGLQHNCLDILAEAHGTRPDLTDQPLPDADHTWYTDGSSLLQEGQRKAGAAVTTETEVIWAKALPAGTSAQRAELIALTQALKMAEGKKLNVYTDSRYAFATAHIHGEIYRRRGWLTSEGKEIKNKDEILALLKALFLPKRLSIIHCPGHQKGHSAEARGNRMADQAARKAAITETPDTSTLLIENSSPSGGSKRTADGSEFEAGKRTADGSEFEKRTADGSEFESPKKKAKVE

SEQ ID NO: 2682 - protein, 2111 aa, synthetic construct
MPAAKRVKLDGGDKKYSIGLDIGTNSVGWAVITDEYKVPSKKFKVLGNTDRHSIKKNLIGALLFDSGETAEATRLKRTARRRYTRRKNRICYLQEIFSNEMAKVDDSFFHRLEESFLVEEDKKHERHPIFGNIVDEVAYHEKYPTIYHLRKKLVDSTDKADLRLIYLALAHMIKFRGHFLIEGDLNPDNSDVDKLFIQLVQTYNQLFEENPINASGVDAKAILSARLSKSRRLENLIAQLPGEKKNGLFGNLIALSLGLTPNFKSNFDLAEDAKLQLSKDTYDDDLDNLLAQIGDQYADLFLAAKNLSDAILLSDILRVNTEITKAPLSASMIKRYDEHHQDLTLLKALVRQQLPEKYKEIFFDQSKNGYAGYIDGGASQEEFYKFIKPILEKMDGTEELLVKLNREDLLRKQRTFDNGSIPHQIHLGELHAILRRQEDFYPFLKDNREKIEKILTFRIPYYVGPLARGNSRFAWMTRKSEETITPWNFEEVVDKGASAQSFIERMTNFDKNLPNEKVLPKHSLLYEYFTVYNELTKVKYVTEGMRKPAFLSGEQKKAIVDLLFKTNRKVTVKQLKEDYFKKIECFDSVEISGVEDRFNASLGTYHDLLKIIKDKDFLDNEENEDILEDIVLTLTLFEDREMIEERLKTYAHLFDDKVMKQLKRRRYTGWGRLSRKLINGIRDKQSGKTILDFLKSDGFANRNFMQLIHDDSLTFKEDIQKAQVSGQGDSLHEHIANLAGSPAIKKGILQTVKVVDELVKVMGRHKPENIVIEMARENQTTQKGQKNSRERMKRIEEGIKELGSQILKEHPVENTQLQNEKLYLYYLQNGRDMYVDQELDINRLSDYDVDHIVPQSFLKDDSIDNKVLTRSDKARGKSDNVPSEEVVKKMKNYWRQLLNAKLITQRKFDNLTKAERGGLSELDKAGFIKRQLVETRQITKHVAQILDSRMNTKYDENDKLIREVKVITLKSKLVSDFRKDFQFYKVREINNYHHAHDAYLNAVVGTALIKKYPKLESEFVYGDYKVYDVRKMIAKSEQEIGKATAKYFFYSNIMNFFKTEITLANGEIRKRPLIETNGETGEIVWDKGRDFATVRKVLSMPQVNIVKKTEVQTGGFSKESILPKRNSDKLIARKKDWDPKKYGGFDSPTVAYSVLVVAKVEKGKSKKLKSVKELLGITIMERSSFEKNPIDFLEAKGYKEVKKDLIIKLPKYSLFELENGRKRMLASAGELQKGNELALPSKYVNFLYLASHYEKLKGSPEDNEQKQLFVEQHKHYLDEIIEQISEFSKRVILADANLDKVLSAYNKHRDKPIREQAENIIHLFTLTNLGAPAAFKYFDTTIDRKRYTSTKEVLDATLIHQSITGLYETRIDLSQLGGDGGGSSGGSGGTLNIEDEYRLHETSKEPDVSLGSTWLSDFPQAWAETGGMGLAVRQAPLIIPLKATSTPVSIKQYPMSQEARLGIKPHIQRLLDQGILVPCQSPWNTPLLPVKKPGTNDYRPVQDLREVNKRVEDIHPTVPNPYNLLSGLPPSHQWYTVLDLKDAFFCLRLHPTSQPLFAFEWRDPEMGISGQLTWTRLPQGFKNSPTLFNEALHRDLADFRIQHPDLILLQYVDDLLLAATSELDCQQGTRALLQTLGNLGYRASAKKAQICQKQVKYLGYLLKEGQRWLTEARKETVMGQPTPKTPRQLREFLGKAGFCRLFIPGFAEMAAPLYPLTKPGTLFNWGPDQQKAYQEIKQALLTAPALGLPDLTKPFELFVDEKQGYAKGVLTQKLGPWRRPVAYLSKKLDPVAAGWPPCLRMVAAIAVLTKDAGKLTMGQPLVILAPHAVEALVKQPPDRWLSNARMTHYQALLLDTDRVQFGPVVALNPATLLPLPEEGLQHNCLDILAEAHGTRPDLTDQPLPDADHTWYTDGSSLLQEGQRKAGAAVTTETEVIWAKALPAGTSAQRAELIALTQALKMAEGKKLNVYTDSRYAFATAHIHGEIYRRRGWLTSEGKEIKNKDEILALLKALFLPKRLSIIHCPGHQKGHSAEARGNRMADQAARKAAITETPDTSTLLIENSSPSGGSKRTADGSEFEAGKRTADGSEFEKRTADGSEFESPKKKAKVE

SEQ ID NO: 2683 - protein, 2116 aa, synthetic construct
MPAAKRVKLDGGDKKYSIGLDIGTNSVGWAVITDEYKVPSKKFKVLGNTDRHSIKKNLIGALLFDSGETAEATRLKRTARRRYTRRKNRICYLQEIFSNEMAKVDDSFFHRLEESFLVEEDKKHERHPIFGNIVDEVAYHEKYPTIYHLRKKLVDSTDKADLRLIYLALAHMIKFRGHFLIEGDLNPDNSDVDKLFIQLVQTYNQLFEENPINASGVDAKAILSARLSKSRRLENLIAQLPGEKKNGLFGNLIALSLGLTPNFKSNFDLAEDAKLQLSKDTYDDDLDNLLAQIGDQYADLFLAAKNLSDAILLSDILRVNTEITKAPLSASMIKRYDEHHQDLTLLKALVRQQLPEKYKEIFFDQSKNGYAGYIDGGASQEEFYKFIKPILEKMDGTEELLVKLNREDLLRKQRTFDNGSIPHQIHLGELHAILRRQEDFYPFLKDNREKIEKILTFRIPYYVGPLARGNSRFAWMTRKSEETITPWNFEEVVDKGASAQSFIERMTNFDKNLPNEKVLPKHSLLYEYFTVYNELTKVKYVTEGMRKPAFLSGEQKKAIVDLLFKTNRKVTVKQLKEDYFKKIECFDSVEISGVEDRFNASLGTYHDLLKIIKDKDFLDNEENEDILEDIVLTLTLFEDREMIEERLKTYAHLFDDKVMKQLKRRRYTGWGRLSRKLINGIRDKQSGKTILDFLKSDGFANRNFMQLIHDDSLTFKEDIQKAQVSGQGDSLHEHIANLAGSPAIKKGILQTVKVVDELVKVMGRHKPENIVIEMARENQTTQKGQKNSRERMKRIEEGIKELGSQILKEHPVENTQLQNEKLYLYYLQNGRDMYVDQELDINRLSDYDVDHIVPQSFLKDDSIDNKVLTRSDKARGKSDNVPSEEVVKKMKNYWRQLLNAKLITQRKFDNLTKAERGGLSELDKAGFIKRQLVETRQITKHVAQILDSRMNTKYDENDKLIREVKVITLKSKLVSDFRKDFQFYKVREINNYHHAHDAYLNAVVGTALIKKYPKLESEFVYGDYKVYDVRKMIAKSEQEIGKATAKYFFYSNIMNFFKTEITLANGEIRKRPLIETNGETGEIVWDKGRDFATVRKVLSMPQVNIVKKTEVQTGGFSKESILPKRNSDKLIARKKDWDPKKYGGFDSPTVAYSVLVVAKVEKGKSKKLKSVKELLGITIMERSSFEKNPIDFLEAKGYKEVKKDLIIKLPKYSLFELENGRKRMLASAGELQKGNELALPSKYVNFLYLASHYEKLKGSPEDNEQKQLFVEQHKHYLDEIIEQISEFSKRVILADANLDKVLSAYNKHRDKPIREQAENIIHLFTLTNLGAPAAFKYFDTTIDRKRYTSTKEVLDATLIHQSITGLYETRIDLSQLGGDGGEAAAKGSSGGSGGTLNIEDEYRLHETSKEPDVSLGSTWLSDFPQAWAETGGMGLAVRQAPLIIPLKATSTPVSIKQYPMSQEARLGIKPHIQRLLDQGILVPCQSPWNTPLLPVKKPGTNDYRPVQDLREVNKRVEDIHPTVPNPYNLLSGLPPSHQWYTVLDLKDAFFCLRLHPTSQPLFAFEWRDPEMGISGQLTWTRLPQGFKNSPTLFNEALHRDLADFRIQHPDLILLQYVDDLLLAATSELDCQQGTRALLQTLGNLGYRASAKKAQICQKQVKYLGYLLKEGQRWLTEARKETVMGQPTPKTPRQLREFLGKAGFCRLFIPGFAEMAAPLYPLTKPGTLFNWGPDQQKAYQEIKQALLTAPALGLPDLTKPFELFVDEKQGYAKGVLTQKLGPWRRPVAYLSKKLDPVAAGWPPCLRMVAAIAVLTKDAGKLTMGQPLVILAPHAVEALVKQPPDRWLSNARMTHYQALLLDTDRVQFGPVVALNPATLLPLPEEGLQHNCLDILAEAHGTRPDLTDQPLPDADHTWYTDGSSLLQEGQRKAGAAVTTETEVIWAKALPAGTSAQRAELIALTQALKMAEGKKLNVYTDSRYAFATAHIHGEIYRRRGWLTSEGKEIKNKDEILALLKALFLPKRLSIIHCPGHQKGHSAEARGNRMADQAARKAAITETPDTSTLLIENSSPSGGSKRTADGSEFEAGKRTADGSEFEKRTADGSEFESPKKKAKVE

SEQ ID NO: 2684 - protein, 2114 aa, synthetic construct
MPAAKRVKLDGGDKKYSIGLDIGTNSVGWAVITDEYKVPSKKFKVLGNTDRHSIKKNLIGALLFDSGETAEATRLKRTARRRYTRRKNRICYLQEIFSNEMAKVDDSFFHRLEESFLVEEDKKHERHPIFGNIVDEVAYHEKYPTIYHLRKKLVDSTDKADLRLIYLALAHMIKFRGHFLIEGDLNPDNSDVDKLFIQLVQTYNQLFEENPINASGVDAKAILSARLSKSRRLENLIAQLPGEKKNGLFGNLIALSLGLTPNFKSNFDLAEDAKLQLSKDTYDDDLDNLLAQIGDQYADLFLAAKNLSDAILLSDILRVNTEITKAPLSASMIKRYDEHHQDLTLLKALVRQQLPEKYKEIFFDQSKNGYAGYIDGGASQEEFYKFIKPILEKMDGTEELLVKLNREDLLRKQRTFDNGSIPHQIHLGELHAILRRQEDFYPFLKDNREKIEKILTFRIPYYVGPLARGNSRFAWMTRKSEETITPWNFEEVVDKGASAQSFIERMTNFDKNLPNEKVLPKHSLLYEYFTVYNELTKVKYVTEGMRKPAFLSGEQKKAIVDLLFKTNRKVTVKQLKEDYFKKIECFDSVEISGVEDRFNASLGTYHDLLKIIKDKDFLDNEENEDILEDIVLTLTLFEDREMIEERLKTYAHLFDDKVMKQLKRRRYTGWGRLSRKLINGIRDKQSGKTILDFLKSDGFANRNFMQLIHDDSLTFKEDIQKAQVSGQGDSLHEHIANLAGSPAIKKGILQTVKVVDELVKVMGRHKPENIVIEMARENQTTQKGQKNSRERMKRIEEGIKELGSQILKEHPVENTQLQNEKLYLYYLQNGRDMYVDQELDINRLSDYDVDHIVPQSFLKDDSIDNKVLTRSDKARGKSDNVPSEEVVKKMKNYWRQLLNAKLITQRKFDNLTKAERGGLSELDKAGFIKRQLVETRQITKHVAQILDSRMNTKYDENDKLIREVKVITLKSKLVSDFRKDFQFYKVREINNYHHAHDAYLNAVVGTALIKKYPKLESEFVYGDYKVYDVRKMIAKSEQEIGKATAKYFFYSNIMNFFKTEITLANGEIRKRPLIETNGETGEIVWDKGRDFATVRKVLSMPQVNIVKKTEVQTGGFSKESILPKRNSDKLIARKKDWDPKKYGGFDSPTVAYSVLVVAKVEKGKSKKLKSVKELLGITIMERSSFEKNPIDFLEAKGYKEVKKDLIIKLPKYSLFELENGRKRMLASAGELQKGNELALPSKYVNFLYLASHYEKLKGSPEDNEQKQLFVEQHKHYLDEIIEQISEFSKRVILADANLDKVLSAYNKHRDKPIREQAENIIHLFTLTNLGAPAAFKYFDTTIDRKRYTSTKEVLDATLIHQSITGLYETRIDLSQLGGDGGGGSPAPGSSGGTLNIEDEYRLHETSKEPDVSLGSTWLSDFPQAWAETGGMGLAVRQAPLIIPLKATSTPVSIKQYPMSQEARLGIKPHIQRLLDQGILVPCQSPWNTPLLPVKKPGTNDYRPVQDLREVNKRVEDIHPTVPNPYNLLSGLPPSHQWYTVLDLKDAFFCLRLHPTSQPLFAFEWRDPEMGISGQLTWTRLPQGFKNSPTLFNEALHRDLADFRIQHPDLILLQYVDDLLLAATSELDCQQGTRALLQTLGNLGYRASAKKAQICQKQVKYLGYLLKEGQRWLTEARKETVMGQPTPKTPRQLREFLGKAGFCRLFIPGFAEMAAPLYPLTKPGTLFNWGPDQQKAYQEIKQALLTAPALGLPDLTKPFELFVDEKQGYAKGVLTQKLGPWRRPVAYLSKKLDPVAAGWPPCLRMVAAIAVLTKDAGKLTMGQPLVILAPHAVEALVKQPPDRWLSNARMTHYQALLLDTDRVQFGPVVALNPATLLPLPEEGLQHNCLDILAEAHGTRPDLTDQPLPDADHTWYTDGSSLLQEGQRKAGAAVTTETEVIWAKALPAGTSAQRAELIALTQALKMAEGKKLNVYTDSRYAFATAHIHGEIYRRRGWLTSEGKEIKNKDEILALLKALFLPKRLSIIHCPGHQKGHSAEARGNRMADQAARKAAITETPDTSTLLIENSSPSGGSKRTADGSEFEAGKRTADGSEFEKRTADGSEFESPKKKAKVE

SEQ ID NO: 2685 - protein, 2114 aa, synthetic construct
MPAAKRVKLDGGDKKYSIGLDIGTNSVGWAVITDEYKVPSKKFKVLGNTDRHSIKKNLIGALLFDSGETAEATRLKRTARRRYTRRKNRICYLQEIFSNEMAKVDDSFFHRLEESFLVEEDKKHERHPIFGNIVDEVAYHEKYPTIYHLRKKLVDSTDKADLRLIYLALAHMIKFRGHFLIEGDLNPDNSDVDKLFIQLVQTYNQLFEENPINASGVDAKAILSARLSKSRRLENLIAQLPGEKKNGLFGNLIALSLGLTPNFKSNFDLAEDAKLQLSKDTYDDDLDNLLAQIGDQYADLFLAAKNLSDAILLSDILRVNTEITKAPLSASMIKRYDEHHQDLTLLKALVRQQLPEKYKEIFFDQSKNGYAGYIDGGASQEEFYKFIKPILEKMDGTEELLVKLNREDLLRKQRTFDNGSIPHQIHLGELHAILRRQEDFYPFLKDNREKIEKILTFRIPYYVGPLARGNSRFAWMTRKSEETITPWNFEEVVDKGASAQSFIERMTNFDKNLPNEKVLPKHSLLYEYFTVYNELTKVKYVTEGMRKPAFLSGEQKKAIVDLLFKTNRKVTVKQLKEDYFKKIECFDSVEISGVEDRFNASLGTYHDLLKIIKDKDFLDNEENEDILEDIVLTLTLFEDREMIEERLKTYAHLFDDKVMKQLKRRRYTGWGRLSRKLINGIRDKQSGKTILDFLKSDGFANRNFMQLIHDDSLTFKEDIQKAQVSGQGDSLHEHIANLAGSPAIKKGILQTVKVVDELVKVMGRHKPENIVIEMARENQTTQKGQKNSRERMKRIEEGIKELGSQILKEHPVENTQLQNEKLYLYYLQNGRDMYVDQELDINRLSDYDVDHIVPQSFLKDDSIDNKVLTRSDKARGKSDNVPSEEVVKKMKNYWRQLLNAKLITQRKFDNLTKAERGGLSELDKAGFIKRQLVETRQITKHVAQILDSRMNTKYDENDKLIREVKVITLKSKLVSDFRKDFQFYKVREINNYHHAHDAYLNAVVGTALIKKYPKLESEFVYGDYKVYDVRKMIAKSEQEIGKATAKYFFYSNIMNFFKTEITLANGEIRKRPLIETNGETGEIVWDKGRDFATVRKVLSMPQVNIVKKTEVQTGGFSKESILPKRNSDKLIARKKDWDPKKYGGFDSPTVAYSVLVVAKVEKGKSKKLKSVKELLGITIMERSSFEKNPIDFLEAKGYKEVKKDLIIKLPKYSLFELENGRKRMLASAGELQKGNELALPSKYVNFLYLASHYEKLKGSPEDNEQKQLFVEQHKHYLDEIIEQISEFSKRVILADANLDKVLSAYNKHRDKPIREQAENIIHLFTLTNLGAPAAFKYFDTTIDRKRYTSTKEVLDATLIHQSITGLYETRIDLSQLGGDGGPAPGSSGGSGGTLNIEDEYRLHETSKEPDVSLGSTWLSDFPQAWAETGGMGLAVRQAPLIIPLKATSTPVSIKQYPMSQEARLGIKPHIQRLLDQGILVPCQSPWNTPLLPVKKPGTNDYRPVQDLREVNKRVEDIHPTVPNPYNLLSGLPPSHQWYTVLDLKDAFFCLRLHPTSQPLFAFEWRDPEMGISGQLTWTRLPQGFKNSPTLFNEALHRDLADFRIQHPDLILLQYVDDLLLAATSELDCQQGTRALLQTLGNLGYRASAKKAQICQKQVKYLGYLLKEGQRWLTEARKETVMGQPTPKTPRQLREFLGKAGFCRLFIPGFAEMAAPLYPLTKPGTLFNWGPDQQKAYQEIKQALLTAPALGLPDLTKPFELFVDEKQGYAKGVLTQKLGPWRRPVAYLSKKLDPVAAGWPPCLRMVAAIAVLTKDAGKLTMGQPLVILAPHAVEALVKQPPDRWLSNARMTHYQALLLDTDRVQFGPVVALNPATLLPLPEEGLQHNCLDILAEAHGTRPDLTDQPLPDADHTWYTDGSSLLQEGQRKAGAAVTTETEVIWAKALPAGTSAQRAELIALTQALKMAEGKKLNVYTDSRYAFATAHIHGEIYRRRGWLTSEGKEIKNKDEILALLKALFLPKRLSIIHCPGHQKGHSAEARGNRMADQAARKAAITETPDTSTLLIENSSPSGGSKRTADGSEFEAGKRTADGSEFEKRTADGSEFESPKKKAKVE

SEQ ID NO: 2686 - protein, 2116 aa, synthetic construct
MPAAKRVKLDGGDKKYSIGLDIGTNSVGWAVITDEYKVPSKKFKVLGNTDRHSIKKNLIGALLFDSGETAEATRLKRTARRRYTRRKNRICYLQEIFSNEMAKVDDSFFHRLEESFLVEEDKKHERHPIFGNIVDEVAYHEKYPTIYHLRKKLVDSTDKADLRLIYLALAHMIKFRGHFLIEGDLNPDNSDVDKLFIQLVQTYNQLFEENPINASGVDAKAILSARLSKSRRLENLIAQLPGEKKNGLFGNLIALSLGLTPNFKSNFDLAEDAKLQLSKDTYDDDLDNLLAQIGDQYADLFLAAKNLSDAILLSDILRVNTEITKAPLSASMIKRYDEHHQDLTLLKALVRQQLPEKYKEIFFDQSKNGYAGYIDGGASQEEFYKFIKPILEKMDGTEELLVKLNREDLLRKQRTFDNGSIPHQIHLGELHAILRRQEDFYPFLKDNREKIEKILTFRIPYYVGPLARGNSRFAWMTRKSEETITPWNFEEVVDKGASAQSFIERMTNFDKNLPNEKVLPKHSLLYEYFTVYNELTKVKYVTEGMRKPAFLSGEQKKAIVDLLFKTNRKVTVKQLKEDYFKKIECFDSVEISGVEDRFNASLGTYHDLLKIIKDKDFLDNEENEDILEDIVLTLTLFEDREMIEERLKTYAHLFDDKVMKQLKRRRYTGWGRLSRKLINGIRDKQSGKTILDFLKSDGFANRNFMQLIHDDSLTFKEDIQKAQVSGQGDSLHEHIANLAGSPAIKKGILQTVKVVDELVKVMGRHKPENIVIEMARENQTTQKGQKNSRERMKRIEEGIKELGSQILKEHPVENTQLQNEKLYLYYLQNGRDMYVDQELDINRLSDYDVDHIVPQSFLKDDSIDNKVLTRSDKARGKSDNVPSEEVVKKMKNYWRQLLNAKLITQRKFDNLTKAERGGLSELDKAGFIKRQLVETRQITKHVAQILDSRMNTKYDENDKLIREVKVITLKSKLVSDFRKDFQFYKVREINNYHHAHDAYLNAVVGTALIKKYPKLESEFVYGDYKVYDVRKMIAKSEQEIGKATAKYFFYSNIMNFFKTEITLANGEIRKRPLIETNGETGEIVWDKGRDFATVRKVLSMPQVNIVKKTEVQTGGFSKESILPKRNSDKLIARKKDWDPKKYGGFDSPTVAYSVLVVAKVEKGKSKKLKSVKELLGITIMERSSFEKNPIDFLEAKGYKEVKKDLIIKLPKYSLFELENGRKRMLASAGELQKGNELALPSKYVNFLYLASHYEKLKGSPEDNEQKQLFVEQHKHYLDEIIEQISEFSKRVILADANLDKVLSAYNKHRDKPIREQAENIIHLFTLTNLGAPAAFKYFDTTIDRKRYTSTKEVLDATLIHQSITGLYETRIDLSQLGGDGGEAAAKGSSGGGGGTLNIEDEYRLHETSKEPDVSLGSTWLSDFPQAWAETGGMGLAVRQAPLIIPLKATSTPVSIKQYPMSQEARLGIKPHIQRLLDQGILVPCQSPWNTPLLPVKKPGTNDYRPVQDLREVNKRVEDIHPTVPNPYNLLSGLPPSHQWYTVLDLKDAFFCLRLHPTSQPLFAFEWRDPEMGISGQLTWTRLPQGFKNSPTLFNEALHRDLADFRIQHPDLILLQYVDDLLLAATSELDCQQGTRALLQTLGNLGYRASAKKAQICQKQVKYLGYLLKEGQRWLTEARKETVMGQPTPKTPRQLREFLGKAGFCRLFIPGFAEMAAPLYPLTKPGTLFNWGPDQQKAYQEIKQALLTAPALGLPDLTKPFELFVDEKQGYAKGVLTQKLGPWRRPVAYLSKKLDPVAAGWPPCLRMVAAIAVLTKDAGKLTMGQPLVILAPHAVEALVKQPPDRWLSNARMTHYQALLLDTDRVQFGPVVALNPATLLPLPEEGLQHNCLDILAEAHGTRPDLTDQPLPDADHTWYTDGSSLLQEGQRKAGAAVTTETEVIWAKALPAGTSAQRAELIALTQALKMAEGKKLNVYTDSRYAFATAHIHGEIYRRRGWLTSEGKEIKNKDEILALLKALFLPKRLSIIHCPGHQKGHSAEARGNRMADQAARKAAITETPDTSTLLIENSSPSGGSKRTADGSEFEAGKRTADGSEFEKRTADGSEFESPKKKAKVE

SEQ ID NO: 2687 - protein, 2117 aa, synthetic construct
MPAAKRVKLDGGDKKYSIGLDIGTNSVGWAVITDEYKVPSKKFKVLGNTDRHSIKKNLIGALLFDSGETAEATRLKRTARRRYTRRKNRICYLQEIFSNEMAKVDDSFFHRLEESFLVEEDKKHERHPIFGNIVDEVAYHEKYPTIYHLRKKLVDSTDKADLRLIYLALAHMIKFRGHFLIEGDLNPDNSDVDKLFIQLVQTYNQLFEENPINASGVDAKAILSARLSKSRRLENLIAQLPGEKKNGLFGNLIALSLGLTPNFKSNFDLAEDAKLQLSKDTYDDDLDNLLAQIGDQYADLFLAAKNLSDAILLSDILRVNTEITKAPLSASMIKRYDEHHQDLTLLKALVRQQLPEKYKEIFFDQSKNGYAGYIDGGASQEEFYKFIKPILEKMDGTEELLVKLNREDLLRKQRTFDNGSIPHQIHLGELHAILRRQEDFYPFLKDNREKIEKILTFRIPYYVGPLARGNSRFAWMTRKSEETITPWNFEEVVDKGASAQSFIERMTNFDKNLPNEKVLPKHSLLYEYFTVYNELTKVKYVTEGMRKPAFLSGEQKKAIVDLLFKTNRKVTVKQLKEDYFKKIECFDSVEISGVEDRFNASLGTYHDLLKIIKDKDFLDNEENEDILEDIVLTLTLFEDREMIEERLKTYAHLFDDKVMKQLKRRRYTGWGRLSRKLINGIRDKQSGKTILDFLKSDGFANRNFMQLIHDDSLTFKEDIQKAQVSGQGDSLHEHIANLAGSPAIKKGILQTVKVVDELVKVMGRHKPENIVIEMARENQTTQKGQKNSRERMKRIEEGIKELGSQILKEHPVENTQLQNEKLYLYYLQNGRDMYVDQELDINRLSDYDVDHIVPQSFLKDDSIDNKVLTRSDKARGKSDNVPSEEVVKKMKNYWRQLLNAKLITQRKFDNLTKAERGGLSELDKAGFIKRQLVETRQITKHVAQILDSRMNTKYDENDKLIREVKVITLKSKLVSDFRKDFQFYKVREINNYHHAHDAYLNAVVGTALIKKYPKLESEFVYGDYKVYDVRKMIAKSEQEIGKATAKYFFYSNIMNFFKTEITLANGEIRKRPLIETNGETGEIVWDKGRDFATVRKVLSMPQVNIVKKTEVQTGGFSKESILPKRNSDKLIARKKDWDPKKYGGFDSPTVAYSVLVVAKVEKGKSKKLKSVKELLGITIMERSSFEKNPIDFLEAKGYKEVKKDLIIKLPKYSLFELENGRKRMLASAGELQKGNELALPSKYVNFLYLASHYEKLKGSPEDNEQKQLFVEQHKHYLDEIIEQISEFSKRVILADANLDKVLSAYNKHRDKPIREQAENIIHLFTLTNLGAPAAFKYFDTTIDRKRYTSTKEVLDATLIHQSITGLYETRIDLSQLGGDGGGGSGGSGGSGGSGGTLNIEDEYRLHETSKEPDVSLGSTWLSDFPQAWAETGGMGLAVRQAPLIIPLKATSTPVSIKQYPMSQEARLGIKPHIQRLLDQGILVPCQSPWNTPLLPVKKPGTNDYRPVQDLREVNKRVEDIHPTVPNPYNLLSGLPPSHQWYTVLDLKDAFFCLRLHPTSQPLFAFEWRDPEMGISGQLTWTRLPQGFKNSPTLFNEALHRDLADFRIQHPDLILLQYVDDLLLAATSELDCQQGTRALLQTLGNLGYRASAKKAQICQKQVKYLGYLLKEGQRWLTEARKETVMGQPTPKTPRQLREFLGKAGFCRLFIPGFAEMAAPLYPLTKPGTLFNWGPDQQKAYQEIKQALLTAPALGLPDLTKPFELFVDEKQGYAKGVLTQKLGPWRRPVAYLSKKLDPVAAGWPPCLRMVAAIAVLTKDAGKLTMGQPLVILAPHAVEALVKQPPDRWLSNARMTHYQALLLDTDRVQFGPVVALNPATLLPLPEEGLQHNCLDILAEAHGTRPDLTDQPLPDADHTWYTDGSSLLQEGQRKAGAAVTTETEVIWAKALPAGTSAQRAELIALTQALKMAEGKKLNVYTDSRYAFATAHIHGEIYRRRGWLTSEGKEIKNKDEILALLKALFLPKRLSIIHCPGHQKGHSAEARGNRMADQAARKAAITETPDTSTLLIENSSPSGGSKRTADGSEFEAGKRTADGSEFEKRTADGSEFESPKKKAKVE

SEQ ID NO: 2688 - protein, 2116 aa, synthetic construct
MPAAKRVKLDGGDKKYSIGLDIGTNSVGWAVITDEYKVPSKKFKVLGNTDRHSIKKNLIGALLFDSGETAEATRLKRTARRRYTRRKNRICYLQEIFSNEMAKVDDSFFHRLEESFLVEEDKKHERHPIFGNIVDEVAYHEKYPTIYHLRKKLVDSTDKADLRLIYLALAHMIKFRGHFLIEGDLNPDNSDVDKLFIQLVQTYNQLFEENPINASGVDAKAILSARLSKSRRLENLIAQLPGEKKNGLFGNLIALSLGLTPNFKSNFDLAEDAKLQLSKDTYDDDLDNLLAQIGDQYADLFLAAKNLSDAILLSDILRVNTEITKAPLSASMIKRYDEHHQDLTLLKALVRQQLPEKYKEIFFDQSKNGYAGYIDGGASQEEFYKFIKPILEKMDGTEELLVKLNREDLLRKQRTFDNGSIPHQIHLGELHAILRRQEDFYPFLKDNREKIEKILTFRIPYYVGPLARGNSRFAWMTRKSEETITPWNFEEVVDKGASAQSFIERMTNFDKNLPNEKVLPKHSLLYEYFTVYNELTKVKYVTEGMRKPAFLSGEQKKAIVDLLFKTNRKVTVKQLKEDYFKKIECFDSVEISGVEDRFNASLGTYHDLLKIIKDKDFLDNEENEDILEDIVLTLTLFEDREMIEERLKTYAHLFDDKVMKQLKRRRYTGWGRLSRKLINGIRDKQSGKTILDFLKSDGFANRNFMQLIHDDSLTFKEDIQKAQVSGQGDSLHEHIANLAGSPAIKKGILQTVKVVDELVKVMGRHKPENIVIEMARENQTTQKGQKNSRERMKRIEEGIKELGSQILKEHPVENTQLQNEKLYLYYLQNGRDMYVDQELDINRLSDYDVDHIVPQSFLKDDSIDNKVLTRSDKARGKSDNVPSEEVVKKMKNYWRQLLNAKLITQRKFDNLTKAERGGLSELDKAGFIKRQLVETRQITKHVAQILDSRMNTKYDENDKLIREVKVITLKSKLVSDFRKDFQFYKVREINNYHHAHDAYLNAVVGTALIKKYPKLESEFVYGDYKVYDVRKMIAKSEQEIGKATAKYFFYSNIMNFFKTEITLANGEIRKRPLIETNGETGEIVWDKGRDFATVRKVLSMPQVNIVKKTEVQTGGFSKESILPKRNSDKLIARKKDWDPKKYGGFDSPTVAYSVLVVAKVEKGKSKKLKSVKELLGITIMERSSFEKNPIDFLEAKGYKEVKKDLIIKLPKYSLFELENGRKRMLASAGELQKGNELALPSKYVNFLYLASHYEKLKGSPEDNEQKQLFVEQHKHYLDEIIEQISEFSKRVILADANLDKVLSAYNKHRDKPIREQAENIIHLFTLTNLGAPAAFKYFDTTIDRKRYTSTKEVLDATLIHQSITGLYETRIDLSQLGGDGGGGGGSSEAAAKGGTLNIEDEYRLHETSKEPDVSLGSTWLSDFPQAWAETGGMGLAVRQAPLIIPLKATSTPVSIKQYPMSQEARLGIKPHIQRLLDQGILVPCQSPWNTPLLPVKKPGTNDYRPVQDLREVNKRVEDIHPTVPNPYNLLSGLPPSHQWYTVLDLKDAFFCLRLHPTSQPLFAFEWRDPEMGISGQLTWTRLPQGFKNSPTLFNEALHRDLADFRIQHPDLILLQYVDDLLLAATSELDCQQGTRALLQTLGNLGYRASAKKAQICQKQVKYLGYLLKEGQRWLTEARKETVMGQPTPKTPRQLREFLGKAGFCRLFIPGFAEMAAPLYPLTKPGTLFNWGPDQQKAYQEIKQALLTAPALGLPDLTKPFELFVDEKQGYAKGVLTQKLGPWRRPVAYLSKKLDPVAAGWPPCLRMVAAIAVLTKDAGKLTMGQPLVILAPHAVEALVKQPPDRWLSNARMTHYQALLLDTDRVQFGPVVALNPATLLPLPEEGLQHNCLDILAEAHGTRPDLTDQPLPDADHTWYTDGSSLLQEGQRKAGAAVTTETEVIWAKALPAGTSAQRAELIALTQALKMAEGKKLNVYTDSRYAFATAHIHGEIYRRRGWLTSEGKEIKNKDEILALLKALFLPKRLSIIHCPGHQKGHSAEARGNRMADQAARKAAITETPDTSTLLIENSSPSGGSKRTADGSEFEAGKRTADGSEFEKRTADGSEFESPKKKAKVE

SEQ ID NO: 2689 - protein, 2114 aa, synthetic construct
MPAAKRVKLDGGDKKYSIGLDIGTNSVGWAVITDEYKVPSKKFKVLGNTDRHSIKKNLIGALLFDSGETAEATRLKRTARRRYTRRKNRICYLQEIFSNEMAKVDDSFFHRLEESFLVEEDKKHERHPIFGNIVDEVAYHEKYPTIYHLRKKLVDSTDKADLRLIYLALAHMIKFRGHFLIEGDLNPDNSDVDKLFIQLVQTYNQLFEENPINASGVDAKAILSARLSKSRRLENLIAQLPGEKKNGLFGNLIALSLGLTPNFKSNFDLAEDAKLQLSKDTYDDDLDNLLAQIGDQYADLFLAAKNLSDAILLSDILRVNTEITKAPLSASMIKRYDEHHQDLTLLKALVRQQLPEKYKEIFFDQSKNGYAGYIDGGASQEEFYKFIKPILEKMDGTEELLVKLNREDLLRKQRTFDNGSIPHQIHLGELHAILRRQEDFYPFLKDNREKIEKILTFRIPYYVGPLARGNSRFAWMTRKSEETITPWNFEEVVDKGASAQSFIERMTNFDKNLPNEKVLPKHSLLYEYFTVYNELTKVKYVTEGMRKPAFLSGEQKKAIVDLLFKTNRKVTVKQLKEDYFKKIECFDSVEISGVEDRFNASLGTYHDLLKIIKDKDFLDNEENEDILEDIVLTLTLFEDREMIEERLKTYAHLFDDKVMKQLKRRRYTGWGRLSRKLINGIRDKQSGKTILDFLKSDGFANRNFMQLIHDDSLTFKEDIQKAQVSGQGDSLHEHIANLAGSPAIKKGILQTVKVVDELVKVMGRHKPENIVIEMARENQTTQKGQKNSRERMKRIEEGIKELGSQILKEHPVENTQLQNEKLYLYYLQNGRDMYVDQELDINRLSDYDVDHIVPQSFLKDDSIDNKVLTRSDKARGKSDNVPSEEVVKKMKNYWRQLLNAKLITQRKFDNLTKAERGGLSELDKAGFIKRQLVETRQITKHVAQILDSRMNTKYDENDKLIREVKVITLKSKLVSDFRKDFQFYKVREINNYHHAHDAYLNAVVGTALIKKYPKLESEFVYGDYKVYDVRKMIAKSEQEIGKATAKYFFYSNIMNFFKTEITLANGEIRKRPLIETNGETGEIVWDKGRDFATVRKVLSMPQVNIVKKTEVQTGGFSKESILPKRNSDKLIARKKDWDPKKYGGFDSPTVAYSVLVVAKVEKGKSKKLKSVKELLGITIMERSSFEKNPIDFLEAKGYKEVKKDLIIKLPKYSLFELENGRKRMLASAGELQKGNELALPSKYVNFLYLASHYEKLKGSPEDNEQKQLFVEQHKHYLDEIIEQISEFSKRVILADANLDKVLSAYNKHRDKPIREQAENIIHLFTLTNLGAPAAFKYFDTTIDRKRYTSTKEVLDATLIHQSITGLYETRIDLSQLGGDGGGSSPAPGGSGGTLNIEDEYRLHETSKEPDVSLGSTWLSDFPQAWAETGGMGLAVRQAPLIIPLKATSTPVSIKQYPMSQEARLGIKPHIQRLLDQGILVPCQSPWNTPLLPVKKPGTNDYRPVQDLREVNKRVEDIHPTVPNPYNLLSGLPPSHQWYTVLDLKDAFFCLRLHPTSQPLFAFEWRDPEMGISGQLTWTRLPQGFKNSPTLFNEALHRDLADFRIQHPDLILLQYVDDLLLAATSELDCQQGTRALLQTLGNLGYRASAKKAQICQKQVKYLGYLLKEGQRWLTEARKETVMGQPTPKTPRQLREFLGKAGFCRLFIPGFAEMAAPLYPLTKPGTLFNWGPDQQKAYQEIKQALLTAPALGLPDLTKPFELFVDEKQGYAKGVLTQKLGPWRRPVAYLSKKLDPVAAGWPPCLRMVAAIAVLTKDAGKLTMGQPLVILAPHAVEALVKQPPDRWLSNARMTHYQALLLDTDRVQFGPVVALNPATLLPLPEEGLQHNCLDILAEAHGTRPDLTDQPLPDADHTWYTDGSSLLQEGQRKAGAAVTTETEVIWAKALPAGTSAQRAELIALTQALKMAEGKKLNVYTDSRYAFATAHIHGEIYRRRGWLTSEGKEIKNKDEILALLKALFLPKRLSIIHCPGHQKGHSAEARGNRMADQAARKAAITETPDTSTLLIENSSPSGGSKRTADGSEFEAGKRTADGSEFEKRTADGSEFESPKKKAKVE

SEQ ID NO: 2690 - protein, 2116 aa, synthetic construct
MPAAKRVKLDGGDKKYSIGLDIGTNSVGWAVITDEYKVPSKKFKVLGNTDRHSIKKNLIGALLFDSGETAEATRLKRTARRRYTRRKNRICYLQEIFSNEMAKVDDSFFHRLEESFLVEEDKKHERHPIFGNIVDEVAYHEKYPTIYHLRKKLVDSTDKADLRLIYLALAHMIKFRGHFLIEGDLNPDNSDVDKLFIQLVQTYNQLFEENPINASGVDAKAILSARLSKSRRLENLIAQLPGEKKNGLFGNLIALSLGLTPNFKSNFDLAEDAKLQLSKDTYDDDLDNLLAQIGDQYADLFLAAKNLSDAILLSDILRVNTEITKAPLSASMIKRYDEHHQDLTLLKALVRQQLPEKYKEIFFDQSKNGYAGYIDGGASQEEFYKFIKPILEKMDGTEELLVKLNREDLLRKQRTFDNGSIPHQIHLGELHAILRRQEDFYPFLKDNREKIEKILTFRIPYYVGPLARGNSRFAWMTRKSEETITPWNFEEVVDKGASAQSFIERMTNFDKNLPNEKVLPKHSLLYEYFTVYNELTKVKYVTEGMRKPAFLSGEQKKAIVDLLFKTNRKVTVKQLKEDYFKKIECFDSVEISGVEDRFNASLGTYHDLLKIIKDKDFLDNEENEDILEDIVLTLTLFEDREMIEERLKTYAHLFDDKVMKQLKRRRYTGWGRLSRKLINGIRDKQSGKTILDFLKSDGFANRNFMQLIHDDSLTFKEDIQKAQVSGQGDSLHEHIANLAGSPAIKKGILQTVKVVDELVKVMGRHKPENIVIEMARENQTTQKGQKNSRERMKRIEEGIKELGSQILKEHPVENTQLQNEKLYLYYLQNGRDMYVDQELDINRLSDYDVDHIVPQSFLKDDSIDNKVLTRSDKARGKSDNVPSEEVVKKMKNYWRQLLNAKLITQRKFDNLTKAERGGLSELDKAGFIKRQLVETRQITKHVAQILDSRMNTKYDENDKLIREVKVITLKSKLVSDFRKDFQFYKVREINNYHHAHDAYLNAVVGTALIKKYPKLESEFVYGDYKVYDVRKMIAKSEQEIGKATAKYFFYSNIMNFFKTEITLANGEIRKRPLIETNGETGEIVWDKGRDFATVRKVLSMPQVNIVKKTEVQTGGFSKESILPKRNSDKLIARKKDWDPKKYGGFDSPTVAYSVLVVAKVEKGKSKKLKSVKELLGITIMERSSFEKNPIDFLEAKGYKEVKKDLIIKLPKYSLFELENGRKRMLASAGELQKGNELALPSKYVNFLYLASHYEKLKGSPEDNEQKQLFVEQHKHYLDEIIEQISEFSKRVILADANLDKVLSAYNKHRDKPIREQAENIIHLFTLTNLGAPAAFKYFDTTIDRKRYTSTKEVLDATLIHQSITGLYETRIDLSQLGGDGGGGSEAAAKPAPGGTLNIEDEYRLHETSKEPDVSLGSTWLSDFPQAWAETGGMGLAVRQAPLIIPLKATSTPVSIKQYPMSQEARLGIKPHIQRLLDQGILVPCQSPWNTPLLPVKKPGTNDYRPVQDLREVNKRVEDIHPTVPNPYNLLSGLPPSHQWYTVLDLKDAFFCLRLHPTSQPLFAFEWRDPEMGISGQLTWTRLPQGFKNSPTLFNEALHRDLADFRIQHPDLILLQYVDDLLLAATSELDCQQGTRALLQTLGNLGYRASAKKAQICQKQVKYLGYLLKEGQRWLTEARKETVMGQPTPKTPRQLREFLGKAGFCRLFIPGFAEMAAPLYPLTKPGTLFNWGPDQQKAYQEIKQALLTAPALGLPDLTKPFELFVDEKQGYAKGVLTQKLGPWRRPVAYLSKKLDPVAAGWPPCLRMVAAIAVLTKDAGKLTMGQPLVILAPHAVEALVKQPPDRWLSNARMTHYQALLLDTDRVQFGPVVALNPATLLPLPEEGLQHNCLDILAEAHGTRPDLTDQPLPDADHTWYTDGSSLLQEGQRKAGAAVTTETEVIWAKALPAGTSAQRAELIALTQALKMAEGKKLNVYTDSRYAFATAHIHGEIYRRRGWLTSEGKEIKNKDEILALLKALFLPKRLSIIHCPGHQKGHSAEARGNRMADQAARKAAITETPDTSTLLIENSSPSGGSKRTADGSEFEAGKRTADGSEFEKRTADGSEFESPKKKAKVE

SEQ ID NO: 2691 - protein, 2110 aa, synthetic construct
MPAAKRVKLDGGDKKYSIGLDIGTNSVGWAVITDEYKVPSKKFKVLGNTDRHSIKKNLIGALLFDSGETAEATRLKRTARRRYTRRKNRICYLQEIFSNEMAKVDDSFFHRLEESFLVEEDKKHERHPIFGNIVDEVAYHEKYPTIYHLRKKLVDSTDKADLRLIYLALAHMIKFRGHFLIEGDLNPDNSDVDKLFIQLVQTYNQLFEENPINASGVDAKAILSARLSKSRRLENLIAQLPGEKKNGLFGNLIALSLGLTPNFKSNFDLAEDAKLQLSKDTYDDDLDNLLAQIGDQYADLFLAAKNLSDAILLSDILRVNTEITKAPLSASMIKRYDEHHQDLTLLKALVRQQLPEKYKEIFFDQSKNGYAGYIDGGASQEEFYKFIKPILEKMDGTEELLVKLNREDLLRKQRTFDNGSIPHQIHLGELHAILRRQEDFYPFLKDNREKIEKILTFRIPYYVGPLARGNSRFAWMTRKSEETITPWNFEEVVDKGASAQSFIERMTNFDKNLPNEKVLPKHSLLYEYFTVYNELTKVKYVTEGMRKPAFLSGEQKKAIVDLLFKTNRKVTVKQLKEDYFKKIECFDSVEISGVEDRFNASLGTYHDLLKIIKDKDFLDNEENEDILEDIVLTLTLFEDREMIEERLKTYAHLFDDKVMKQLKRRRYTGWGRLSRKLINGIRDKQSGKTILDFLKSDGFANRNFMQLIHDDSLTFKEDIQKAQVSGQGDSLHEHIANLAGSPAIKKGILQTVKVVDELVKVMGRHKPENIVIEMARENQTTQKGQKNSRERMKRIEEGIKELGSQILKEHPVENTQLQNEKLYLYYLQNGRDMYVDQELDINRLSDYDVDHIVPQSFLKDDSIDNKVLTRSDKARGKSDNVPSEEVVKKMKNYWRQLLNAKLITQRKFDNLTKAERGGLSELDKAGFIKRQLVETRQITKHVAQILDSRMNTKYDENDKLIREVKVITLKSKLVSDFRKDFQFYKVREINNYHHAHDAYLNAVVGTALIKKYPKLESEFVYGDYKVYDVRKMIAKSEQEIGKATAKYFFYSNIMNFFKTEITLANGEIRKRPLIETNGETGEIVWDKGRDFATVRKVLSMPQVNIVKKTEVQTGGFSKESILPKRNSDKLIARKKDWDPKKYGGFDSPTVAYSVLVVAKVEKGKSKKLKSVKELLGITIMERSSFEKNPIDFLEAKGYKEVKKDLIIKLPKYSLFELENGRKRMLASAGELQKGNELALPSKYVNFLYLASHYEKLKGSPEDNEQKQLFVEQHKHYLDEIIEQISEFSKRVILADANLDKVLSAYNKHRDKPIREQAENIIHLFTLTNLGAPAAFKYFDTTIDRKRYTSTKEVLDATLIHQSITGLYETRIDLSQLGGDGGGGGGSGGTLNIEDEYRLHETSKEPDVSLGSTWLSDFPQAWAETGGMGLAVRQAPLIIPLKATSTPVSIKQYPMSQEARLGIKPHIQRLLDQGILVPCQSPWNTPLLPVKKPGTNDYRPVQDLREVNKRVEDIHPTVPNPYNLLSGLPPSHQWYTVLDLKDAFFCLRLHPTSQPLFAFEWRDPEMGISGQLTWTRLPQGFKNSPTLFNEALHRDLADFRIQHPDLILLQYVDDLLLAATSELDCQQGTRALLQTLGNLGYRASAKKAQICQKQVKYLGYLLKEGQRWLTEARKETVMGQPTPKTPRQLREFLGKAGFCRLFIPGFAEMAAPLYPLTKPGTLFNWGPDQQKAYQEIKQALLTAPALGLPDLTKPFELFVDEKQGYAKGVLTQKLGPWRRPVAYLSKKLDPVAAGWPPCLRMVAAIAVLTKDAGKLTMGQPLVILAPHAVEALVKQPPDRWLSNARMTHYQALLLDTDRVQFGPVVALNPATLLPLPEEGLQHNCLDILAEAHGTRPDLTDQPLPDADHTWYTDGSSLLQEGQRKAGAAVTTETEVIWAKALPAGTSAQRAELIALTQALKMAEGKKLNVYTDSRYAFATAHIHGEIYRRRGWLTSEGKEIKNKDEILALLKALFLPKRLSIIHCPGHQKGHSAEARGNRMADQAARKAAITETPDTSTLLIENSSPSGGSKRTADGSEFEAGKRTADGSEFEKRTADGSEFESPKKKAKVE

SEQ ID NO: 2692 - protein, 2116 aa, synthetic construct
MPAAKRVKLDGGDKKYSIGLDIGTNSVGWAVITDEYKVPSKKFKVLGNTDRHSIKKNLIGALLFDSGETAEATRLKRTARRRYTRRKNRICYLQEIFSNEMAKVDDSFFHRLEESFLVEEDKKHERHPIFGNIVDEVAYHEKYPTIYHLRKKLVDSTDKADLRLIYLALAHMIKFRGHFLIEGDLNPDNSDVDKLFIQLVQTYNQLFEENPINASGVDAKAILSARLSKSRRLENLIAQLPGEKKNGLFGNLIALSLGLTPNFKSNFDLAEDAKLQLSKDTYDDDLDNLLAQIGDQYADLFLAAKNLSDAILLSDILRVNTEITKAPLSASMIKRYDEHHQDLTLLKALVRQQLPEKYKEIFFDQSKNGYAGYIDGGASQEEFYKFIKPILEKMDGTEELLVKLNREDLLRKQRTFDNGSIPHQIHLGELHAILRRQEDFYPFLKDNREKIEKILTFRIPYYVGPLARGNSRFAWMTRKSEETITPWNFEEVVDKGASAQSFIERMTNFDKNLPNEKVLPKHSLLYEYFTVYNELTKVKYVTEGMRKPAFLSGEQKKAIVDLLFKTNRKVTVKQLKEDYFKKIECFDSVEISGVEDRFNASLGTYHDLLKIIKDKDFLDNEENEDILEDIVLTLTLFEDREMIEERLKTYAHLFDDKVMKQLKRRRYTGWGRLSRKLINGIRDKQSGKTILDFLKSDGFANRNFMQLIHDDSLTFKEDIQKAQVSGQGDSLHEHIANLAGSPAIKKGILQTVKVVDELVKVMGRHKPENIVIEMARENQTTQKGQKNSRERMKRIEEGIKELGSQILKEHPVENTQLQNEKLYLYYLQNGRDMYVDQELDINRLSDYDVDHIVPQSFLKDDSIDNKVLTRSDKARGKSDNVPSEEVVKKMKNYWRQLLNAKLITQRKFDNLTKAERGGLSELDKAGFIKRQLVETRQITKHVAQILDSRMNTKYDENDKLIREVKVITLKSKLVSDFRKDFQFYKVREINNYHHAHDAYLNAVVGTALIKKYPKLESEFVYGDYKVYDVRKMIAKSEQEIGKATAKYFFYSNIMNFFKTEITLANGEIRKRPLIETNGETGEIVWDKGRDFATVRKVLSMPQVNIVKKTEVQTGGFSKESILPKRNSDKLIARKKDWDPKKYGGFDSPTVAYSVLVVAKVEKGKSKKLKSVKELLGITIMERSSFEKNPIDFLEAKGYKEVKKDLIIKLPKYSLFELENGRKRMLASAGELQKGNELALPSKYVNFLYLASHYEKLKGSPEDNEQKQLFVEQHKHYLDEIIEQISEFSKRVILADANLDKVLSAYNKHRDKPIREQAENIIHLFTLTNLGAPAAFKYFDTTIDRKRYTSTKEVLDATLIHQSITGLYETRIDLSQLGGDGGGGSGGGEAAAKGGTLNIEDEYRLHETSKEPDVSLGSTWLSDFPQAWAETGGMGLAVRQAPLIIPLKATSTPVSIKQYPMSQEARLGIKPHIQRLLDQGILVPCQSPWNTPLLPVKKPGTNDYRPVQDLREVNKRVEDIHPTVPNPYNLLSGLPPSHQWYTVLDLKDAFFCLRLHPTSQPLFAFEWRDPEMGISGQLTWTRLPQGFKNSPTLFNEALHRDLADFRIQHPDLILLQYVDDLLLAATSELDCQQGTRALLQTLGNLGYRASAKKAQICQKQVKYLGYLLKEGQRWLTEARKETVMGQPTPKTPRQLREFLGKAGFCRLFIPGFAEMAAPLYPLTKPGTLFNWGPDQQKAYQEIKQALLTAPALGLPDLTKPFELFVDEKQGYAKGVLTQKLGPWRRPVAYLSKKLDPVAAGWPPCLRMVAAIAVLTKDAGKLTMGQPLVILAPHAVEALVKQPPDRWLSNARMTHYQALLLDTDRVQFGPVVALNPATLLPLPEEGLQHNCLDILAEAHGTRPDLTDQPLPDADHTWYTDGSSLLQEGQRKAGAAVTTETEVIWAKALPAGTSAQRAELIALTQALKMAEGKKLNVYTDSRYAFATAHIHGEIYRRRGWLTSEGKEIKNKDEILALLKALFLPKRLSIIHCPGHQKGHSAEARGNRMADQAARKAAITETPDTSTLLIENSSPSGGSKRTADGSEFEAGKRTADGSEFEKRTADGSEFESPKKKAKVE

SEQ ID NO: 2693 - protein, 2111 aa, synthetic construct
MPAAKRVKLDGGDKKYSIGLDIGTNSVGWAVITDEYKVPSKKFKVLGNTDRHSIKKNLIGALLFDSGETAEATRLKRTARRRYTRRKNRICYLQEIFSNEMAKVDDSFFHRLEESFLVEEDKKHERHPIFGNIVDEVAYHEKYPTIYHLRKKLVDSTDKADLRLIYLALAHMIKFRGHFLIEGDLNPDNSDVDKLFIQLVQTYNQLFEENPINASGVDAKAILSARLSKSRRLENLIAQLPGEKKNGLFGNLIALSLGLTPNFKSNFDLAEDAKLQLSKDTYDDDLDNLLAQIGDQYADLFLAAKNLSDAILLSDILRVNTEITKAPLSASMIKRYDEHHQDLTLLKALVRQQLPEKYKEIFFDQSKNGYAGYIDGGASQEEFYKFIKPILEKMDGTEELLVKLNREDLLRKQRTFDNGSIPHQIHLGELHAILRRQEDFYPFLKDNREKIEKILTFRIPYYVGPLARGNSRFAWMTRKSEETITPWNFEEVVDKGASAQSFIERMTNFDKNLPNEKVLPKHSLLYEYFTVYNELTKVKYVTEGMRKPAFLSGEQKKAIVDLLFKTNRKVTVKQLKEDYFKKIECFDSVEISGVEDRFNASLGTYHDLLKIIKDKDFLDNEENEDILEDIVLTLTLFEDREMIEERLKTYAHLFDDKVMKQLKRRRYTGWGRLSRKLINGIRDKQSGKTILDFLKSDGFANRNFMQLIHDDSLTFKEDIQKAQVSGQGDSLHEHIANLAGSPAIKKGILQTVKVVDELVKVMGRHKPENIVIEMARENQTTQKGQKNSRERMKRIEEGIKELGSQILKEHPVENTQLQNEKLYLYYLQNGRDMYVDQELDINRLSDYDVDHIVPQSFLKDDSIDNKVLTRSDKARGKSDNVPSEEVVKKMKNYWRQLLNAKLITQRKFDNLTKAERGGLSELDKAGFIKRQLVETRQITKHVAQILDSRMNTKYDENDKLIREVKVITLKSKLVSDFRKDFQFYKVREINNYHHAHDAYLNAVVGTALIKKYPKLESEFVYGDYKVYDVRKMIAKSEQEIGKATAKYFFYSNIMNFFKTEITLANGEIRKRPLIETNGETGEIVWDKGRDFATVRKVLSMPQVNIVKKTEVQTGGFSKESILPKRNSDKLIARKKDWDPKKYGGFDSPTVAYSVLVVAKVEKGKSKKLKSVKELLGITIMERSSFEKNPIDFLEAKGYKEVKKDLIIKLPKYSLFELENGRKRMLASAGELQKGNELALPSKYVNFLYLASHYEKLKGSPEDNEQKQLFVEQHKHYLDEIIEQISEFSKRVILADANLDKVLSAYNKHRDKPIREQAENIIHLFTLTNLGAPAAFKYFDTTIDRKRYTSTKEVLDATLIHQSITGLYETRIDLSQLGGDGGGGSGGSGGTLNIEDEYRLHETSKEPDVSLGSTWLSDFPQAWAETGGMGLAVRQAPLIIPLKATSTPVSIKQYPMSQEARLGIKPHIQRLLDQGILVPCQSPWNTPLLPVKKPGTNDYRPVQDLREVNKRVEDIHPTVPNPYNLLSGLPPSHQWYTVLDLKDAFFCLRLHPTSQPLFAFEWRDPEMGISGQLTWTRLPQGFKNSPTLFNEALHRDLADFRIQHPDLILLQYVDDLLLAATSELDCQQGTRALLQTLGNLGYRASAKKAQICQKQVKYLGYLLKEGQRWLTEARKETVMGQPTPKTPRQLREFLGKAGFCRLFIPGFAEMAAPLYPLTKPGTLFNWGPDQQKAYQEIKQALLTAPALGLPDLTKPFELFVDEKQGYAKGVLTQKLGPWRRPVAYLSKKLDPVAAGWPPCLRMVAAIAVLTKDAGKLTMGQPLVILAPHAVEALVKQPPDRWLSNARMTHYQALLLDTDRVQFGPVVALNPATLLPLPEEGLQHNCLDILAEAHGTRPDLTDQPLPDADHTWYTDGSSLLQEGQRKAGAAVTTETEVIWAKALPAGTSAQRAELIALTQALKMAEGKKLNVYTDSRYAFATAHIHGEIYRRRGWLTSEGKEIKNKDEILALLKALFLPKRLSIIHCPGHQKGHSAEARGNRMADQAARKAAITETPDTSTLLIENSSPSGGSKRTADGSEFEAGKRTADGSEFEKRTADGSEFESPKKKAKVE

SEQ ID NO: 2694 - protein, 2114 aa, synthetic construct
MPAAKRVKLDGGDKKYSIGLDIGTNSVGWAVITDEYKVPSKKFKVLGNTDRHSIKKNLIGALLFDSGETAEATRLKRTARRRYTRRKNRICYLQEIFSNEMAKVDDSFFHRLEESFLVEEDKKHERHPIFGNIVDEVAYHEKYPTIYHLRKKLVDSTDKADLRLIYLALAHMIKFRGHFLIEGDLNPDNSDVDKLFIQLVQTYNQLFEENPINASGVDAKAILSARLSKSRRLENLIAQLPGEKKNGLFGNLIALSLGLTPNFKSNFDLAEDAKLQLSKDTYDDDLDNLLAQIGDQYADLFLAAKNLSDAILLSDILRVNTEITKAPLSASMIKRYDEHHQDLTLLKALVRQQLPEKYKEIFFDQSKNGYAGYIDGGASQEEFYKFIKPILEKMDGTEELLVKLNREDLLRKQRTFDNGSIPHQIHLGELHAILRRQEDFYPFLKDNREKIEKILTFRIPYYVGPLARGNSRFAWMTRKSEETITPWNFEEVVDKGASAQSFIERMTNFDKNLPNEKVLPKHSLLYEYFTVYNELTKVKYVTEGMRKPAFLSGEQKKAIVDLLFKTNRKVTVKQLKEDYFKKIECFDSVEISGVEDRFNASLGTYHDLLKIIKDKDFLDNEENEDILEDIVLTLTLFEDREMIEERLKTYAHLFDDKVMKQLKRRRYTGWGRLSRKLINGIRDKQSGKTILDFLKSDGFANRNFMQLIHDDSLTFKEDIQKAQVSGQGDSLHEHIANLAGSPAIKKGILQTVKVVDELVKVMGRHKPENIVIEMARENQTTQKGQKNSRERMKRIEEGIKELGSQILKEHPVENTQLQNEKLYLYYLQNGRDMYVDQELDINRLSDYDVDHIVPQSFLKDDSIDNKVLTRSDKARGKSDNVPSEEVVKKMKNYWRQLLNAKLITQRKFDNLTKAERGGLSELDKAGFIKRQLVETRQITKHVAQILDSRMNTKYDENDKLIREVKVITLKSKLVSDFRKDFQFYKVREINNYHHAHDAYLNAVVGTALIKKYPKLESEFVYGDYKVYDVRKMIAKSEQEIGKATAKYFFYSNIMNFFKTEITLANGEIRKRPLIETNGETGEIVWDKGRDFATVRKVLSMPQVNIVKKTEVQTGGFSKESILPKRNSDKLIARKKDWDPKKYGGFDSPTVAYSVLVVAKVEKGKSKKLKSVKELLGITIMERSSFEKNPIDFLEAKGYKEVKKDLIIKLPKYSLFELENGRKRMLASAGELQKGNELALPSKYVNFLYLASHYEKLKGSPEDNEQKQLFVEQHKHYLDEIIEQISEFSKRVILADANLDKVLSAYNKHRDKPIREQAENIIHLFTLTNLGAPAAFKYFDTTIDRKRYTSTKEVLDATLIHQSITGLYETRIDLSQLGGDGGGSSGGSGGGGGTLNIEDEYRLHETSKEPDVSLGSTWLSDFPQAWAETGGMGLAVRQAPLIIPLKATSTPVSIKQYPMSQEARLGIKPHIQRLLDQGILVPCQSPWNTPLLPVKKPGTNDYRPVQDLREVNKRVEDIHPTVPNPYNLLSGLPPSHQWYTVLDLKDAFFCLRLHPTSQPLFAFEWRDPEMGISGQLTWTRLPQGFKNSPTLFNEALHRDLADFRIQHPDLILLQYVDDLLLAATSELDCQQGTRALLQTLGNLGYRASAKKAQICQKQVKYLGYLLKEGQRWLTEARKETVMGQPTPKTPRQLREFLGKAGFCRLFIPGFAEMAAPLYPLTKPGTLFNWGPDQQKAYQEIKQALLTAPALGLPDLTKPFELFVDEKQGYAKGVLTQKLGPWRRPVAYLSKKLDPVAAGWPPCLRMVAAIAVLTKDAGKLTMGQPLVILAPHAVEALVKQPPDRWLSNARMTHYQALLLDTDRVQFGPVVALNPATLLPLPEEGLQHNCLDILAEAHGTRPDLTDQPLPDADHTWYTDGSSLLQEGQRKAGAAVTTETEVIWAKALPAGTSAQRAELIALTQALKMAEGKKLNVYTDSRYAFATAHIHGEIYRRRGWLTSEGKEIKNKDEILALLKALFLPKRLSIIHCPGHQKGHSAEARGNRMADQAARKAAITETPDTSTLLIENSSPSGGSKRTADGSEFEAGKRTADGSEFEKRTADGSEFESPKKKAKVE

SEQ ID NO: 2695 - protein, 2116 aa, synthetic construct
MPAAKRVKLDGGDKKYSIGLDIGTNSVGWAVITDEYKVPSKKFKVLGNTDRHSIKKNLIGALLFDSGETAEATRLKRTARRRYTRRKNRICYLQEIFSNEMAKVDDSFFHRLEESFLVEEDKKHERHPIFGNIVDEVAYHEKYPTIYHLRKKLVDSTDKADLRLIYLALAHMIKFRGHFLIEGDLNPDNSDVDKLFIQLVQTYNQLFEENPINASGVDAKAILSARLSKSRRLENLIAQLPGEKKNGLFGNLIALSLGLTPNFKSNFDLAEDAKLQLSKDTYDDDLDNLLAQIGDQYADLFLAAKNLSDAILLSDILRVNTEITKAPLSASMIKRYDEHHQDLTLLKALVRQQLPEKYKEIFFDQSKNGYAGYIDGGASQEEFYKFIKPILEKMDGTEELLVKLNREDLLRKQRTFDNGSIPHQIHLGELHAILRRQEDFYPFLKDNREKIEKILTFRIPYYVGPLARGNSRFAWMTRKSEETITPWNFEEVVDKGASAQSFIERMTNFDKNLPNEKVLPKHSLLYEYFTVYNELTKVKYVTEGMRKPAFLSGEQKKAIVDLLFKTNRKVTVKQLKEDYFKKIECFDSVEISGVEDRFNASLGTYHDLLKIIKDKDFLDNEENEDILEDIVLTLTLFEDREMIEERLKTYAHLFDDKVMKQLKRRRYTGWGRLSRKLINGIRDKQSGKTILDFLKSDGFANRNFMQLIHDDSLTFKEDIQKAQVSGQGDSLHEHIANLAGSPAIKKGILQTVKVVDELVKVMGRHKPENIVIEMARENQTTQKGQKNSRERMKRIEEGIKELGSQILKEHPVENTQLQNEKLYLYYLQNGRDMYVDQELDINRLSDYDVDHIVPQSFLKDDSIDNKVLTRSDKARGKSDNVPSEEVVKKMKNYWRQLLNAKLITQRKFDNLTKAERGGLSELDKAGFIKRQLVETRQITKHVAQILDSRMNTKYDENDKLIREVKVITLKSKLVSDFRKDFQFYKVREINNYHHAHDAYLNAVVGTALIKKYPKLESEFVYGDYKVYDVRKMIAKSEQEIGKATAKYFFYSNIMNFFKTEITLANGEIRKRPLIETNGETGEIVWDKGRDFATVRKVLSMPQVNIVKKTEVQTGGFSKESILPKRNSDKLIARKKDWDPKKYGGFDSPTVAYSVLVVAKVEKGKSKKLKSVKELLGITIMERSSFEKNPIDFLEAKGYKEVKKDLIIKLPKYSLFELENGRKRMLASAGELQKGNELALPSKYVNFLYLASHYEKLKGSPEDNEQKQLFVEQHKHYLDEIIEQISEFSKRVILADANLDKVLSAYNKHRDKPIREQAENIIHLFTLTNLGAPAAFKYFDTTIDRKRYTSTKEVLDATLIHQSITGLYETRIDLSQLGGDGGEAAAKGGGGSSGGTLNIEDEYRLHETSKEPDVSLGSTWLSDFPQAWAETGGMGLAVRQAPLIIPLKATSTPVSIKQYPMSQEARLGIKPHIQRLLDQGILVPCQSPWNTPLLPVKKPGTNDYRPVQDLREVNKRVEDIHPTVPNPYNLLSGLPPSHQWYTVLDLKDAFFCLRLHPTSQPLFAFEWRDPEMGISGQLTWTRLPQGFKNSPTLFNEALHRDLADFRIQHPDLILLQYVDDLLLAATSELDCQQGTRALLQTLGNLGYRASAKKAQICQKQVKYLGYLLKEGQRWLTEARKETVMGQPTPKTPRQLREFLGKAGFCRLFIPGFAEMAAPLYPLTKPGTLFNWGPDQQKAYQEIKQALLTAPALGLPDLTKPFELFVDEKQGYAKGVLTQKLGPWRRPVAYLSKKLDPVAAGWPPCLRMVAAIAVLTKDAGKLTMGQPLVILAPHAVEALVKQPPDRWLSNARMTHYQALLLDTDRVQFGPVVALNPATLLPLPEEGLQHNCLDILAEAHGTRPDLTDQPLPDADHTWYTDGSSLLQEGQRKAGAAVTTETEVIWAKALPAGTSAQRAELIALTQALKMAEGKKLNVYTDSRYAFATAHIHGEIYRRRGWLTSEGKEIKNKDEILALLKALFLPKRLSIIHCPGHQKGHSAEARGNRMADQAARKAAITETPDTSTLLIENSSPSGGSKRTADGSEFEAGKRTADGSEFEKRTADGSEFESPKKKAKVE

SEQ ID NO: 2696 - protein, 2117 aa, synthetic construct
MPAAKRVKLDGGDKKYSIGLDIGTNSVGWAVITDEYKVPSKKFKVLGNTDRHSIKKNLIGALLFDSGETAEATRLKRTARRRYTRRKNRICYLQEIFSNEMAKVDDSFFHRLEESFLVEEDKKHERHPIFGNIVDEVAYHEKYPTIYHLRKKLVDSTDKADLRLIYLALAHMIKFRGHFLIEGDLNPDNSDVDKLFIQLVQTYNQLFEENPINASGVDAKAILSARLSKSRRLENLIAQLPGEKKNGLFGNLIALSLGLTPNFKSNFDLAEDAKLQLSKDTYDDDLDNLLAQIGDQYADLFLAAKNLSDAILLSDILRVNTEITKAPLSASMIKRYDEHHQDLTLLKALVRQQLPEKYKEIFFDQSKNGYAGYIDGGASQEEFYKFIKPILEKMDGTEELLVKLNREDLLRKQRTFDNGSIPHQIHLGELHAILRRQEDFYPFLKDNREKIEKILTFRIPYYVGPLARGNSRFAWMTRKSEETITPWNFEEVVDKGASAQSFIERMTNFDKNLPNEKVLPKHSLLYEYFTVYNELTKVKYVTEGMRKPAFLSGEQKKAIVDLLFKTNRKVTVKQLKEDYFKKIECFDSVEISGVEDRFNASLGTYHDLLKIIKDKDFLDNEENEDILEDIVLTLTLFEDREMIEERLKTYAHLFDDKVMKQLKRRRYTGWGRLSRKLINGIRDKQSGKTILDFLKSDGFANRNFMQLIHDDSLTFKEDIQKAQVSGQGDSLHEHIANLAGSPAIKKGILQTVKVVDELVKVMGRHKPENIVIEMARENQTTQKGQKNSRERMKRIEEGIKELGSQILKEHPVENTQLQNEKLYLYYLQNGRDMYVDQELDINRLSDYDVDHIVPQSFLKDDSIDNKVLTRSDKARGKSDNVPSEEVVKKMKNYWRQLLNAKLITQRKFDNLTKAERGGLSELDKAGFIKRQLVETRQITKHVAQILDSRMNTKYDENDKLIREVKVITLKSKLVSDFRKDFQFYKVREINNYHHAHDAYLNAVVGTALIKKYPKLESEFVYGDYKVYDVRKMIAKSEQEIGKATAKYFFYSNIMNFFKTEITLANGEIRKRPLIETNGETGEIVWDKGRDFATVRKVLSMPQVNIVKKTEVQTGGFSKESILPKRNSDKLIARKKDWDPKKYGGFDSPTVAYSVLVVAKVEKGKSKKLKSVKELLGITIMERSSFEKNPIDFLEAKGYKEVKKDLIIKLPKYSLFELENGRKRMLASAGELQKGNELALPSKYVNFLYLASHYEKLKGSPEDNEQKQLFVEQHKHYLDEIIEQISEFSKRVILADANLDKVLSAYNKHRDKPIREQAENIIHLFTLTNLGAPAAFKYFDTTIDRKRYTSTKEVLDATLIHQSITGLYETRIDLSQLGGDGGGSAGSAAGSGEFGGTLNIEDEYRLHETSKEPDVSLGSTWLSDFPQAWAETGGMGLAVRQAPLIIPLKATSTPVSIKQYPMSQEARLGIKPHIQRLLDQGILVPCQSPWNTPLLPVKKPGTNDYRPVQDLREVNKRVEDIHPTVPNPYNLLSGLPPSHQWYTVLDLKDAFFCLRLHPTSQPLFAFEWRDPEMGISGQLTWTRLPQGFKNSPTLFNEALHRDLADFRIQHPDLILLQYVDDLLLAATSELDCQQGTRALLQTLGNLGYRASAKKAQICQKQVKYLGYLLKEGQRWLTEARKETVMGQPTPKTPRQLREFLGKAGFCRLFIPGFAEMAAPLYPLTKPGTLFNWGPDQQKAYQEIKQALLTAPALGLPDLTKPFELFVDEKQGYAKGVLTQKLGPWRRPVAYLSKKLDPVAAGWPPCLRMVAAIAVLTKDAGKLTMGQPLVILAPHAVEALVKQPPDRWLSNARMTHYQALLLDTDRVQFGPVVALNPATLLPLPEEGLQHNCLDILAEAHGTRPDLTDQPLPDADHTWYTDGSSLLQEGQRKAGAAVTTETEVIWAKALPAGTSAQRAELIALTQALKMAEGKKLNVYTDSRYAFATAHIHGEIYRRRGWLTSEGKEIKNKDEILALLKALFLPKRLSIIHCPGHQKGHSAEARGNRMADQAARKAAITETPDTSTLLIENSSPSGGSKRTADGSEFEAGKRTADGSEFEKRTADGSEFESPKKKAKVE

SEQ ID NO: 2697 - protein, 2114 aa, synthetic construct
MPAAKRVKLDGGDKKYSIGLDIGTNSVGWAVITDEYKVPSKKFKVLGNTDRHSIKKNLIGALLFDSGETAEATRLKRTARRRYTRRKNRICYLQEIFSNEMAKVDDSFFHRLEESFLVEEDKKHERHPIFGNIVDEVAYHEKYPTIYHLRKKLVDSTDKADLRLIYLALAHMIKFRGHFLIEGDLNPDNSDVDKLFIQLVQTYNQLFEENPINASGVDAKAILSARLSKSRRLENLIAQLPGEKKNGLFGNLIALSLGLTPNFKSNFDLAEDAKLQLSKDTYDDDLDNLLAQIGDQYADLFLAAKNLSDAILLSDILRVNTEITKAPLSASMIKRYDEHHQDLTLLKALVRQQLPEKYKEIFFDQSKNGYAGYIDGGASQEEFYKFIKPILEKMDGTEELLVKLNREDLLRKQRTFDNGSIPHQIHLGELHAILRRQEDFYPFLKDNREKIEKILTFRIPYYVGPLARGNSRFAWMTRKSEETITPWNFEEVVDKGASAQSFIERMTNFDKNLPNEKVLPKHSLLYEYFTVYNELTKVKYVTEGMRKPAFLSGEQKKAIVDLLFKTNRKVTVKQLKEDYFKKIECFDSVEISGVEDRFNASLGTYHDLLKIIKDKDFLDNEENEDILEDIVLTLTLFEDREMIEERLKTYAHLFDDKVMKQLKRRRYTGWGRLSRKLINGIRDKQSGKTILDFLKSDGFANRNFMQLIHDDSLTFKEDIQKAQVSGQGDSLHEHIANLAGSPAIKKGILQTVKVVDELVKVMGRHKPENIVIEMARENQTTQKGQKNSRERMKRIEEGIKELGSQILKEHPVENTQLQNEKLYLYYLQNGRDMYVDQELDINRLSDYDVDHIVPQSFLKDDSIDNKVLTRSDKARGKSDNVPSEEVVKKMKNYWRQLLNAKLITQRKFDNLTKAERGGLSELDKAGFIKRQLVETRQITKHVAQILDSRMNTKYDENDKLIREVKVITLKSKLVSDFRKDFQFYKVREINNYHHAHDAYLNAVVGTALIKKYPKLESEFVYGDYKVYDVRKMIAKSEQEIGKATAKYFFYSNIMNFFKTEITLANGEIRKRPLIETNGETGEIVWDKGRDFATVRKVLSMPQVNIVKKTEVQTGGFSKESILPKRNSDKLIARKKDWDPKKYGGFDSPTVAYSVLVVAKVEKGKSKKLKSVKELLGITIMERSSFEKNPIDFLEAKGYKEVKKDLIIKLPKYSLFELENGRKRMLASAGELQKGNELALPSKYVNFLYLASHYEKLKGSPEDNEQKQLFVEQHKHYLDEIIEQISEFSKRVILADANLDKVLSAYNKHRDKPIREQAENIIHLFTLTNLGAPAAFKYFDTTIDRKRYTSTKEVLDATLIHQSITGLYETRIDLSQLGGDGGGGSGGSGGSGGTLNIEDEYRLHETSKEPDVSLGSTWLSDFPQAWAETGGMGLAVRQAPLIIPLKATSTPVSIKQYPMSQEARLGIKPHIQRLLDQGILVPCQSPWNTPLLPVKKPGTNDYRPVQDLREVNKRVEDIHPTVPNPYNLLSGLPPSHQWYTVLDLKDAFFCLRLHPTSQPLFAFEWRDPEMGISGQLTWTRLPQGFKNSPTLFNEALHRDLADFRIQHPDLILLQYVDDLLLAATSELDCQQGTRALLQTLGNLGYRASAKKAQICQKQVKYLGYLLKEGQRWLTEARKETVMGQPTPKTPRQLREFLGKAGFCRLFIPGFAEMAAPLYPLTKPGTLFNWGPDQQKAYQEIKQALLTAPALGLPDLTKPFELFVDEKQGYAKGVLTQKLGPWRRPVAYLSKKLDPVAAGWPPCLRMVAAIAVLTKDAGKLTMGQPLVILAPHAVEALVKQPPDRWLSNARMTHYQALLLDTDRVQFGPVVALNPATLLPLPEEGLQHNCLDILAEAHGTRPDLTDQPLPDADHTWYTDGSSLLQEGQRKAGAAVTTETEVIWAKALPAGTSAQRAELIALTQALKMAEGKKLNVYTDSRYAFATAHIHGEIYRRRGWLTSEGKEIKNKDEILALLKALFLPKRLSIIHCPGHQKGHSAEARGNRMADQAARKAAITETPDTSTLLIENSSPSGGSKRTADGSEFEAGKRTADGSEFEKRTADGSEFESPKKKAKVE

SEQ ID NO: 2698 - protein, 2114 aa, synthetic construct
MPAAKRVKLDGGDKKYSIGLDIGTNSVGWAVITDEYKVPSKKFKVLGNTDRHSIKKNLIGALLFDSGETAEATRLKRTARRRYTRRKNRICYLQEIFSNEMAKVDDSFFHRLEESFLVEEDKKHERHPIFGNIVDEVAYHEKYPTIYHLRKKLVDSTDKADLRLIYLALAHMIKFRGHFLIEGDLNPDNSDVDKLFIQLVQTYNQLFEENPINASGVDAKAILSARLSKSRRLENLIAQLPGEKKNGLFGNLIALSLGLTPNFKSNFDLAEDAKLQLSKDTYDDDLDNLLAQIGDQYADLFLAAKNLSDAILLSDILRVNTEITKAPLSASMIKRYDEHHQDLTLLKALVRQQLPEKYKEIFFDQSKNGYAGYIDGGASQEEFYKFIKPILEKMDGTEELLVKLNREDLLRKQRTFDNGSIPHQIHLGELHAILRRQEDFYPFLKDNREKIEKILTFRIPYYVGPLARGNSRFAWMTRKSEETITPWNFEEVVDKGASAQSFIERMTNFDKNLPNEKVLPKHSLLYEYFTVYNELTKVKYVTEGMRKPAFLSGEQKKAIVDLLFKTNRKVTVKQLKEDYFKKIECFDSVEISGVEDRFNASLGTYHDLLKIIKDKDFLDNEENEDILEDIVLTLTLFEDREMIEERLKTYAHLFDDKVMKQLKRRRYTGWGRLSRKLINGIRDKQSGKTILDFLKSDGFANRNFMQLIHDDSLTFKEDIQKAQVSGQGDSLHEHIANLAGSPAIKKGILQTVKVVDELVKVMGRHKPENIVIEMARENQTTQKGQKNSRERMKRIEEGIKELGSQILKEHPVENTQLQNEKLYLYYLQNGRDMYVDQELDINRLSDYDVDHIVPQSFLKDDSIDNKVLTRSDKARGKSDNVPSEEVVKKMKNYWRQLLNAKLITQRKFDNLTKAERGGLSELDKAGFIKRQLVETRQITKHVAQILDSRMNTKYDENDKLIREVKVITLKSKLVSDFRKDFQFYKVREINNYHHAHDAYLNAVVGTALIKKYPKLESEFVYGDYKVYDVRKMIAKSEQEIGKATAKYFFYSNIMNFFKTEITLANGEIRKRPLIETNGETGEIVWDKGRDFATVRKVLSMPQVNIVKKTEVQTGGFSKESILPKRNSDKLIARKKDWDPKKYGGFDSPTVAYSVLVVAKVEKGKSKKLKSVKELLGITIMERSSFEKNPIDFLEAKGYKEVKKDLIIKLPKYSLFELENGRKRMLASAGELQKGNELALPSKYVNFLYLASHYEKLKGSPEDNEQKQLFVEQHKHYLDEIIEQISEFSKRVILADANLDKVLSAYNKHRDKPIREQAENIIHLFTLTNLGAPAAFKYFDTTIDRKRYTSTKEVLDATLIHQSITGLYETRIDLSQLGGDGGGGGPAPGSSGGTLNIEDEYRLHETSKEPDVSLGSTWLSDFPQAWAETGGMGLAVRQAPLIIPLKATSTPVSIKQYPMSQEARLGIKPHIQRLLDQGILVPCQSPWNTPLLPVKKPGTNDYRPVQDLREVNKRVEDIHPTVPNPYNLLSGLPPSHQWYTVLDLKDAFFCLRLHPTSQPLFAFEWRDPEMGISGQLTWTRLPQGFKNSPTLFNEALHRDLADFRIQHPDLILLQYVDDLLLAATSELDCQQGTRALLQTLGNLGYRASAKKAQICQKQVKYLGYLLKEGQRWLTEARKETVMGQPTPKTPRQLREFLGKAGFCRLFIPGFAEMAAPLYPLTKPGTLFNWGPDQQKAYQEIKQALLTAPALGLPDLTKPFELFVDEKQGYAKGVLTQKLGPWRRPVAYLSKKLDPVAAGWPPCLRMVAAIAVLTKDAGKLTMGQPLVILAPHAVEALVKQPPDRWLSNARMTHYQALLLDTDRVQFGPVVALNPATLLPLPEEGLQHNCLDILAEAHGTRPDLTDQPLPDADHTWYTDGSSLLQEGQRKAGAAVTTETEVIWAKALPAGTSAQRAELIALTQALKMAEGKKLNVYTDSRYAFATAHIHGEIYRRRGWLTSEGKEIKNKDEILALLKALFLPKRLSIIHCPGHQKGHSAEARGNRMADQAARKAAITETPDTSTLLIENSSPSGGSKRTADGSEFEAGKRTADGSEFEKRTADGSEFESPKKKAKVE

SEQ ID NO: 2699 - protein, 2114 aa, synthetic construct
MPAAKRVKLDGGDKKYSIGLDIGTNSVGWAVITDEYKVPSKKFKVLGNTDRHSIKKNLIGALLFDSGETAEATRLKRTARRRYTRRKNRICYLQEIFSNEMAKVDDSFFHRLEESFLVEEDKKHERHPIFGNIVDEVAYHEKYPTIYHLRKKLVDSTDKADLRLIYLALAHMIKFRGHFLIEGDLNPDNSDVDKLFIQLVQTYNQLFEENPINASGVDAKAILSARLSKSRRLENLIAQLPGEKKNGLFGNLIALSLGLTPNFKSNFDLAEDAKLQLSKDTYDDDLDNLLAQIGDQYADLFLAAKNLSDAILLSDILRVNTEITKAPLSASMIKRYDEHHQDLTLLKALVRQQLPEKYKEIFFDQSKNGYAGYIDGGASQEEFYKFIKPILEKMDGTEELLVKLNREDLLRKQRTFDNGSIPHQIHLGELHAILRRQEDFYPFLKDNREKIEKILTFRIPYYVGPLARGNSRFAWMTRKSEETITPWNFEEVVDKGASAQSFIERMTNFDKNLPNEKVLPKHSLLYEYFTVYNELTKVKYVTEGMRKPAFLSGEQKKAIVDLLFKTNRKVTVKQLKEDYFKKIECFDSVEISGVEDRFNASLGTYHDLLKIIKDKDFLDNEENEDILEDIVLTLTLFEDREMIEERLKTYAHLFDDKVMKQLKRRRYTGWGRLSRKLINGIRDKQSGKTILDFLKSDGFANRNFMQLIHDDSLTFKEDIQKAQVSGQGDSLHEHIANLAGSPAIKKGILQTVKVVDELVKVMGRHKPENIVIEMARENQTTQKGQKNSRERMKRIEEGIKELGSQILKEHPVENTQLQNEKLYLYYLQNGRDMYVDQELDINRLSDYDVDHIVPQSFLKDDSIDNKVLTRSDKARGKSDNVPSEEVVKKMKNYWRQLLNAKLITQRKFDNLTKAERGGLSELDKAGFIKRQLVETRQITKHVAQILDSRMNTKYDENDKLIREVKVITLKSKLVSDFRKDFQFYKVREINNYHHAHDAYLNAVVGTALIKKYPKLESEFVYGDYKVYDVRKMIAKSEQEIGKATAKYFFYSNIMNFFKTEITLANGEIRKRPLIETNGETGEIVWDKGRDFATVRKVLSMPQVNIVKKTEVQTGGFSKESILPKRNSDKLIARKKDWDPKKYGGFDSPTVAYSVLVVAKVEKGKSKKLKSVKELLGITIMERSSFEKNPIDFLEAKGYKEVKKDLIIKLPKYSLFELENGRKRMLASAGELQKGNELALPSKYVNFLYLASHYEKLKGSPEDNEQKQLFVEQHKHYLDEIIEQISEFSKRVILADANLDKVLSAYNKHRDKPIREQAENIIHLFTLTNLGAPAAFKYFDTTIDRKRYTSTKEVLDATLIHQSITGLYETRIDLSQLGGDGGGSSGGSPAPGGTLNIEDEYRLHETSKEPDVSLGSTWLSDFPQAWAETGGMGLAVRQAPLIIPLKATSTPVSIKQYPMSQEARLGIKPHIQRLLDQGILVPCQSPWNTPLLPVKKPGTNDYRPVQDLREVNKRVEDIHPTVPNPYNLLSGLPPSHQWYTVLDLKDAFFCLRLHPTSQPLFAFEWRDPEMGISGQLTWTRLPQGFKNSPTLFNEALHRDLADFRIQHPDLILLQYVDDLLLAATSELDCQQGTRALLQTLGNLGYRASAKKAQICQKQVKYLGYLLKEGQRWLTEARKETVMGQPTPKTPRQLREFLGKAGFCRLFIPGFAEMAAPLYPLTKPGTLFNWGPDQQKAYQEIKQALLTAPALGLPDLTKPFELFVDEKQGYAKGVLTQKLGPWRRPVAYLSKKLDPVAAGWPPCLRMVAAIAVLTKDAGKLTMGQPLVILAPHAVEALVKQPPDRWLSNARMTHYQALLLDTDRVQFGPVVALNPATLLPLPEEGLQHNCLDILAEAHGTRPDLTDQPLPDADHTWYTDGSSLLQEGQRKAGAAVTTETEVIWAKALPAGTSAQRAELIALTQALKMAEGKKLNVYTDSRYAFATAHIHGEIYRRRGWLTSEGKEIKNKDEILALLKALFLPKRLSIIHCPGHQKGHSAEARGNRMADQAARKAAITETPDTSTLLIENSSPSGGSKRTADGSEFEAGKRTADGSEFEKRTADGSEFESPKKKAKVE

SEQ ID NO: 2700 - protein, 2113 aa, synthetic construct
MPAAKRVKLDGGDKKYSIGLDIGTNSVGWAVITDEYKVPSKKFKVLGNTDRHSIKKNLIGALLFDSGETAEATRLKRTARRRYTRRKNRICYLQEIFSNEMAKVDDSFFHRLEESFLVEEDKKHERHPIFGNIVDEVAYHEKYPTIYHLRKKLVDSTDKADLRLIYLALAHMIKFRGHFLIEGDLNPDNSDVDKLFIQLVQTYNQLFEENPINASGVDAKAILSARLSKSRRLENLIAQLPGEKKNGLFGNLIALSLGLTPNFKSNFDLAEDAKLQLSKDTYDDDLDNLLAQIGDQYADLFLAAKNLSDAILLSDILRVNTEITKAPLSASMIKRYDEHHQDLTLLKALVRQQLPEKYKEIFFDQSKNGYAGYIDGGASQEEFYKFIKPILEKMDGTEELLVKLNREDLLRKQRTFDNGSIPHQIHLGELHAILRRQEDFYPFLKDNREKIEKILTFRIPYYVGPLARGNSRFAWMTRKSEETITPWNFEEVVDKGASAQSFIERMTNFDKNLPNEKVLPKHSLLYEYFTVYNELTKVKYVTEGMRKPAFLSGEQKKAIVDLLFKTNRKVTVKQLKEDYFKKIECFDSVEISGVEDRFNASLGTYHDLLKIIKDKDFLDNEENEDILEDIVLTLTLFEDREMIEERLKTYAHLFDDKVMKQLKRRRYTGWGRLSRKLINGIRDKQSGKTILDFLKSDGFANRNFMQLIHDDSLTFKEDIQKAQVSGQGDSLHEHIANLAGSPAIKKGILQTVKVVDELVKVMGRHKPENIVIEMARENQTTQKGQKNSRERMKRIEEGIKELGSQILKEHPVENTQLQNEKLYLYYLQNGRDMYVDQELDINRLSDYDVDHIVPQSFLKDDSIDNKVLTRSDKARGKSDNVPSEEVVKKMKNYWRQLLNAKLITQRKFDNLTKAERGGLSELDKAGFIKRQLVETRQITKHVAQILDSRMNTKYDENDKLIREVKVITLKSKLVSDFRKDFQFYKVREINNYHHAHDAYLNAVVGTALIKKYPKLESEFVYGDYKVYDVRKMIAKSEQEIGKATAKYFFYSNIMNFFKTEITLANGEIRKRPLIETNGETGEIVWDKGRDFATVRKVLSMPQVNIVKKTEVQTGGFSKESILPKRNSDKLIARKKDWDPKKYGGFDSPTVAYSVLVVAKVEKGKSKKLKSVKELLGITIMERSSFEKNPIDFLEAKGYKEVKKDLIIKLPKYSLFELENGRKRMLASAGELQKGNELALPSKYVNFLYLASHYEKLKGSPEDNEQKQLFVEQHKHYLDEIIEQISEFSKRVILADANLDKVLSAYNKHRDKPIREQAENIIHLFTLTNLGAPAAFKYFDTTIDRKRYTSTKEVLDATLIHQSITGLYETRIDLSQLGGDGGGGSEAAAKGGTLNIEDEYRLHETSKEPDVSLGSTWLSDFPQAWAETGGMGLAVRQAPLIIPLKATSTPVSIKQYPMSQEARLGIKPHIQRLLDQGILVPCQSPWNTPLLPVKKPGTNDYRPVQDLREVNKRVEDIHPTVPNPYNLLSGLPPSHQWYTVLDLKDAFFCLRLHPTSQPLFAFEWRDPEMGISGQLTWTRLPQGFKNSPTLFNEALHRDLADFRIQHPDLILLQYVDDLLLAATSELDCQQGTRALLQTLGNLGYRASAKKAQICQKQVKYLGYLLKEGQRWLTEARKETVMGQPTPKTPRQLREFLGKAGFCRLFIPGFAEMAAPLYPLTKPGTLFNWGPDQQKAYQEIKQALLTAPALGLPDLTKPFELFVDEKQGYAKGVLTQKLGPWRRPVAYLSKKLDPVAAGWPPCLRMVAAIAVLTKDAGKLTMGQPLVILAPHAVEALVKQPPDRWLSNARMTHYQALLLDTDRVQFGPVVALNPATLLPLPEEGLQHNCLDILAEAHGTRPDLTDQPLPDADHTWYTDGSSLLQEGQRKAGAAVTTETEVIWAKALPAGTSAQRAELIALTQALKMAEGKKLNVYTDSRYAFATAHIHGEIYRRRGWLTSEGKEIKNKDEILALLKALFLPKRLSIIHCPGHQKGHSAEARGNRMADQAARKAAITETPDTSTLLIENSSPSGGSKRTADGSEFEAGKRTADGSEFEKRTADGSEFESPKKKAKVE

SEQ ID NO: 2701 - protein, 2116 aa, synthetic construct
MPAAKRVKLDGGDKKYSIGLDIGTNSVGWAVITDEYKVPSKKFKVLGNTDRHSIKKNLIGALLFDSGETAEATRLKRTARRRYTRRKNRICYLQEIFSNEMAKVDDSFFHRLEESFLVEEDKKHERHPIFGNIVDEVAYHEKYPTIYHLRKKLVDSTDKADLRLIYLALAHMIKFRGHFLIEGDLNPDNSDVDKLFIQLVQTYNQLFEENPINASGVDAKAILSARLSKSRRLENLIAQLPGEKKNGLFGNLIALSLGLTPNFKSNFDLAEDAKLQLSKDTYDDDLDNLLAQIGDQYADLFLAAKNLSDAILLSDILRVNTEITKAPLSASMIKRYDEHHQDLTLLKALVRQQLPEKYKEIFFDQSKNGYAGYIDGGASQEEFYKFIKPILEKMDGTEELLVKLNREDLLRKQRTFDNGSIPHQIHLGELHAILRRQEDFYPFLKDNREKIEKILTFRIPYYVGPLARGNSRFAWMTRKSEETITPWNFEEVVDKGASAQSFIERMTNFDKNLPNEKVLPKHSLLYEYFTVYNELTKVKYVTEGMRKPAFLSGEQKKAIVDLLFKTNRKVTVKQLKEDYFKKIECFDSVEISGVEDRFNASLGTYHDLLKIIKDKDFLDNEENEDILEDIVLTLTLFEDREMIEERLKTYAHLFDDKVMKQLKRRRYTGWGRLSRKLINGIRDKQSGKTILDFLKSDGFANRNFMQLIHDDSLTFKEDIQKAQVSGQGDSLHEHIANLAGSPAIKKGILQTVKVVDELVKVMGRHKPENIVIEMARENQTTQKGQKNSRERMKRIEEGIKELGSQILKEHPVENTQLQNEKLYLYYLQNGRDMYVDQELDINRLSDYDVDHIVPQSFLKDDSIDNKVLTRSDKARGKSDNVPSEEVVKKMKNYWRQLLNAKLITQRKFDNLTKAERGGLSELDKAGFIKRQLVETRQITKHVAQILDSRMNTKYDENDKLIREVKVITLKSKLVSDFRKDFQFYKVREINNYHHAHDAYLNAVVGTALIKKYPKLESEFVYGDYKVYDVRKMIAKSEQEIGKATAKYFFYSNIMNFFKTEITLANGEIRKRPLIETNGETGEIVWDKGRDFATVRKVLSMPQVNIVKKTEVQTGGFSKESILPKRNSDKLIARKKDWDPKKYGGFDSPTVAYSVLVVAKVEKGKSKKLKSVKELLGITIMERSSFEKNPIDFLEAKGYKEVKKDLIIKLPKYSLFELENGRKRMLASAGELQKGNELALPSKYVNFLYLASHYEKLKGSPEDNEQKQLFVEQHKHYLDEIIEQISEFSKRVILADANLDKVLSAYNKHRDKPIREQAENIIHLFTLTNLGAPAAFKYFDTTIDRKRYTSTKEVLDATLIHQSITGLYETRIDLSQLGGDGGGGSPAPEAAAKGGTLNIEDEYRLHETSKEPDVSLGSTWLSDFPQAWAETGGMGLAVRQAPLIIPLKATSTPVSIKQYPMSQEARLGIKPHIQRLLDQGILVPCQSPWNTPLLPVKKPGTNDYRPVQDLREVNKRVEDIHPTVPNPYNLLSGLPPSHQWYTVLDLKDAFFCLRLHPTSQPLFAFEWRDPEMGISGQLTWTRLPQGFKNSPTLFNEALHRDLADFRIQHPDLILLQYVDDLLLAATSELDCQQGTRALLQTLGNLGYRASAKKAQICQKQVKYLGYLLKEGQRWLTEARKETVMGQPTPKTPRQLREFLGKAGFCRLFIPGFAEMAAPLYPLTKPGTLFNWGPDQQKAYQEIKQALLTAPALGLPDLTKPFELFVDEKQGYAKGVLTQKLGPWRRPVAYLSKKLDPVAAGWPPCLRMVAAIAVLTKDAGKLTMGQPLVILAPHAVEALVKQPPDRWLSNARMTHYQALLLDTDRVQFGPVVALNPATLLPLPEEGLQHNCLDILAEAHGTRPDLTDQPLPDADHTWYTDGSSLLQEGQRKAGAAVTTETEVIWAKALPAGTSAQRAELIALTQALKMAEGKKLNVYTDSRYAFATAHIHGEIYRRRGWLTSEGKEIKNKDEILALLKALFLPKRLSIIHCPGHQKGHSAEARGNRMADQAARKAAITETPDTSTLLIENSSPSGGSKRTADGSEFEAGKRTADGSEFEKRTADGSEFESPKKKAKVE

SEQ ID NO: 2702 - protein, 2114 aa, synthetic construct
MPAAKRVKLDGGDKKYSIGLDIGTNSVGWAVITDEYKVPSKKFKVLGNTDRHSIKKNLIGALLFDSGETAEATRLKRTARRRYTRRKNRICYLQEIFSNEMAKVDDSFFHRLEESFLVEEDKKHERHPIFGNIVDEVAYHEKYPTIYHLRKKLVDSTDKADLRLIYLALAHMIKFRGHFLIEGDLNPDNSDVDKLFIQLVQTYNQLFEENPINASGVDAKAILSARLSKSRRLENLIAQLPGEKKNGLFGNLIALSLGLTPNFKSNFDLAEDAKLQLSKDTYDDDLDNLLAQIGDQYADLFLAAKNLSDAILLSDILRVNTEITKAPLSASMIKRYDEHHQDLTLLKALVRQQLPEKYKEIFFDQSKNGYAGYIDGGASQEEFYKFIKPILEKMDGTEELLVKLNREDLLRKQRTFDNGSIPHQIHLGELHAILRRQEDFYPFLKDNREKIEKILTFRIPYYVGPLARGNSRFAWMTRKSEETITPWNFEEVVDKGASAQSFIERMTNFDKNLPNEKVLPKHSLLYEYFTVYNELTKVKYVTEGMRKPAFLSGEQKKAIVDLLFKTNRKVTVKQLKEDYFKKIECFDSVEISGVEDRFNASLGTYHDLLKIIKDKDFLDNEENEDILEDIVLTLTLFEDREMIEERLKTYAHLFDDKVMKQLKRRRYTGWGRLSRKLINGIRDKQSGKTILDFLKSDGFANRNFMQLIHDDSLTFKEDIQKAQVSGQGDSLHEHIANLAGSPAIKKGILQTVKVVDELVKVMGRHKPENIVIEMARENQTTQKGQKNSRERMKRIEEGIKELGSQILKEHPVENTQLQNEKLYLYYLQNGRDMYVDQELDINRLSDYDVDHIVPQSFLKDDSIDNKVLTRSDKARGKSDNVPSEEVVKKMKNYWRQLLNAKLITQRKFDNLTKAERGGLSELDKAGFIKRQLVETRQITKHVAQILDSRMNTKYDENDKLIREVKVITLKSKLVSDFRKDFQFYKVREINNYHHAHDAYLNAVVGTALIKKYPKLESEFVYGDYKVYDVRKMIAKSEQEIGKATAKYFFYSNIMNFFKTEITLANGEIRKRPLIETNGETGEIVWDKGRDFATVRKVLSMPQVNIVKKTEVQTGGFSKESILPKRNSDKLIARKKDWDPKKYGGFDSPTVAYSVLVVAKVEKGKSKKLKSVKELLGITIMERSSFEKNPIDFLEAKGYKEVKKDLIIKLPKYSLFELENGRKRMLASAGELQKGNELALPSKYVNFLYLASHYEKLKGSPEDNEQKQLFVEQHKHYLDEIIEQISEFSKRVILADANLDKVLSAYNKHRDKPIREQAENIIHLFTLTNLGAPAAFKYFDTTIDRKRYTSTKEVLDATLIHQSITGLYETRIDLSQLGGDGGGGSGGGGSSGGTLNIEDEYRLHETSKEPDVSLGSTWLSDFPQAWAETGGMGLAVRQAPLIIPLKATSTPVSIKQYPMSQEARLGIKPHIQRLLDQGILVPCQSPWNTPLLPVKKPGTNDYRPVQDLREVNKRVEDIHPTVPNPYNLLSGLPPSHQWYTVLDLKDAFFCLRLHPTSQPLFAFEWRDPEMGISGQLTWTRLPQGFKNSPTLFNEALHRDLADFRIQHPDLILLQYVDDLLLAATSELDCQQGTRALLQTLGNLGYRASAKKAQICQKQVKYLGYLLKEGQRWLTEARKETVMGQPTPKTPRQLREFLGKAGFCRLFIPGFAEMAAPLYPLTKPGTLFNWGPDQQKAYQEIKQALLTAPALGLPDLTKPFELFVDEKQGYAKGVLTQKLGPWRRPVAYLSKKLDPVAAGWPPCLRMVAAIAVLTKDAGKLTMGQPLVILAPHAVEALVKQPPDRWLSNARMTHYQALLLDTDRVQFGPVVALNPATLLPLPEEGLQHNCLDILAEAHGTRPDLTDQPLPDADHTWYTDGSSLLQEGQRKAGAAVTTETEVIWAKALPAGTSAQRAELIALTQALKMAEGKKLNVYTDSRYAFATAHIHGEIYRRRGWLTSEGKEIKNKDEILALLKALFLPKRLSIIHCPGHQKGHSAEARGNRMADQAARKAAITETPDTSTLLIENSSPSGGSKRTADGSEFEAGKRTADGSEFEKRTADGSEFESPKKKAKVE

SEQ ID NO: 2703 - protein, 2116 aa, synthetic construct
MPAAKRVKLDGGDKKYSIGLDIGTNSVGWAVITDEYKVPSKKFKVLGNTDRHSIKKNLIGALLFDSGETAEATRLKRTARRRYTRRKNRICYLQEIFSNEMAKVDDSFFHRLEESFLVEEDKKHERHPIFGNIVDEVAYHEKYPTIYHLRKKLVDSTDKADLRLIYLALAHMIKFRGHFLIEGDLNPDNSDVDKLFIQLVQTYNQLFEENPINASGVDAKAILSARLSKSRRLENLIAQLPGEKKNGLFGNLIALSLGLTPNFKSNFDLAEDAKLQLSKDTYDDDLDNLLAQIGDQYADLFLAAKNLSDAILLSDILRVNTEITKAPLSASMIKRYDEHHQDLTLLKALVRQQLPEKYKEIFFDQSKNGYAGYIDGGASQEEFYKFIKPILEKMDGTEELLVKLNREDLLRKQRTFDNGSIPHQIHLGELHAILRRQEDFYPFLKDNREKIEKILTFRIPYYVGPLARGNSRFAWMTRKSEETITPWNFEEVVDKGASAQSFIERMTNFDKNLPNEKVLPKHSLLYEYFTVYNELTKVKYVTEGMRKPAFLSGEQKKAIVDLLFKTNRKVTVKQLKEDYFKKIECFDSVEISGVEDRFNASLGTYHDLLKIIKDKDFLDNEENEDILEDIVLTLTLFEDREMIEERLKTYAHLFDDKVMKQLKRRRYTGWGRLSRKLINGIRDKQSGKTILDFLKSDGFANRNFMQLIHDDSLTFKEDIQKAQVSGQGDSLHEHIANLAGSPAIKKGILQTVKVVDELVKVMGRHKPENIVIEMARENQTTQKGQKNSRERMKRIEEGIKELGSQILKEHPVENTQLQNEKLYLYYLQNGRDMYVDQELDINRLSDYDVDHIVPQSFLKDDSIDNKVLTRSDKARGKSDNVPSEEVVKKMKNYWRQLLNAKLITQRKFDNLTKAERGGLSELDKAGFIKRQLVETRQITKHVAQILDSRMNTKYDENDKLIREVKVITLKSKLVSDFRKDFQFYKVREINNYHHAHDAYLNAVVGTALIKKYPKLESEFVYGDYKVYDVRKMIAKSEQEIGKATAKYFFYSNIMNFFKTEITLANGEIRKRPLIETNGETGEIVWDKGRDFATVRKVLSMPQVNIVKKTEVQTGGFSKESILPKRNSDKLIARKKDWDPKKYGGFDSPTVAYSVLVVAKVEKGKSKKLKSVKELLGITIMERSSFEKNPIDFLEAKGYKEVKKDLIIKLPKYSLFELENGRKRMLASAGELQKGNELALPSKYVNFLYLASHYEKLKGSPEDNEQKQLFVEQHKHYLDEIIEQISEFSKRVILADANLDKVLSAYNKHRDKPIREQAENIIHLFTLTNLGAPAAFKYFDTTIDRKRYTSTKEVLDATLIHQSITGLYETRIDLSQLGGDGGGSSEAAAKGGSGGTLNIEDEYRLHETSKEPDVSLGSTWLSDFPQAWAETGGMGLAVRQAPLIIPLKATSTPVSIKQYPMSQEARLGIKPHIQRLLDQGILVPCQSPWNTPLLPVKKPGTNDYRPVQDLREVNKRVEDIHPTVPNPYNLLSGLPPSHQWYTVLDLKDAFFCLRLHPTSQPLFAFEWRDPEMGISGQLTWTRLPQGFKNSPTLFNEALHRDLADFRIQHPDLILLQYVDDLLLAATSELDCQQGTRALLQTLGNLGYRASAKKAQICQKQVKYLGYLLKEGQRWLTEARKETVMGQPTPKTPRQLREFLGKAGFCRLFIPGFAEMAAPLYPLTKPGTLFNWGPDQQKAYQEIKQALLTAPALGLPDLTKPFELFVDEKQGYAKGVLTQKLGPWRRPVAYLSKKLDPVAAGWPPCLRMVAAIAVLTKDAGKLTMGQPLVILAPHAVEALVKQPPDRWLSNARMTHYQALLLDTDRVQFGPVVALNPATLLPLPEEGLQHNCLDILAEAHGTRPDLTDQPLPDADHTWYTDGSSLLQEGQRKAGAAVTTETEVIWAKALPAGTSAQRAELIALTQALKMAEGKKLNVYTDSRYAFATAHIHGEIYRRRGWLTSEGKEIKNKDEILALLKALFLPKRLSIIHCPGHQKGHSAEARGNRMADQAARKAAITETPDTSTLLIENSSPSGGSKRTADGSEFEAGKRTADGSEFEKRTADGSEFESPKKKAKVE

SEQ ID NO: 2704 - protein, 2094 aa, synthetic construct
MPAAKRVKLDGGDKKYSIGLDIGTNSVGWAVITDEYKVPSKKFKVLGNTDRHSIKKNLIGALLFDSGETAEATRLKRTARRRYTRRKNRICYLQEIFSNEMAKVDDSFFHRLEESFLVEEDKKHERHPIFGNIVDEVAYHEKYPTIYHLRKKLVDSTDKADLRLIYLALAHMIKFRGHFLIEGDLNPDNSDVDKLFIQLVQTYNQLFEENPINASGVDAKAILSARLSKSRRLENLIAQLPGEKKNGLFGNLIALSLGLTPNFKSNFDLAEDAKLQLSKDTYDDDLDNLLAQIGDQYADLFLAAKNLSDAILLSDILRVNTEITKAPLSASMIKRYDEHHQDLTLLKALVRQQLPEKYKEIFFDQSKNGYAGYIDGGASQEEFYKFIKPILEKMDGTEELLVKLNREDLLRKQRTFDNGSIPHQIHLGELHAILRRQEDFYPFLKDNREKIEKILTFRIPYYVGPLARGNSRFAWMTRKSEETITPWNFEEVVDKGASAQSFIERMTNFDKNLPNEKVLPKHSLLYEYFTVYNELTKVKYVTEGMRKPAFLSGEQKKAIVDLLFKTNRKVTVKQLKEDYFKKIECFDSVEISGVEDRFNASLGTYHDLLKIIKDKDFLDNEENEDILEDIVLTLTLFEDREMIEERLKTYAHLFDDKVMKQLKRRRYTGWGRLSRKLINGIRDKQSGKTILDFLKSDGFANRNFMQLIHDDSLTFKEDIQKAQVSGQGDSLHEHIANLAGSPAIKKGILQTVKVVDELVKVMGRHKPENIVIEMARENQTTQKGQKNSRERMKRIEEGIKELGSQILKEHPVENTQLQNEKLYLYYLQNGRDMYVDQELDINRLSDYDVDHIVPQSFLKDDSIDNKVLTRSDKARGKSDNVPSEEVVKKMKNYWRQLLNAKLITQRKFDNLTKAERGGLSELDKAGFIKRQLVETRQITKHVAQILDSRMNTKYDENDKLIREVKVITLKSKLVSDFRKDFQFYKVREINNYHHAHDAYLNAVVGTALIKKYPKLESEFVYGDYKVYDVRKMIAKSEQEIGKATAKYFFYSNIMNFFKTEITLANGEIRKRPLIETNGETGEIVWDKGRDFATVRKVLSMPQVNIVKKTEVQTGGFSKESILPKRNSDKLIARKKDWDPKKYGGFDSPTVAYSVLVVAKVEKGKSKKLKSVKELLGITIMERSSFEKNPIDFLEAKGYKEVKKDLIIKLPKYSLFELENGRKRMLASAGELQKGNELALPSKYVNFLYLASHYEKLKGSPEDNEQKQLFVEQHKHYLDEIIEQISEFSKRVILADANLDKVLSAYNKHRDKPIREQAENIIHLFTLTNLGAPAAFKYFDTTIDRKRYTSTKEVLDATLIHQSITGLYETRIDLSQLGGDGGGGSPAPGSSGGTLNIEDEHRLHETSKEPDVSLGSTWLSDFPQAWAETGGMGLAVRQAPLIIPLKATSTPVSIKQYPMSQEARLGIKPHIQRLLDQGILVPCQSPWNTPLLPVKKPGTNDYRPVQDLREVNKRVEDIHPTVPNPYNLLSGLPPSHQWYTVLDLKDAFFCLRLHPTSQPLFAFEWRDPEMGISGQLTWTRLPQGFKNSPTLFDEALHRDLADFRIQHPDLILLQYVDDLLLAATSELDCQQGTRALLQTLGNLGYRASAKKAQICQKQVKYLGYLLKEGQRWLTEARKETVMGQPTPKTPRQLREFLGTAGFCRLWIPGFAEMAAPLYPLTKTGTLFNWGPDQQKAYQEIKQALLTAPALGLPDLTKPFELFVDEKQGYAKGVLTQKLGPWRRPVAYLSKKLDPVAAGWPPCLRMVAAIAVLTKDAGKLTMGQPLVILAPHAVEALVKQPPDRWLSNARMTHYQALLLDTDRVQFGPVVALNPATLLPLPEEGLQHNCLDILAEAHGTRPDLTDQPLPDADHTWYTDGSSLLQEGQRKAGAAVTTETEVIWAKALPAGTSAQRAELIALTQALKMAEGKKLNVYTDSRYAFATAHIHGEIYRRRGLLTSEGKEIKNKDEILALLKALFLPKRLSIIHCPGHQKGHSAEARGNRMADQAARKAAITETPDTSTLLAGKRTADGSEFEKRTADGSEFESPKKKAKVE

SEQ ID NO: 2705 - protein, 2096 aa, synthetic construct
MPAAKRVKLDGGDKKYSIGLDIGTNSVGWAVITDEYKVPSKKFKVLGNTDRHSIKKNLIGALLFDSGETAEATRLKRTARRRYTRRKNRICYLQEIFSNEMAKVDDSFFHRLEESFLVEEDKKHERHPIFGNIVDEVAYHEKYPTIYHLRKKLVDSTDKADLRLIYLALAHMIKFRGHFLIEGDLNPDNSDVDKLFIQLVQTYNQLFEENPINASGVDAKAILSARLSKSRRLENLIAQLPGEKKNGLFGNLIALSLGLTPNFKSNFDLAEDAKLQLSKDTYDDDLDNLLAQIGDQYADLFLAAKNLSDAILLSDILRVNTEITKAPLSASMIKRYDEHHQDLTLLKALVRQQLPEKYKEIFFDQSKNGYAGYIDGGASQEEFYKFIKPILEKMDGTEELLVKLNREDLLRKQRTFDNGSIPHQIHLGELHAILRRQEDFYPFLKDNREKIEKILTFRIPYYVGPLARGNSRFAWMTRKSEETITPWNFEEVVDKGASAQSFIERMTNFDKNLPNEKVLPKHSLLYEYFTVYNELTKVKYVTEGMRKPAFLSGEQKKAIVDLLFKTNRKVTVKQLKEDYFKKIECFDSVEISGVEDRFNASLGTYHDLLKIIKDKDFLDNEENEDILEDIVLTLTLFEDREMIEERLKTYAHLFDDKVMKQLKRRRYTGWGRLSRKLINGIRDKQSGKTILDFLKSDGFANRNFMQLIHDDSLTFKEDIQKAQVSGQGDSLHEHIANLAGSPAIKKGILQTVKVVDELVKVMGRHKPENIVIEMARENQTTQKGQKNSRERMKRIEEGIKELGSQILKEHPVENTQLQNEKLYLYYLQNGRDMYVDQELDINRLSDYDVDHIVPQSFLKDDSIDNKVLTRSDKARGKSDNVPSEEVVKKMKNYWRQLLNAKLITQRKFDNLTKAERGGLSELDKAGFIKRQLVETRQITKHVAQILDSRMNTKYDENDKLIREVKVITLKSKLVSDFRKDFQFYKVREINNYHHAHDAYLNAVVGTALIKKYPKLESEFVYGDYKVYDVRKMIAKSEQEIGKATAKYFFYSNIMNFFKTEITLANGEIRKRPLIETNGETGEIVWDKGRDFATVRKVLSMPQVNIVKKTEVQTGGFSKESILPKRNSDKLIARKKDWDPKKYGGFDSPTVAYSVLVVAKVEKGKSKKLKSVKELLGITIMERSSFEKNPIDFLEAKGYKEVKKDLIIKLPKYSLFELENGRKRMLASAGELQKGNELALPSKYVNFLYLASHYEKLKGSPEDNEQKQLFVEQHKHYLDEIIEQISEFSKRVILADANLDKVLSAYNKHRDKPIREQAENIIHLFTLTNLGAPAAFKYFDTTIDRKRYTSTKEVLDATLIHQSITGLYETRIDLSQLGGDGGEAAAKGSSGGGGGTLNIEDEHRLHETSKEPDVSLGSTWLSDFPQAWAETGGMGLAVRQAPLIIPLKATSTPVSIKQYPMSQEARLGIKPHIQRLLDQGILVPCQSPWNTPLLPVKKPGTNDYRPVQDLREVNKRVEDIHPTVPNPYNLLSGLPPSHQWYTVLDLKDAFFCLRLHPTSQPLFAFEWRDPEMGISGQLTWTRLPQGFKNSPTLFDEALHRDLADFRIQHPDLILLQYVDDLLLAATSELDCQQGTRALLQTLGNLGYRASAKKAQICQKQVKYLGYLLKEGQRWLTEARKETVMGQPTPKTPRQLREFLGTAGFCRLWIPGFAEMAAPLYPLTKTGTLFNWGPDQQKAYQEIKQALLTAPALGLPDLTKPFELFVDEKQGYAKGVLTQKLGPWRRPVAYLSKKLDPVAAGWPPCLRMVAAIAVLTKDAGKLTMGQPLVILAPHAVEALVKQPPDRWLSNARMTHYQALLLDTDRVQFGPVVALNPATLLPLPEEGLQHNCLDILAEAHGTRPDLTDQPLPDADHTWYTDGSSLLQEGQRKAGAAVTTETEVIWAKALPAGTSAQRAELIALTQALKMAEGKKLNVYTDSRYAFATAHIHGEIYRRRGLLTSEGKEIKNKDEILALLKALFLPKRLSIIHCPGHQKGHSAEARGNRMADQAARKAAITETPDTSTLLAGKRTADGSEFEKRTADGSEFESPKKKAKVE

SEQ ID NO: 2706 - protein, 2096 aa, synthetic construct
MPAAKRVKLDGGDKKYSIGLDIGTNSVGWAVITDEYKVPSKKFKVLGNTDRHSIKKNLIGALLFDSGETAEATRLKRTARRRYTRRKNRICYLQEIFSNEMAKVDDSFFHRLEESFLVEEDKKHERHPIFGNIVDEVAYHEKYPTIYHLRKKLVDSTDKADLRLIYLALAHMIKFRGHFLIEGDLNPDNSDVDKLFIQLVQTYNQLFEENPINASGVDAKAILSARLSKSRRLENLIAQLPGEKKNGLFGNLIALSLGLTPNFKSNFDLAEDAKLQLSKDTYDDDLDNLLAQIGDQYADLFLAAKNLSDAILLSDILRVNTEITKAPLSASMIKRYDEHHQDLTLLKALVRQQLPEKYKEIFFDQSKNGYAGYIDGGASQEEFYKFIKPILEKMDGTEELLVKLNREDLLRKQRTFDNGSIPHQIHLGELHAILRRQEDFYPFLKDNREKIEKILTFRIPYYVGPLARGNSRFAWMTRKSEETITPWNFEEVVDKGASAQSFIERMTNFDKNLPNEKVLPKHSLLYEYFTVYNELTKVKYVTEGMRKPAFLSGEQKKAIVDLLFKTNRKVTVKQLKEDYFKKIECFDSVEISGVEDRFNASLGTYHDLLKIIKDKDFLDNEENEDILEDIVLTLTLFEDREMIEERLKTYAHLFDDKVMKQLKRRRYTGWGRLSRKLINGIRDKQSGKTILDFLKSDGFANRNFMQLIHDDSLTFKEDIQKAQVSGQGDSLHEHIANLAGSPAIKKGILQTVKVVDELVKVMGRHKPENIVIEMARENQTTQKGQKNSRERMKRIEEGIKELGSQILKEHPVENTQLQNEKLYLYYLQNGRDMYVDQELDINRLSDYDVDHIVPQSFLKDDSIDNKVLTRSDKARGKSDNVPSEEVVKKMKNYWRQLLNAKLITQRKFDNLTKAERGGLSELDKAGFIKRQLVETRQITKHVAQILDSRMNTKYDENDKLIREVKVITLKSKLVSDFRKDFQFYKVREINNYHHAHDAYLNAVVGTALIKKYPKLESEFVYGDYKVYDVRKMIAKSEQEIGKATAKYFFYSNIMNFFKTEITLANGEIRKRPLIETNGETGEIVWDKGRDFATVRKVLSMPQVNIVKKTEVQTGGFSKESILPKRNSDKLIARKKDWDPKKYGGFDSPTVAYSVLVVAKVEKGKSKKLKSVKELLGITIMERSSFEKNPIDFLEAKGYKEVKKDLIIKLPKYSLFELENGRKRMLASAGELQKGNELALPSKYVNFLYLASHYEKLKGSPEDNEQKQLFVEQHKHYLDEIIEQISEFSKRVILADANLDKVLSAYNKHRDKPIREQAENIIHLFTLTNLGAPAAFKYFDTTIDRKRYTSTKEVLDATLIHQSITGLYETRIDLSQLGGDGGGSSGGGEAAAKGGTLNIEDEHRLHETSKEPDVSLGSTWLSDFPQAWAETGGMGLAVRQAPLIIPLKATSTPVSIKQYPMSQEARLGIKPHIQRLLDQGILVPCQSPWNTPLLPVKKPGTNDYRPVQDLREVNKRVEDIHPTVPNPYNLLSGLPPSHQWYTVLDLKDAFFCLRLHPTSQPLFAFEWRDPEMGISGQLTWTRLPQGFKNSPTLFDEALHRDLADFRIQHPDLILLQYVDDLLLAATSELDCQQGTRALLQTLGNLGYRASAKKAQICQKQVKYLGYLLKEGQRWLTEARKETVMGQPTPKTPRQLREFLGTAGFCRLWIPGFAEMAAPLYPLTKTGTLFNWGPDQQKAYQEIKQALLTAPALGLPDLTKPFELFVDEKQGYAKGVLTQKLGPWRRPVAYLSKKLDPVAAGWPPCLRMVAAIAVLTKDAGKLTMGQPLVILAPHAVEALVKQPPDRWLSNARMTHYQALLLDTDRVQFGPVVALNPATLLPLPEEGLQHNCLDILAEAHGTRPDLTDQPLPDADHTWYTDGSSLLQEGQRKAGAAVTTETEVIWAKALPAGTSAQRAELIALTQALKMAEGKKLNVYTDSRYAFATAHIHGEIYRRRGLLTSEGKEIKNKDEILALLKALFLPKRLSIIHCPGHQKGHSAEARGNRMADQAARKAAITETPDTSTLLAGKRTADGSEFEKRTADGSEFESPKKKAKVE

SEQ ID NO: 2707 - protein, 2093 aa, synthetic construct
MPAAKRVKLDGGDKKYSIGLDIGTNSVGWAVITDEYKVPSKKFKVLGNTDRHSIKKNLIGALLFDSGETAEATRLKRTARRRYTRRKNRICYLQEIFSNEMAKVDDSFFHRLEESFLVEEDKKHERHPIFGNIVDEVAYHEKYPTIYHLRKKLVDSTDKADLRLIYLALAHMIKFRGHFLIEGDLNPDNSDVDKLFIQLVQTYNQLFEENPINASGVDAKAILSARLSKSRRLENLIAQLPGEKKNGLFGNLIALSLGLTPNFKSNFDLAEDAKLQLSKDTYDDDLDNLLAQIGDQYADLFLAAKNLSDAILLSDILRVNTEITKAPLSASMIKRYDEHHQDLTLLKALVRQQLPEKYKEIFFDQSKNGYAGYIDGGASQEEFYKFIKPILEKMDGTEELLVKLNREDLLRKQRTFDNGSIPHQIHLGELHAILRRQEDFYPFLKDNREKIEKILTFRIPYYVGPLARGNSRFAWMTRKSEETITPWNFEEVVDKGASAQSFIERMTNFDKNLPNEKVLPKHSLLYEYFTVYNELTKVKYVTEGMRKPAFLSGEQKKAIVDLLFKTNRKVTVKQLKEDYFKKIECFDSVEISGVEDRFNASLGTYHDLLKIIKDKDFLDNEENEDILEDIVLTLTLFEDREMIEERLKTYAHLFDDKVMKQLKRRRYTGWGRLSRKLINGIRDKQSGKTILDFLKSDGFANRNFMQLIHDDSLTFKEDIQKAQVSGQGDSLHEHIANLAGSPAIKKGILQTVKVVDELVKVMGRHKPENIVIEMARENQTTQKGQKNSRERMKRIEEGIKELGSQILKEHPVENTQLQNEKLYLYYLQNGRDMYVDQELDINRLSDYDVDHIVPQSFLKDDSIDNKVLTRSDKARGKSDNVPSEEVVKKMKNYWRQLLNAKLITQRKFDNLTKAERGGLSELDKAGFIKRQLVETRQITKHVAQILDSRMNTKYDENDKLIREVKVITLKSKLVSDFRKDFQFYKVREINNYHHAHDAYLNAVVGTALIKKYPKLESEFVYGDYKVYDVRKMIAKSEQEIGKATAKYFFYSNIMNFFKTEITLANGEIRKRPLIETNGETGEIVWDKGRDFATVRKVLSMPQVNIVKKTEVQTGGFSKESILPKRNSDKLIARKKDWDPKKYGGFDSPTVAYSVLVVAKVEKGKSKKLKSVKELLGITIMERSSFEKNPIDFLEAKGYKEVKKDLIIKLPKYSLFELENGRKRMLASAGELQKGNELALPSKYVNFLYLASHYEKLKGSPEDNEQKQLFVEQHKHYLDEIIEQISEFSKRVILADANLDKVLSAYNKHRDKPIREQAENIIHLFTLTNLGAPAAFKYFDTTIDRKRYTSTKEVLDATLIHQSITGLYETRIDLSQLGGDGGEAAAKGSSGGTLNIEDEHRLHETSKEPDVSLGSTWLSDFPQAWAETGGMGLAVRQAPLIIPLKATSTPVSIKQYPMSQEARLGIKPHIQRLLDQGILVPCQSPWNTPLLPVKKPGTNDYRPVQDLREVNKRVEDIHPTVPNPYNLLSGLPPSHQWYTVLDLKDAFFCLRLHPTSQPLFAFEWRDPEMGISGQLTWTRLPQGFKNSPTLFDEALHRDLADFRIQHPDLILLQYVDDLLLAATSELDCQQGTRALLQTLGNLGYRASAKKAQICQKQVKYLGYLLKEGQRWLTEARKETVMGQPTPKTPRQLREFLGTAGFCRLWIPGFAEMAAPLYPLTKTGTLFNWGPDQQKAYQEIKQALLTAPALGLPDLTKPFELFVDEKQGYAKGVLTQKLGPWRRPVAYLSKKLDPVAAGWPPCLRMVAAIAVLTKDAGKLTMGQPLVILAPHAVEALVKQPPDRWLSNARMTHYQALLLDTDRVQFGPVVALNPATLLPLPEEGLQHNCLDILAEAHGTRPDLTDQPLPDADHTWYTDGSSLLQEGQRKAGAAVTTETEVIWAKALPAGTSAQRAELIALTQALKMAEGKKLNVYTDSRYAFATAHIHGEIYRRRGLLTSEGKEIKNKDEILALLKALFLPKRLSIIHCPGHQKGHSAEARGNRMADQAARKAAITETPDTSTLLAGKRTADGSEFEKRTADGSEFESPKKKAKVE

SEQ ID NO: 2708 - protein, 2096 aa, synthetic construct
MPAAKRVKLDGGDKKYSIGLDIGTNSVGWAVITDEYKVPSKKFKVLGNTDRHSIKKNLIGALLFDSGETAEATRLKRTARRRYTRRKNRICYLQEIFSNEMAKVDDSFFHRLEESFLVEEDKKHERHPIFGNIVDEVAYHEKYPTIYHLRKKLVDSTDKADLRLIYLALAHMIKFRGHFLIEGDLNPDNSDVDKLFIQLVQTYNQLFEENPINASGVDAKAILSARLSKSRRLENLIAQLPGEKKNGLFGNLIALSLGLTPNFKSNFDLAEDAKLQLSKDTYDDDLDNLLAQIGDQYADLFLAAKNLSDAILLSDILRVNTEITKAPLSASMIKRYDEHHQDLTLLKALVRQQLPEKYKEIFFDQSKNGYAGYIDGGASQEEFYKFIKPILEKMDGTEELLVKLNREDLLRKQRTFDNGSIPHQIHLGELHAILRRQEDFYPFLKDNREKIEKILTFRIPYYVGPLARGNSRFAWMTRKSEETITPWNFEEVVDKGASAQSFIERMTNFDKNLPNEKVLPKHSLLYEYFTVYNELTKVKYVTEGMRKPAFLSGEQKKAIVDLLFKTNRKVTVKQLKEDYFKKIECFDSVEISGVEDRFNASLGTYHDLLKIIKDKDFLDNEENEDILEDIVLTLTLFEDREMIEERLKTYAHLFDDKVMKQLKRRRYTGWGRLSRKLINGIRDKQSGKTILDFLKSDGFANRNFMQLIHDDSLTFKEDIQKAQVSGQGDSLHEHIANLAGSPAIKKGILQTVKVVDELVKVMGRHKPENIVIEMARENQTTQKGQKNSRERMKRIEEGIKELGSQILKEHPVENTQLQNEKLYLYYLQNGRDMYVDQELDINRLSDYDVDHIVPQSFLKDDSIDNKVLTRSDKARGKSDNVPSEEVVKKMKNYWRQLLNAKLITQRKFDNLTKAERGGLSELDKAGFIKRQLVETRQITKHVAQILDSRMNTKYDENDKLIREVKVITLKSKLVSDFRKDFQFYKVREINNYHHAHDAYLNAVVGTALIKKYPKLESEFVYGDYKVYDVRKMIAKSEQEIGKATAKYFFYSNIMNFFKTEITLANGEIRKRPLIETNGETGEIVWDKGRDFATVRKVLSMPQVNIVKKTEVQTGGFSKESILPKRNSDKLIARKKDWDPKKYGGFDSPTVAYSVLVVAKVEKGKSKKLKSVKELLGITIMERSSFEKNPIDFLEAKGYKEVKKDLIIKLPKYSLFELENGRKRMLASAGELQKGNELALPSKYVNFLYLASHYEKLKGSPEDNEQKQLFVEQHKHYLDEIIEQISEFSKRVILADANLDKVLSAYNKHRDKPIREQAENIIHLFTLTNLGAPAAFKYFDTTIDRKRYTSTKEVLDATLIHQSITGLYETRIDLSQLGGDGGGGGGGSEAAAKGGTLNIEDEHRLHETSKEPDVSLGSTWLSDFPQAWAETGGMGLAVRQAPLIIPLKATSTPVSIKQYPMSQEARLGIKPHIQRLLDQGILVPCQSPWNTPLLPVKKPGTNDYRPVQDLREVNKRVEDIHPTVPNPYNLLSGLPPSHQWYTVLDLKDAFFCLRLHPTSQPLFAFEWRDPEMGISGQLTWTRLPQGFKNSPTLFDEALHRDLADFRIQHPDLILLQYVDDLLLAATSELDCQQGTRALLQTLGNLGYRASAKKAQICQKQVKYLGYLLKEGQRWLTEARKETVMGQPTPKTPRQLREFLGTAGFCRLWIPGFAEMAAPLYPLTKTGTLFNWGPDQQKAYQEIKQALLTAPALGLPDLTKPFELFVDEKQGYAKGVLTQKLGPWRRPVAYLSKKLDPVAAGWPPCLRMVAAIAVLTKDAGKLTMGQPLVILAPHAVEALVKQPPDRWLSNARMTHYQALLLDTDRVQFGPVVALNPATLLPLPEEGLQHNCLDILAEAHGTRPDLTDQPLPDADHTWYTDGSSLLQEGQRKAGAAVTTETEVIWAKALPAGTSAQRAELIALTQALKMAEGKKLNVYTDSRYAFATAHIHGEIYRRRGLLTSEGKEIKNKDEILALLKALFLPKRLSIIHCPGHQKGHSAEARGNRMADQAARKAAITETPDTSTLLAGKRTADGSEFEKRTADGSEFESPKKKAKVE

SEQ ID NO: 2709 - protein, 2096 aa, synthetic construct
MPAAKRVKLDGGDKKYSIGLDIGTNSVGWAVITDEYKVPSKKFKVLGNTDRHSIKKNLIGALLFDSGETAEATRLKRTARRRYTRRKNRICYLQEIFSNEMAKVDDSFFHRLEESFLVEEDKKHERHPIFGNIVDEVAYHEKYPTIYHLRKKLVDSTDKADLRLIYLALAHMIKFRGHFLIEGDLNPDNSDVDKLFIQLVQTYNQLFEENPINASGVDAKAILSARLSKSRRLENLIAQLPGEKKNGLFGNLIALSLGLTPNFKSNFDLAEDAKLQLSKDTYDDDLDNLLAQIGDQYADLFLAAKNLSDAILLSDILRVNTEITKAPLSASMIKRYDEHHQDLTLLKALVRQQLPEKYKEIFFDQSKNGYAGYIDGGASQEEFYKFIKPILEKMDGTEELLVKLNREDLLRKQRTFDNGSIPHQIHLGELHAILRRQEDFYPFLKDNREKIEKILTFRIPYYVGPLARGNSRFAWMTRKSEETITPWNFEEVVDKGASAQSFIERMTNFDKNLPNEKVLPKHSLLYEYFTVYNELTKVKYVTEGMRKPAFLSGEQKKAIVDLLFKTNRKVTVKQLKEDYFKKIECFDSVEISGVEDRFNASLGTYHDLLKIIKDKDFLDNEENEDILEDIVLTLTLFEDREMIEERLKTYAHLFDDKVMKQLKRRRYTGWGRLSRKLINGIRDKQSGKTILDFLKSDGFANRNFMQLIHDDSLTFKEDIQKAQVSGQGDSLHEHIANLAGSPAIKKGILQTVKVVDELVKVMGRHKPENIVIEMARENQTTQKGQKNSRERMKRIEEGIKELGSQILKEHPVENTQLQNEKLYLYYLQNGRDMYVDQELDINRLSDYDVDHIVPQSFLKDDSIDNKVLTRSDKARGKSDNVPSEEVVKKMKNYWRQLLNAKLITQRKFDNLTKAERGGLSELDKAGFIKRQLVETRQITKHVAQILDSRMNTKYDENDKLIREVKVITLKSKLVSDFRKDFQFYKVREINNYHHAHDAYLNAVVGTALIKKYPKLESEFVYGDYKVYDVRKMIAKSEQEIGKATAKYFFYSNIMNFFKTEITLANGEIRKRPLIETNGETGEIVWDKGRDFATVRKVLSMPQVNIVKKTEVQTGGFSKESILPKRNSDKLIARKKDWDPKKYGGFDSPTVAYSVLVVAKVEKGKSKKLKSVKELLGITIMERSSFEKNPIDFLEAKGYKEVKKDLIIKLPKYSLFELENGRKRMLASAGELQKGNELALPSKYVNFLYLASHYEKLKGSPEDNEQKQLFVEQHKHYLDEIIEQISEFSKRVILADANLDKVLSAYNKHRDKPIREQAENIIHLFTLTNLGAPAAFKYFDTTIDRKRYTSTKEVLDATLIHQSITGLYETRIDLSQLGGDGGPAPAPAPAPAPGGTLNIEDEHRLHETSKEPDVSLGSTWLSDFPQAWAETGGMGLAVRQAPLIIPLKATSTPVSIKQYPMSQEARLGIKPHIQRLLDQGILVPCQSPWNTPLLPVKKPGTNDYRPVQDLREVNKRVEDIHPTVPNPYNLLSGLPPSHQWYTVLDLKDAFFCLRLHPTSQPLFAFEWRDPEMGISGQLTWTRLPQGFKNSPTLFDEALHRDLADFRIQHPDLILLQYVDDLLLAATSELDCQQGTRALLQTLGNLGYRASAKKAQICQKQVKYLGYLLKEGQRWLTEARKETVMGQPTPKTPRQLREFLGTAGFCRLWIPGFAEMAAPLYPLTKTGTLFNWGPDQQKAYQEIKQALLTAPALGLPDLTKPFELFVDEKQGYAKGVLTQKLGPWRRPVAYLSKKLDPVAAGWPPCLRMVAAIAVLTKDAGKLTMGQPLVILAPHAVEALVKQPPDRWLSNARMTHYQALLLDTDRVQFGPVVALNPATLLPLPEEGLQHNCLDILAEAHGTRPDLTDQPLPDADHTWYTDGSSLLQEGQRKAGAAVTTETEVIWAKALPAGTSAQRAELIALTQALKMAEGKKLNVYTDSRYAFATAHIHGEIYRRRGLLTSEGKEIKNKDEILALLKALFLPKRLSIIHCPGHQKGHSAEARGNRMADQAARKAAITETPDTSTLLAGKRTADGSEFEKRTADGSEFESPKKKAKVE

SEQ ID NO: 2710 - protein, 2091 aa, synthetic construct
MPAAKRVKLDGGDKKYSIGLDIGTNSVGWAVITDEYKVPSKKFKVLGNTDRHSIKKNLIGALLFDSGETAEATRLKRTARRRYTRRKNRICYLQEIFSNEMAKVDDSFFHRLEESFLVEEDKKHERHPIFGNIVDEVAYHEKYPTIYHLRKKLVDSTDKADLRLIYLALAHMIKFRGHFLIEGDLNPDNSDVDKLFIQLVQTYNQLFEENPINASGVDAKAILSARLSKSRRLENLIAQLPGEKKNGLFGNLIALSLGLTPNFKSNFDLAEDAKLQLSKDTYDDDLDNLLAQIGDQYADLFLAAKNLSDAILLSDILRVNTEITKAPLSASMIKRYDEHHQDLTLLKALVRQQLPEKYKEIFFDQSKNGYAGYIDGGASQEEFYKFIKPILEKMDGTEELLVKLNREDLLRKQRTFDNGSIPHQIHLGELHAILRRQEDFYPFLKDNREKIEKILTFRIPYYVGPLARGNSRFAWMTRKSEETITPWNFEEVVDKGASAQSFIERMTNFDKNLPNEKVLPKHSLLYEYFTVYNELTKVKYVTEGMRKPAFLSGEQKKAIVDLLFKTNRKVTVKQLKEDYFKKIECFDSVEISGVEDRFNASLGTYHDLLKIIKDKDFLDNEENEDILEDIVLTLTLFEDREMIEERLKTYAHLFDDKVMKQLKRRRYTGWGRLSRKLINGIRDKQSGKTILDFLKSDGFANRNFMQLIHDDSLTFKEDIQKAQVSGQGDSLHEHIANLAGSPAIKKGILQTVKVVDELVKVMGRHKPENIVIEMARENQTTQKGQKNSRERMKRIEEGIKELGSQILKEHPVENTQLQNEKLYLYYLQNGRDMYVDQELDINRLSDYDVDHIVPQSFLKDDSIDNKVLTRSDKARGKSDNVPSEEVVKKMKNYWRQLLNAKLITQRKFDNLTKAERGGLSELDKAGFIKRQLVETRQITKHVAQILDSRMNTKYDENDKLIREVKVITLKSKLVSDFRKDFQFYKVREINNYHHAHDAYLNAVVGTALIKKYPKLESEFVYGDYKVYDVRKMIAKSEQEIGKATAKYFFYSNIMNFFKTEITLANGEIRKRPLIETNGETGEIVWDKGRDFATVRKVLSMPQVNIVKKTEVQTGGFSKESILPKRNSDKLIARKKDWDPKKYGGFDSPTVAYSVLVVAKVEKGKSKKLKSVKELLGITIMERSSFEKNPIDFLEAKGYKEVKKDLIIKLPKYSLFELENGRKRMLASAGELQKGNELALPSKYVNFLYLASHYEKLKGSPEDNEQKQLFVEQHKHYLDEIIEQISEFSKRVILADANLDKVLSAYNKHRDKPIREQAENIIHLFTLTNLGAPAAFKYFDTTIDRKRYTSTKEVLDATLIHQSITGLYETRIDLSQLGGDGGGSSPAPGGTLNIEDEHRLHETSKEPDVSLGSTWLSDFPQAWAETGGMGLAVRQAPLIIPLKATSTPVSIKQYPMSQEARLGIKPHIQRLLDQGILVPCQSPWNTPLLPVKKPGTNDYRPVQDLREVNKRVEDIHPTVPNPYNLLSGLPPSHQWYTVLDLKDAFFCLRLHPTSQPLFAFEWRDPEMGISGQLTWTRLPQGFKNSPTLFDEALHRDLADFRIQHPDLILLQYVDDLLLAATSELDCQQGTRALLQTLGNLGYRASAKKAQICQKQVKYLGYLLKEGQRWLTEARKETVMGQPTPKTPRQLREFLGTAGFCRLWIPGFAEMAAPLYPLTKTGTLFNWGPDQQKAYQEIKQALLTAPALGLPDLTKPFELFVDEKQGYAKGVLTQKLGPWRRPVAYLSKKLDPVAAGWPPCLRMVAAIAVLTKDAGKLTMGQPLVILAPHAVEALVKQPPDRWLSNARMTHYQALLLDTDRVQFGPVVALNPATLLPLPEEGLQHNCLDILAEAHGTRPDLTDQPLPDADHTWYTDGSSLLQEGQRKAGAAVTTETEVIWAKALPAGTSAQRAELIALTQALKMAEGKKLNVYTDSRYAFATAHIHGEIYRRRGLLTSEGKEIKNKDEILALLKALFLPKRLSIIHCPGHQKGHSAEARGNRMADQAARKAAITETPDTSTLLAGKRTADGSEFEKRTADGSEFESPKKKAKVE

SEQ ID NO: 2711 - protein, 2131 aa, synthetic construct
MPAAKRVKLDGGDKKYSIGLDIGTNSVGWAVITDEYKVPSKKFKVLGNTDRHSIKKNLIGALLFDSGETAEATRLKRTARRRYTRRKNRICYLQEIFSNEMAKVDDSFFHRLEESFLVEEDKKHERHPIFGNIVDEVAYHEKYPTIYHLRKKLVDSTDKADLRLIYLALAHMIKFRGHFLIEGDLNPDNSDVDKLFIQLVQTYNQLFEENPINASGVDAKAILSARLSKSRRLENLIAQLPGEKKNGLFGNLIALSLGLTPNFKSNFDLAEDAKLQLSKDTYDDDLDNLLAQIGDQYADLFLAAKNLSDAILLSDILRVNTEITKAPLSASMIKRYDEHHQDLTLLKALVRQQLPEKYKEIFFDQSKNGYAGYIDGGASQEEFYKFIKPILEKMDGTEELLVKLNREDLLRKQRTFDNGSIPHQIHLGELHAILRRQEDFYPFLKDNREKIEKILTFRIPYYVGPLARGNSRFAWMTRKSEETITPWNFEEVVDKGASAQSFIERMTNFDKNLPNEKVLPKHSLLYEYFTVYNELTKVKYVTEGMRKPAFLSGEQKKAIVDLLFKTNRKVTVKQLKEDYFKKIECFDSVEISGVEDRFNASLGTYHDLLKIIKDKDFLDNEENEDILEDIVLTLTLFEDREMIEERLKTYAHLFDDKVMKQLKRRRYTGWGRLSRKLINGIRDKQSGKTILDFLKSDGFANRNFMQLIHDDSLTFKEDIQKAQVSGQGDSLHEHIANLAGSPAIKKGILQTVKVVDELVKVMGRHKPENIVIEMARENQTTQKGQKNSRERMKRIEEGIKELGSQILKEHPVENTQLQNEKLYLYYLQNGRDMYVDQELDINRLSDYDVDHIVPQSFLKDDSIDNKVLTRSDKARGKSDNVPSEEVVKKMKNYWRQLLNAKLITQRKFDNLTKAERGGLSELDKAGFIKRQLVETRQITKHVAQILDSRMNTKYDENDKLIREVKVITLKSKLVSDFRKDFQFYKVREINNYHHAHDAYLNAVVGTALIKKYPKLESEFVYGDYKVYDVRKMIAKSEQEIGKATAKYFFYSNIMNFFKTEITLANGEIRKRPLIETNGETGEIVWDKGRDFATVRKVLSMPQVNIVKKTEVQTGGFSKESILPKRNSDKLIARKKDWDPKKYGGFDSPTVAYSVLVVAKVEKGKSKKLKSVKELLGITIMERSSFEKNPIDFLEAKGYKEVKKDLIIKLPKYSLFELENGRKRMLASAGELQKGNELALPSKYVNFLYLASHYEKLKGSPEDNEQKQLFVEQHKHYLDEIIEQISEFSKRVILADANLDKVLSAYNKHRDKPIREQAENIIHLFTLTNLGAPAAFKYFDTTIDRKRYTSTKEVLDATLIHQSITGLYETRIDLSQLGGDGGAEAAAKEAAAKEAAAKEAAAKALEAEAAAKEAAAKEAAAKEAAAKAGGTLNIEDEHRLHETSKEPDVSLGSTWLSDFPQAWAETGGMGLAVRQAPLIIPLKATSTPVSIKQYPMSQEARLGIKPHIQRLLDQGILVPCQSPWNTPLLPVKKPGTNDYRPVQDLREVNKRVEDIHPTVPNPYNLLSGLPPSHQWYTVLDLKDAFFCLRLHPTSQPLFAFEWRDPEMGISGQLTWTRLPQGFKNSPTLFNEALHRDLADFRIQHPDLILLQYVDDLLLAATSELDCQQGTRALLQTLGNLGYRASAKKAQICQKQVKYLGYLLKEGQRWLTEARKETVMGQPTPKTPRQLREFLGTAGFCRLWIPGFAEMAAPLYPLTKPGTLFNWGPDQQKAYQEIKQALLTAPALGLPDLTKPFELFVDEKQGYAKGVLTQKLGPWRRPVAYLSKKLDPVAAGWPPCLRMVAAIAVLTKDAGKLTMGQPLVILAPHAVEALVKQPPDRWLSNARMTHYQALLLDTDRVQFGPVVALNPATLLPLPEEGLQHNCLDILAEAHGTRPDLTDQPLPDADHTWYTDGSSLLQEGQRKAGAAVTTETEVIWAKALPAGTSAQRAELIALTQALKMAEGKKLNVYTDSRYAFATAHIHGEIYRRRGWLTSEGKEIKNKDEILALLKALFLPKRLSIIHCPGHQKGHSAEARGNRMADQAARKAAITETPDTSTLLAGKRTADGSEFEKRTADGSEFESPKKKAKVE

SEQ ID NO: 2712 - protein, 2100 aa, synthetic construct
MPAAKRVKLDGGDKKYSIGLDIGTNSVGWAVITDEYKVPSKKFKVLGNTDRHSIKKNLIGALLFDSGETAEATRLKRTARRRYTRRKNRICYLQEIFSNEMAKVDDSFFHRLEESFLVEEDKKHERHPIFGNIVDEVAYHEKYPTIYHLRKKLVDSTDKADLRLIYLALAHMIKFRGHFLIEGDLNPDNSDVDKLFIQLVQTYNQLFEENPINASGVDAKAILSARLSKSRRLENLIAQLPGEKKNGLFGNLIALSLGLTPNFKSNFDLAEDAKLQLSKDTYDDDLDNLLAQIGDQYADLFLAAKNLSDAILLSDILRVNTEITKAPLSASMIKRYDEHHQDLTLLKALVRQQLPEKYKEIFFDQSKNGYAGYIDGGASQEEFYKFIKPILEKMDGTEELLVKLNREDLLRKQRTFDNGSIPHQIHLGELHAILRRQEDFYPFLKDNREKIEKILTFRIPYYVGPLARGNSRFAWMTRKSEETITPWNFEEVVDKGASAQSFIERMTNFDKNLPNEKVLPKHSLLYEYFTVYNELTKVKYVTEGMRKPAFLSGEQKKAIVDLLFKTNRKVTVKQLKEDYFKKIECFDSVEISGVEDRFNASLGTYHDLLKIIKDKDFLDNEENEDILEDIVLTLTLFEDREMIEERLKTYAHLFDDKVMKQLKRRRYTGWGRLSRKLINGIRDKQSGKTILDFLKSDGFANRNFMQLIHDDSLTFKEDIQKAQVSGQGDSLHEHIANLAGSPAIKKGILQTVKVVDELVKVMGRHKPENIVIEMARENQTTQKGQKNSRERMKRIEEGIKELGSQILKEHPVENTQLQNEKLYLYYLQNGRDMYVDQELDINRLSDYDVDHIVPQSFLKDDSIDNKVLTRSDKARGKSDNVPSEEVVKKMKNYWRQLLNAKLITQRKFDNLTKAERGGLSELDKAGFIKRQLVETRQITKHVAQILDSRMNTKYDENDKLIREVKVITLKSKLVSDFRKDFQFYKVREINNYHHAHDAYLNAVVGTALIKKYPKLESEFVYGDYKVYDVRKMIAKSEQEIGKATAKYFFYSNIMNFFKTEITLANGEIRKRPLIETNGETGEIVWDKGRDFATVRKVLSMPQVNIVKKTEVQTGGFSKESILPKRNSDKLIARKKDWDPKKYGGFDSPTVAYSVLVVAKVEKGKSKKLKSVKELLGITIMERSSFEKNPIDFLEAKGYKEVKKDLIIKLPKYSLFELENGRKRMLASAGELQKGNELALPSKYVNFLYLASHYEKLKGSPEDNEQKQLFVEQHKHYLDEIIEQISEFSKRVILADANLDKVLSAYNKHRDKPIREQAENIIHLFTLTNLGAPAAFKYFDTTIDRKRYTSTKEVLDATLIHQSITGLYETRIDLSQLGGDGGEAAAKGGGGSEAAAKGGTLNIEDEHRLHETSKEPDVSLGSTWLSDFPQAWAETGGMGLAVRQAPLIIPLKATSTPVSIKQYPMSQEARLGIKPHIQRLLDQGILVPCQSPWNTPLLPVKKPGTNDYRPVQDLREVNKRVEDIHPTVPNPYNLLSGLPPSHQWYTVLDLKDAFFCLRLHPTSQPLFAFEWRDPEMGISGQLTWTRLPQGFKNSPTLFNEALHRDLADFRIQHPDLILLQYVDDLLLAATSELDCQQGTRALLQTLGNLGYRASAKKAQICQKQVKYLGYLLKEGQRWLTEARKETVMGQPTPKTPRQLREFLGTAGFCRLWIPGFAEMAAPLYPLTKPGTLFNWGPDQQKAYQEIKQALLTAPALGLPDLTKPFELFVDEKQGYAKGVLTQKLGPWRRPVAYLSKKLDPVAAGWPPCLRMVAAIAVLTKDAGKLTMGQPLVILAPHAVEALVKQPPDRWLSNARMTHYQALLLDTDRVQFGPVVALNPATLLPLPEEGLQHNCLDILAEAHGTRPDLTDQPLPDADHTWYTDGSSLLQEGQRKAGAAVTTETEVIWAKALPAGTSAQRAELIALTQALKMAEGKKLNVYTDSRYAFATAHIHGEIYRRRGWLTSEGKEIKNKDEILALLKALFLPKRLSIIHCPGHQKGHSAEARGNRMADQAARKAAITETPDTSTLLAGKRTADGSEFEKRTADGSEFESPKKKAKVE

SEQ ID NO: 2713 - protein, 2096 aa, synthetic construct
MPAAKRVKLDGGDKKYSIGLDIGTNSVGWAVITDEYKVPSKKFKVLGNTDRHSIKKNLIGALLFDSGETAEATRLKRTARRRYTRRKNRICYLQEIFSNEMAKVDDSFFHRLEESFLVEEDKKHERHPIFGNIVDEVAYHEKYPTIYHLRKKLVDSTDKADLRLIYLALAHMIKFRGHFLIEGDLNPDNSDVDKLFIQLVQTYNQLFEENPINASGVDAKAILSARLSKSRRLENLIAQLPGEKKNGLFGNLIALSLGLTPNFKSNFDLAEDAKLQLSKDTYDDDLDNLLAQIGDQYADLFLAAKNLSDAILLSDILRVNTEITKAPLSASMIKRYDEHHQDLTLLKALVRQQLPEKYKEIFFDQSKNGYAGYIDGGASQEEFYKFIKPILEKMDGTEELLVKLNREDLLRKQRTFDNGSIPHQIHLGELHAILRRQEDFYPFLKDNREKIEKILTFRIPYYVGPLARGNSRFAWMTRKSEETITPWNFEEVVDKGASAQSFIERMTNFDKNLPNEKVLPKHSLLYEYFTVYNELTKVKYVTEGMRKPAFLSGEQKKAIVDLLFKTNRKVTVKQLKEDYFKKIECFDSVEISGVEDRFNASLGTYHDLLKIIKDKDFLDNEENEDILEDIVLTLTLFEDREMIEERLKTYAHLFDDKVMKQLKRRRYTGWGRLSRKLINGIRDKQSGKTILDFLKSDGFANRNFMQLIHDDSLTFKEDIQKAQVSGQGDSLHEHIANLAGSPAIKKGILQTVKVVDELVKVMGRHKPENIVIEMARENQTTQKGQKNSRERMKRIEEGIKELGSQILKEHPVENTQLQNEKLYLYYLQNGRDMYVDQELDINRLSDYDVDHIVPQSFLKDDSIDNKVLTRSDKARGKSDNVPSEEVVKKMKNYWRQLLNAKLITQRKFDNLTKAERGGLSELDKAGFIKRQLVETRQITKHVAQILDSRMNTKYDENDKLIREVKVITLKSKLVSDFRKDFQFYKVREINNYHHAHDAYLNAVVGTALIKKYPKLESEFVYGDYKVYDVRKMIAKSEQEIGKATAKYFFYSNIMNFFKTEITLANGEIRKRPLIETNGETGEIVWDKGRDFATVRKVLSMPQVNIVKKTEVQTGGFSKESILPKRNSDKLIARKKDWDPKKYGGFDSPTVAYSVLVVAKVEKGKSKKLKSVKELLGITIMERSSFEKNPIDFLEAKGYKEVKKDLIIKLPKYSLFELENGRKRMLASAGELQKGNELALPSKYVNFLYLASHYEKLKGSPEDNEQKQLFVEQHKHYLDEIIEQISEFSKRVILADANLDKVLSAYNKHRDKPIREQAENIIHLFTLTNLGAPAAFKYFDTTIDRKRYTSTKEVLDATLIHQSITGLYETRIDLSQLGGDGGGGSEAAAKGGGGGTLNIEDEHRLHETSKEPDVSLGSTWLSDFPQAWAETGGMGLAVRQAPLIIPLKATSTPVSIKQYPMSQEARLGIKPHIQRLLDQGILVPCQSPWNTPLLPVKKPGTNDYRPVQDLREVNKRVEDIHPTVPNPYNLLSGLPPSHQWYTVLDLKDAFFCLRLHPTSQPLFAFEWRDPEMGISGQLTWTRLPQGFKNSPTLFNEALHRDLADFRIQHPDLILLQYVDDLLLAATSELDCQQGTRALLQTLGNLGYRASAKKAQICQKQVKYLGYLLKEGQRWLTEARKETVMGQPTPKTPRQLREFLGTAGFCRLWIPGFAEMAAPLYPLTKPGTLFNWGPDQQKAYQEIKQALLTAPALGLPDLTKPFELFVDEKQGYAKGVLTQKLGPWRRPVAYLSKKLDPVAAGWPPCLRMVAAIAVLTKDAGKLTMGQPLVILAPHAVEALVKQPPDRWLSNARMTHYQALLLDTDRVQFGPVVALNPATLLPLPEEGLQHNCLDILAEAHGTRPDLTDQPLPDADHTWYTDGSSLLQEGQRKAGAAVTTETEVIWAKALPAGTSAQRAELIALTQALKMAEGKKLNVYTDSRYAFATAHIHGEIYRRRGWLTSEGKEIKNKDEILALLKALFLPKRLSIIHCPGHQKGHSAEARGNRMADQAARKAAITETPDTSTLLAGKRTADGSEFEKRTADGSEFESPKKKAKVE

SEQ ID NO: 2714 - protein, 2096 aa, synthetic construct
MPAAKRVKLDGGDKKYSIGLDIGTNSVGWAVITDEYKVPSKKFKVLGNTDRHSIKKNLIGALLFDSGETAEATRLKRTARRRYTRRKNRICYLQEIFSNEMAKVDDSFFHRLEESFLVEEDKKHERHPIFGNIVDEVAYHEKYPTIYHLRKKLVDSTDKADLRLIYLALAHMIKFRGHFLIEGDLNPDNSDVDKLFIQLVQTYNQLFEENPINASGVDAKAILSARLSKSRRLENLIAQLPGEKKNGLFGNLIALSLGLTPNFKSNFDLAEDAKLQLSKDTYDDDLDNLLAQIGDQYADLFLAAKNLSDAILLSDILRVNTEITKAPLSASMIKRYDEHHQDLTLLKALVRQQLPEKYKEIFFDQSKNGYAGYIDGGASQEEFYKFIKPILEKMDGTEELLVKLNREDLLRKQRTFDNGSIPHQIHLGELHAILRRQEDFYPFLKDNREKIEKILTFRIPYYVGPLARGNSRFAWMTRKSEETITPWNFEEVVDKGASAQSFIERMTNFDKNLPNEKVLPKHSLLYEYFTVYNELTKVKYVTEGMRKPAFLSGEQKKAIVDLLFKTNRKVTVKQLKEDYFKKIECFDSVEISGVEDRFNASLGTYHDLLKIIKDKDFLDNEENEDILEDIVLTLTLFEDREMIEERLKTYAHLFDDKVMKQLKRRRYTGWGRLSRKLINGIRDKQSGKTILDFLKSDGFANRNFMQLIHDDSLTFKEDIQKAQVSGQGDSLHEHIANLAGSPAIKKGILQTVKVVDELVKVMGRHKPENIVIEMARENQTTQKGQKNSRERMKRIEEGIKELGSQILKEHPVENTQLQNEKLYLYYLQNGRDMYVDQELDINRLSDYDVDHIVPQSFLKDDSIDNKVLTRSDKARGKSDNVPSEEVVKKMKNYWRQLLNAKLITQRKFDNLTKAERGGLSELDKAGFIKRQLVETRQITKHVAQILDSRMNTKYDENDKLIREVKVITLKSKLVSDFRKDFQFYKVREINNYHHAHDAYLNAVVGTALIKKYPKLESEFVYGDYKVYDVRKMIAKSEQEIGKATAKYFFYSNIMNFFKTEITLANGEIRKRPLIETNGETGEIVWDKGRDFATVRKVLSMPQVNIVKKTEVQTGGFSKESILPKRNSDKLIARKKDWDPKKYGGFDSPTVAYSVLVVAKVEKGKSKKLKSVKELLGITIMERSSFEKNPIDFLEAKGYKEVKKDLIIKLPKYSLFELENGRKRMLASAGELQKGNELALPSKYVNFLYLASHYEKLKGSPEDNEQKQLFVEQHKHYLDEIIEQISEFSKRVILADANLDKVLSAYNKHRDKPIREQAENIIHLFTLTNLGAPAAFKYFDTTIDRKRYTSTKEVLDATLIHQSITGLYETRIDLSQLGGDGGEAAAKPAPGGSGGTLNIEDEHRLHETSKEPDVSLGSTWLSDFPQAWAETGGMGLAVRQAPLIIPLKATSTPVSIKQYPMSQEARLGIKPHIQRLLDQGILVPCQSPWNTPLLPVKKPGTNDYRPVQDLREVNKRVEDIHPTVPNPYNLLSGLPPSHQWYTVLDLKDAFFCLRLHPTSQPLFAFEWRDPEMGISGQLTWTRLPQGFKNSPTLFNEALHRDLADFRIQHPDLILLQYVDDLLLAATSELDCQQGTRALLQTLGNLGYRASAKKAQICQKQVKYLGYLLKEGQRWLTEARKETVMGQPTPKTPRQLREFLGTAGFCRLWIPGFAEMAAPLYPLTKPGTLFNWGPDQQKAYQEIKQALLTAPALGLPDLTKPFELFVDEKQGYAKGVLTQKLGPWRRPVAYLSKKLDPVAAGWPPCLRMVAAIAVLTKDAGKLTMGQPLVILAPHAVEALVKQPPDRWLSNARMTHYQALLLDTDRVQFGPVVALNPATLLPLPEEGLQHNCLDILAEAHGTRPDLTDQPLPDADHTWYTDGSSLLQEGQRKAGAAVTTETEVIWAKALPAGTSAQRAELIALTQALKMAEGKKLNVYTDSRYAFATAHIHGEIYRRRGWLTSEGKEIKNKDEILALLKALFLPKRLSIIHCPGHQKGHSAEARGNRMADQAARKAAITETPDTSTLLAGKRTADGSEFEKRTADGSEFESPKKKAKVE

SEQ ID NO: 2715 - protein, 2094 aa, synthetic construct
MPAAKRVKLDGGDKKYSIGLDIGTNSVGWAVITDEYKVPSKKFKVLGNTDRHSIKKNLIGALLFDSGETAEATRLKRTARRRYTRRKNRICYLQEIFSNEMAKVDDSFFHRLEESFLVEEDKKHERHPIFGNIVDEVAYHEKYPTIYHLRKKLVDSTDKADLRLIYLALAHMIKFRGHFLIEGDLNPDNSDVDKLFIQLVQTYNQLFEENPINASGVDAKAILSARLSKSRRLENLIAQLPGEKKNGLFGNLIALSLGLTPNFKSNFDLAEDAKLQLSKDTYDDDLDNLLAQIGDQYADLFLAAKNLSDAILLSDILRVNTEITKAPLSASMIKRYDEHHQDLTLLKALVRQQLPEKYKEIFFDQSKNGYAGYIDGGASQEEFYKFIKPILEKMDGTEELLVKLNREDLLRKQRTFDNGSIPHQIHLGELHAILRRQEDFYPFLKDNREKIEKILTFRIPYYVGPLARGNSRFAWMTRKSEETITPWNFEEVVDKGASAQSFIERMTNFDKNLPNEKVLPKHSLLYEYFTVYNELTKVKYVTEGMRKPAFLSGEQKKAIVDLLFKTNRKVTVKQLKEDYFKKIECFDSVEISGVEDRFNASLGTYHDLLKIIKDKDFLDNEENEDILEDIVLTLTLFEDREMIEERLKTYAHLFDDKVMKQLKRRRYTGWGRLSRKLINGIRDKQSGKTILDFLKSDGFANRNFMQLIHDDSLTFKEDIQKAQVSGQGDSLHEHIANLAGSPAIKKGILQTVKVVDELVKVMGRHKPENIVIEMARENQTTQKGQKNSRERMKRIEEGIKELGSQILKEHPVENTQLQNEKLYLYYLQNGRDMYVDQELDINRLSDYDVDHIVPQSFLKDDSIDNKVLTRSDKARGKSDNVPSEEVVKKMKNYWRQLLNAKLITQRKFDNLTKAERGGLSELDKAGFIKRQLVETRQITKHVAQILDSRMNTKYDENDKLIREVKVITLKSKLVSDFRKDFQFYKVREINNYHHAHDAYLNAVVGTALIKKYPKLESEFVYGDYKVYDVRKMIAKSEQEIGKATAKYFFYSNIMNFFKTEITLANGEIRKRPLIETNGETGEIVWDKGRDFATVRKVLSMPQVNIVKKTEVQTGGFSKESILPKRNSDKLIARKKDWDPKKYGGFDSPTVAYSVLVVAKVEKGKSKKLKSVKELLGITIMERSSFEKNPIDFLEAKGYKEVKKDLIIKLPKYSLFELENGRKRMLASAGELQKGNELALPSKYVNFLYLASHYEKLKGSPEDNEQKQLFVEQHKHYLDEIIEQISEFSKRVILADANLDKVLSAYNKHRDKPIREQAENIIHLFTLTNLGAPAAFKYFDTTIDRKRYTSTKEVLDATLIHQSITGLYETRIDLSQLGGDGGGSSGGGGGSGGTLNIEDEHRLHETSKEPDVSLGSTWLSDFPQAWAETGGMGLAVRQAPLIIPLKATSTPVSIKQYPMSQEARLGIKPHIQRLLDQGILVPCQSPWNTPLLPVKKPGTNDYRPVQDLREVNKRVEDIHPTVPNPYNLLSGLPPSHQWYTVLDLKDAFFCLRLHPTSQPLFAFEWRDPEMGISGQLTWTRLPQGFKNSPTLFNEALHRDLADFRIQHPDLILLQYVDDLLLAATSELDCQQGTRALLQTLGNLGYRASAKKAQICQKQVKYLGYLLKEGQRWLTEARKETVMGQPTPKTPRQLREFLGTAGFCRLWIPGFAEMAAPLYPLTKPGTLFNWGPDQQKAYQEIKQALLTAPALGLPDLTKPFELFVDEKQGYAKGVLTQKLGPWRRPVAYLSKKLDPVAAGWPPCLRMVAAIAVLTKDAGKLTMGQPLVILAPHAVEALVKQPPDRWLSNARMTHYQALLLDTDRVQFGPVVALNPATLLPLPEEGLQHNCLDILAEAHGTRPDLTDQPLPDADHTWYTDGSSLLQEGQRKAGAAVTTETEVIWAKALPAGTSAQRAELIALTQALKMAEGKKLNVYTDSRYAFATAHIHGEIYRRRGWLTSEGKEIKNKDEILALLKALFLPKRLSIIHCPGHQKGHSAEARGNRMADQAARKAAITETPDTSTLLAGKRTADGSEFEKRTADGSEFESPKKKAKVE

SEQ ID NO: 2716 - protein, 2110 aa, synthetic construct
MPAAKRVKLDGGDKKYSIGLDIGTNSVGWAVITDEYKVPSKKFKVLGNTDRHSIKKNLIGALLFDSGETAEATRLKRTARRRYTRRKNRICYLQEIFSNEMAKVDDSFFHRLEESFLVEEDKKHERHPIFGNIVDEVAYHEKYPTIYHLRKKLVDSTDKADLRLIYLALAHMIKFRGHFLIEGDLNPDNSDVDKLFIQLVQTYNQLFEENPINASGVDAKAILSARLSKSRRLENLIAQLPGEKKNGLFGNLIALSLGLTPNFKSNFDLAEDAKLQLSKDTYDDDLDNLLAQIGDQYADLFLAAKNLSDAILLSDILRVNTEITKAPLSASMIKRYDEHHQDLTLLKALVRQQLPEKYKEIFFDQSKNGYAGYIDGGASQEEFYKFIKPILEKMDGTEELLVKLNREDLLRKQRTFDNGSIPHQIHLGELHAILRRQEDFYPFLKDNREKIEKILTFRIPYYVGPLARGNSRFAWMTRKSEETITPWNFEEVVDKGASAQSFIERMTNFDKNLPNEKVLPKHSLLYEYFTVYNELTKVKYVTEGMRKPAFLSGEQKKAIVDLLFKTNRKVTVKQLKEDYFKKIECFDSVEISGVEDRFNASLGTYHDLLKIIKDKDFLDNEENEDILEDIVLTLTLFEDREMIEERLKTYAHLFDDKVMKQLKRRRYTGWGRLSRKLINGIRDKQSGKTILDFLKSDGFANRNFMQLIHDDSLTFKEDIQKAQVSGQGDSLHEHIANLAGSPAIKKGILQTVKVVDELVKVMGRHKPENIVIEMARENQTTQKGQKNSRERMKRIEEGIKELGSQILKEHPVENTQLQNEKLYLYYLQNGRDMYVDQELDINRLSDYDVDHIVPQSFLKDDSIDNKVLTRSDKARGKSDNVPSEEVVKKMKNYWRQLLNAKLITQRKFDNLTKAERGGLSELDKAGFIKRQLVETRQITKHVAQILDSRMNTKYDENDKLIREVKVITLKSKLVSDFRKDFQFYKVREINNYHHAHDAYLNAVVGTALIKKYPKLESEFVYGDYKVYDVRKMIAKSEQEIGKATAKYFFYSNIMNFFKTEITLANGEIRKRPLIETNGETGEIVWDKGRDFATVRKVLSMPQVNIVKKTEVQTGGFSKESILPKRNSDKLIARKKDWDPKKYGGFDSPTVAYSVLVVAKVEKGKSKKLKSVKELLGITIMERSSFEKNPIDFLEAKGYKEVKKDLIIKLPKYSLFELENGRKRMLASAGELQKGNELALPSKYVNFLYLASHYEKLKGSPEDNEQKQLFVEQHKHYLDEIIEQISEFSKRVILADANLDKVLSAYNKHRDKPIREQAENIIHLFTLTNLGAPAAFKYFDTTIDRKRYTSTKEVLDATLIHQSITGLYETRIDLSQLGGDGGEAAAKEAAAKEAAAKEAAAKEAAAKGGTLNIEDEHRLHETSKEPDVSLGSTWLSDFPQAWAETGGMGLAVRQAPLIIPLKATSTPVSIKQYPMSQEARLGIKPHIQRLLDQGILVPCQSPWNTPLLPVKKPGTNDYRPVQDLREVNKRVEDIHPTVPNPYNLLSGLPPSHQWYTVLDLKDAFFCLRLHPTSQPLFAFEWRDPEMGISGQLTWTRLPQGFKNSPTLFNEALHRDLADFRIQHPDLILLQYVDDLLLAATSELDCQQGTRALLQTLGNLGYRASAKKAQICQKQVKYLGYLLKEGQRWLTEARKETVMGQPTPKTPRQLREFLGTAGFCRLWIPGFAEMAAPLYPLTKPGTLFNWGPDQQKAYQEIKQALLTAPALGLPDLTKPFELFVDEKQGYAKGVLTQKLGPWRRPVAYLSKKLDPVAAGWPPCLRMVAAIAVLTKDAGKLTMGQPLVILAPHAVEALVKQPPDRWLSNARMTHYQALLLDTDRVQFGPVVALNPATLLPLPEEGLQHNCLDILAEAHGTRPDLTDQPLPDADHTWYTDGSSLLQEGQRKAGAAVTTETEVIWAKALPAGTSAQRAELIALTQALKMAEGKKLNVYTDSRYAFATAHIHGEIYRRRGWLTSEGKEIKNKDEILALLKALFLPKRLSIIHCPGHQKGHSAEARGNRMADQAARKAAITETPDTSTLLAGKRTADGSEFEKRTADGSEFESPKKKAKVE

SEQ ID NO: 2717 - protein, 2091 aa, synthetic construct
MPAAKRVKLDGGDKKYSIGLDIGTNSVGWAVITDEYKVPSKKFKVLGNTDRHSIKKNLIGALLFDSGETAEATRLKRTARRRYTRRKNRICYLQEIFSNEMAKVDDSFFHRLEESFLVEEDKKHERHPIFGNIVDEVAYHEKYPTIYHLRKKLVDSTDKADLRLIYLALAHMIKFRGHFLIEGDLNPDNSDVDKLFIQLVQTYNQLFEENPINASGVDAKAILSARLSKSRRLENLIAQLPGEKKNGLFGNLIALSLGLTPNFKSNFDLAEDAKLQLSKDTYDDDLDNLLAQIGDQYADLFLAAKNLSDAILLSDILRVNTEITKAPLSASMIKRYDEHHQDLTLLKALVRQQLPEKYKEIFFDQSKNGYAGYIDGGASQEEFYKFIKPILEKMDGTEELLVKLNREDLLRKQRTFDNGSIPHQIHLGELHAILRRQEDFYPFLKDNREKIEKILTFRIPYYVGPLARGNSRFAWMTRKSEETITPWNFEEVVDKGASAQSFIERMTNFDKNLPNEKVLPKHSLLYEYFTVYNELTKVKYVTEGMRKPAFLSGEQKKAIVDLLFKTNRKVTVKQLKEDYFKKIECFDSVEISGVEDRFNASLGTYHDLLKIIKDKDFLDNEENEDILEDIVLTLTLFEDREMIEERLKTYAHLFDDKVMKQLKRRRYTGWGRLSRKLINGIRDKQSGKTILDFLKSDGFANRNFMQLIHDDSLTFKEDIQKAQVSGQGDSLHEHIANLAGSPAIKKGILQTVKVVDELVKVMGRHKPENIVIEMARENQTTQKGQKNSRERMKRIEEGIKELGSQILKEHPVENTQLQNEKLYLYYLQNGRDMYVDQELDINRLSDYDVDHIVPQSFLKDDSIDNKVLTRSDKARGKSDNVPSEEVVKKMKNYWRQLLNAKLITQRKFDNLTKAERGGLSELDKAGFIKRQLVETRQITKHVAQILDSRMNTKYDENDKLIREVKVITLKSKLVSDFRKDFQFYKVREINNYHHAHDAYLNAVVGTALIKKYPKLESEFVYGDYKVYDVRKMIAKSEQEIGKATAKYFFYSNIMNFFKTEITLANGEIRKRPLIETNGETGEIVWDKGRDFATVRKVLSMPQVNIVKKTEVQTGGFSKESILPKRNSDKLIARKKDWDPKKYGGFDSPTVAYSVLVVAKVEKGKSKKLKSVKELLGITIMERSSFEKNPIDFLEAKGYKEVKKDLIIKLPKYSLFELENGRKRMLASAGELQKGNELALPSKYVNFLYLASHYEKLKGSPEDNEQKQLFVEQHKHYLDEIIEQISEFSKRVILADANLDKVLSAYNKHRDKPIREQAENIIHLFTLTNLGAPAAFKYFDTTIDRKRYTSTKEVLDATLIHQSITGLYETRIDLSQLGGDGGGGGGGSGGTLNIEDEHRLHETSKEPDVSLGSTWLSDFPQAWAETGGMGLAVRQAPLIIPLKATSTPVSIKQYPMSQEARLGIKPHIQRLLDQGILVPCQSPWNTPLLPVKKPGTNDYRPVQDLREVNKRVEDIHPTVPNPYNLLSGLPPSHQWYTVLDLKDAFFCLRLHPTSQPLFAFEWRDPEMGISGQLTWTRLPQGFKNSPTLFNEALHRDLADFRIQHPDLILLQYVDDLLLAATSELDCQQGTRALLQTLGNLGYRASAKKAQICQKQVKYLGYLLKEGQRWLTEARKETVMGQPTPKTPRQLREFLGTAGFCRLWIPGFAEMAAPLYPLTKPGTLFNWGPDQQKAYQEIKQALLTAPALGLPDLTKPFELFVDEKQGYAKGVLTQKLGPWRRPVAYLSKKLDPVAAGWPPCLRMVAAIAVLTKDAGKLTMGQPLVILAPHAVEALVKQPPDRWLSNARMTHYQALLLDTDRVQFGPVVALNPATLLPLPEEGLQHNCLDILAEAHGTRPDLTDQPLPDADHTWYTDGSSLLQEGQRKAGAAVTTETEVIWAKALPAGTSAQRAELIALTQALKMAEGKKLNVYTDSRYAFATAHIHGEIYRRRGWLTSEGKEIKNKDEILALLKALFLPKRLSIIHCPGHQKGHSAEARGNRMADQAARKAAITETPDTSTLLAGKRTADGSEFEKRTADGSEFESPKKKAKVE

SEQ ID NO: 2718 - protein, 2093 aa, synthetic construct
MPAAKRVKLDGGDKKYSIGLDIGTNSVGWAVITDEYKVPSKKFKVLGNTDRHSIKKNLIGALLFDSGETAEATRLKRTARRRYTRRKNRICYLQEIFSNEMAKVDDSFFHRLEESFLVEEDKKHERHPIFGNIVDEVAYHEKYPTIYHLRKKLVDSTDKADLRLIYLALAHMIKFRGHFLIEGDLNPDNSDVDKLFIQLVQTYNQLFEENPINASGVDAKAILSARLSKSRRLENLIAQLPGEKKNGLFGNLIALSLGLTPNFKSNFDLAEDAKLQLSKDTYDDDLDNLLAQIGDQYADLFLAAKNLSDAILLSDILRVNTEITKAPLSASMIKRYDEHHQDLTLLKALVRQQLPEKYKEIFFDQSKNGYAGYIDGGASQEEFYKFIKPILEKMDGTEELLVKLNREDLLRKQRTFDNGSIPHQIHLGELHAILRRQEDFYPFLKDNREKIEKILTFRIPYYVGPLARGNSRFAWMTRKSEETITPWNFEEVVDKGASAQSFIERMTNFDKNLPNEKVLPKHSLLYEYFTVYNELTKVKYVTEGMRKPAFLSGEQKKAIVDLLFKTNRKVTVKQLKEDYFKKIECFDSVEISGVEDRFNASLGTYHDLLKIIKDKDFLDNEENEDILEDIVLTLTLFEDREMIEERLKTYAHLFDDKVMKQLKRRRYTGWGRLSRKLINGIRDKQSGKTILDFLKSDGFANRNFMQLIHDDSLTFKEDIQKAQVSGQGDSLHEHIANLAGSPAIKKGILQTVKVVDELVKVMGRHKPENIVIEMARENQTTQKGQKNSRERMKRIEEGIKELGSQILKEHPVENTQLQNEKLYLYYLQNGRDMYVDQELDINRLSDYDVDHIVPQSFLKDDSIDNKVLTRSDKARGKSDNVPSEEVVKKMKNYWRQLLNAKLITQRKFDNLTKAERGGLSELDKAGFIKRQLVETRQITKHVAQILDSRMNTKYDENDKLIREVKVITLKSKLVSDFRKDFQFYKVREINNYHHAHDAYLNAVVGTALIKKYPKLESEFVYGDYKVYDVRKMIAKSEQEIGKATAKYFFYSNIMNFFKTEITLANGEIRKRPLIETNGETGEIVWDKGRDFATVRKVLSMPQVNIVKKTEVQTGGFSKESILPKRNSDKLIARKKDWDPKKYGGFDSPTVAYSVLVVAKVEKGKSKKLKSVKELLGITIMERSSFEKNPIDFLEAKGYKEVKKDLIIKLPKYSLFELENGRKRMLASAGELQKGNELALPSKYVNFLYLASHYEKLKGSPEDNEQKQLFVEQHKHYLDEIIEQISEFSKRVILADANLDKVLSAYNKHRDKPIREQAENIIHLFTLTNLGAPAAFKYFDTTIDRKRYTSTKEVLDATLIHQSITGLYETRIDLSQLGGDGGGSSEAAAKGGTLNIEDEHRLHETSKEPDVSLGSTWLSDFPQAWAETGGMGLAVRQAPLIIPLKATSTPVSIKQYPMSQEARLGIKPHIQRLLDQGILVPCQSPWNTPLLPVKKPGTNDYRPVQDLREVNKRVEDIHPTVPNPYNLLSGLPPSHQWYTVLDLKDAFFCLRLHPTSQPLFAFEWRDPEMGISGQLTWTRLPQGFKNSPTLFNEALHRDLADFRIQHPDLILLQYVDDLLLAATSELDCQQGTRALLQTLGNLGYRASAKKAQICQKQVKYLGYLLKEGQRWLTEARKETVMGQPTPKTPRQLREFLGTAGFCRLWIPGFAEMAAPLYPLTKPGTLFNWGPDQQKAYQEIKQALLTAPALGLPDLTKPFELFVDEKQGYAKGVLTQKLGPWRRPVAYLSKKLDPVAAGWPPCLRMVAAIAVLTKDAGKLTMGQPLVILAPHAVEALVKQPPDRWLSNARMTHYQALLLDTDRVQFGPVVALNPATLLPLPEEGLQHNCLDILAEAHGTRPDLTDQPLPDADHTWYTDGSSLLQEGQRKAGAAVTTETEVIWAKALPAGTSAQRAELIALTQALKMAEGKKLNVYTDSRYAFATAHIHGEIYRRRGWLTSEGKEIKNKDEILALLKALFLPKRLSIIHCPGHQKGHSAEARGNRMADQAARKAAITETPDTSTLLAGKRTADGSEFEKRTADGSEFESPKKKAKVE

SEQ ID NO: 2719 - protein, 2096 aa, synthetic construct
MPAAKRVKLDGGDKKYSIGLDIGTNSVGWAVITDEYKVPSKKFKVLGNTDRHSIKKNLIGALLFDSGETAEATRLKRTARRRYTRRKNRICYLQEIFSNEMAKVDDSFFHRLEESFLVEEDKKHERHPIFGNIVDEVAYHEKYPTIYHLRKKLVDSTDKADLRLIYLALAHMIKFRGHFLIEGDLNPDNSDVDKLFIQLVQTYNQLFEENPINASGVDAKAILSARLSKSRRLENLIAQLPGEKKNGLFGNLIALSLGLTPNFKSNFDLAEDAKLQLSKDTYDDDLDNLLAQIGDQYADLFLAAKNLSDAILLSDILRVNTEITKAPLSASMIKRYDEHHQDLTLLKALVRQQLPEKYKEIFFDQSKNGYAGYIDGGASQEEFYKFIKPILEKMDGTEELLVKLNREDLLRKQRTFDNGSIPHQIHLGELHAILRRQEDFYPFLKDNREKIEKILTFRIPYYVGPLARGNSRFAWMTRKSEETITPWNFEEVVDKGASAQSFIERMTNFDKNLPNEKVLPKHSLLYEYFTVYNELTKVKYVTEGMRKPAFLSGEQKKAIVDLLFKTNRKVTVKQLKEDYFKKIECFDSVEISGVEDRFNASLGTYHDLLKIIKDKDFLDNEENEDILEDIVLTLTLFEDREMIEERLKTYAHLFDDKVMKQLKRRRYTGWGRLSRKLINGIRDKQSGKTILDFLKSDGFANRNFMQLIHDDSLTFKEDIQKAQVSGQGDSLHEHIANLAGSPAIKKGILQTVKVVDELVKVMGRHKPENIVIEMARENQTTQKGQKNSRERMKRIEEGIKELGSQILKEHPVENTQLQNEKLYLYYLQNGRDMYVDQELDINRLSDYDVDHIVPQSFLKDDSIDNKVLTRSDKARGKSDNVPSEEVVKKMKNYWRQLLNAKLITQRKFDNLTKAERGGLSELDKAGFIKRQLVETRQITKHVAQILDSRMNTKYDENDKLIREVKVITLKSKLVSDFRKDFQFYKVREINNYHHAHDAYLNAVVGTALIKKYPKLESEFVYGDYKVYDVRKMIAKSEQEIGKATAKYFFYSNIMNFFKTEITLANGEIRKRPLIETNGETGEIVWDKGRDFATVRKVLSMPQVNIVKKTEVQTGGFSKESILPKRNSDKLIARKKDWDPKKYGGFDSPTVAYSVLVVAKVEKGKSKKLKSVKELLGITIMERSSFEKNPIDFLEAKGYKEVKKDLIIKLPKYSLFELENGRKRMLASAGELQKGNELALPSKYVNFLYLASHYEKLKGSPEDNEQKQLFVEQHKHYLDEIIEQISEFSKRVILADANLDKVLSAYNKHRDKPIREQAENIIHLFTLTNLGAPAAFKYFDTTIDRKRYTSTKEVLDATLIHQSITGLYETRIDLSQLGGDGGGGGEAAAKPAPGGTLNIEDEHRLHETSKEPDVSLGSTWLSDFPQAWAETGGMGLAVRQAPLIIPLKATSTPVSIKQYPMSQEARLGIKPHIQRLLDQGILVPCQSPWNTPLLPVKKPGTNDYRPVQDLREVNKRVEDIHPTVPNPYNLLSGLPPSHQWYTVLDLKDAFFCLRLHPTSQPLFAFEWRDPEMGISGQLTWTRLPQGFKNSPTLFNEALHRDLADFRIQHPDLILLQYVDDLLLAATSELDCQQGTRALLQTLGNLGYRASAKKAQICQKQVKYLGYLLKEGQRWLTEARKETVMGQPTPKTPRQLREFLGTAGFCRLWIPGFAEMAAPLYPLTKPGTLFNWGPDQQKAYQEIKQALLTAPALGLPDLTKPFELFVDEKQGYAKGVLTQKLGPWRRPVAYLSKKLDPVAAGWPPCLRMVAAIAVLTKDAGKLTMGQPLVILAPHAVEALVKQPPDRWLSNARMTHYQALLLDTDRVQFGPVVALNPATLLPLPEEGLQHNCLDILAEAHGTRPDLTDQPLPDADHTWYTDGSSLLQEGQRKAGAAVTTETEVIWAKALPAGTSAQRAELIALTQALKMAEGKKLNVYTDSRYAFATAHIHGEIYRRRGWLTSEGKEIKNKDEILALLKALFLPKRLSIIHCPGHQKGHSAEARGNRMADQAARKAAITETPDTSTLLAGKRTADGSEFEKRTADGSEFESPKKKAKVE

SEQ ID NO: 2720 - protein, 2105 aa, synthetic construct
MPAAKRVKLDGGDKKYSIGLDIGTNSVGWAVITDEYKVPSKKFKVLGNTDRHSIKKNLIGALLFDSGETAEATRLKRTARRRYTRRKNRICYLQEIFSNEMAKVDDSFFHRLEESFLVEEDKKHERHPIFGNIVDEVAYHEKYPTIYHLRKKLVDSTDKADLRLIYLALAHMIKFRGHFLIEGDLNPDNSDVDKLFIQLVQTYNQLFEENPINASGVDAKAILSARLSKSRRLENLIAQLPGEKKNGLFGNLIALSLGLTPNFKSNFDLAEDAKLQLSKDTYDDDLDNLLAQIGDQYADLFLAAKNLSDAILLSDILRVNTEITKAPLSASMIKRYDEHHQDLTLLKALVRQQLPEKYKEIFFDQSKNGYAGYIDGGASQEEFYKFIKPILEKMDGTEELLVKLNREDLLRKQRTFDNGSIPHQIHLGELHAILRRQEDFYPFLKDNREKIEKILTFRIPYYVGPLARGNSRFAWMTRKSEETITPWNFEEVVDKGASAQSFIERMTNFDKNLPNEKVLPKHSLLYEYFTVYNELTKVKYVTEGMRKPAFLSGEQKKAIVDLLFKTNRKVTVKQLKEDYFKKIECFDSVEISGVEDRFNASLGTYHDLLKIIKDKDFLDNEENEDILEDIVLTLTLFEDREMIEERLKTYAHLFDDKVMKQLKRRRYTGWGRLSRKLINGIRDKQSGKTILDFLKSDGFANRNFMQLIHDDSLTFKEDIQKAQVSGQGDSLHEHIANLAGSPAIKKGILQTVKVVDELVKVMGRHKPENIVIEMARENQTTQKGQKNSRERMKRIEEGIKELGSQILKEHPVENTQLQNEKLYLYYLQNGRDMYVDQELDINRLSDYDVDHIVPQSFLKDDSIDNKVLTRSDKARGKSDNVPSEEVVKKMKNYWRQLLNAKLITQRKFDNLTKAERGGLSELDKAGFIKRQLVETRQITKHVAQILDSRMNTKYDENDKLIREVKVITLKSKLVSDFRKDFQFYKVREINNYHHAHDAYLNAVVGTALIKKYPKLESEFVYGDYKVYDVRKMIAKSEQEIGKATAKYFFYSNIMNFFKTEITLANGEIRKRPLIETNGETGEIVWDKGRDFATVRKVLSMPQVNIVKKTEVQTGGFSKESILPKRNSDKLIARKKDWDPKKYGGFDSPTVAYSVLVVAKVEKGKSKKLKSVKELLGITIMERSSFEKNPIDFLEAKGYKEVKKDLIIKLPKYSLFELENGRKRMLASAGELQKGNELALPSKYVNFLYLASHYEKLKGSPEDNEQKQLFVEQHKHYLDEIIEQISEFSKRVILADANLDKVLSAYNKHRDKPIREQAENIIHLFTLTNLGAPAAFKYFDTTIDRKRYTSTKEVLDATLIHQSITGLYETRIDLSQLGGDGGEAAAKEAAAKEAAAKEAAAKGGTLNIEDEHRLHETSKEPDVSLGSTWLSDFPQAWAETGGMGLAVRQAPLIIPLKATSTPVSIKQYPMSQEARLGIKPHIQRLLDQGILVPCQSPWNTPLLPVKKPGTNDYRPVQDLREVNKRVEDIHPTVPNPYNLLSGLPPSHQWYTVLDLKDAFFCLRLHPTSQPLFAFEWRDPEMGISGQLTWTRLPQGFKNSPTLFNEALHRDLADFRIQHPDLILLQYVDDLLLAATSELDCQQGTRALLQTLGNLGYRASAKKAQICQKQVKYLGYLLKEGQRWLTEARKETVMGQPTPKTPRQLREFLGTAGFCRLWIPGFAEMAAPLYPLTKPGTLFNWGPDQQKAYQEIKQALLTAPALGLPDLTKPFELFVDEKQGYAKGVLTQKLGPWRRPVAYLSKKLDPVAAGWPPCLRMVAAIAVLTKDAGKLTMGQPLVILAPHAVEALVKQPPDRWLSNARMTHYQALLLDTDRVQFGPVVALNPATLLPLPEEGLQHNCLDILAEAHGTRPDLTDQPLPDADHTWYTDGSSLLQEGQRKAGAAVTTETEVIWAKALPAGTSAQRAELIALTQALKMAEGKKLNVYTDSRYAFATAHIHGEIYRRRGWLTSEGKEIKNKDEILALLKALFLPKRLSIIHCPGHQKGHSAEARGNRMADQAARKAAITETPDTSTLLAGKRTADGSEFEKRTADGSEFESPKKKAKVE

SEQ ID NO: 2721 - protein, 2096 aa, synthetic construct
MPAAKRVKLDGGDKKYSIGLDIGTNSVGWAVITDEYKVPSKKFKVLGNTDRHSIKKNLIGALLFDSGETAEATRLKRTARRRYTRRKNRICYLQEIFSNEMAKVDDSFFHRLEESFLVEEDKKHERHPIFGNIVDEVAYHEKYPTIYHLRKKLVDSTDKADLRLIYLALAHMIKFRGHFLIEGDLNPDNSDVDKLFIQLVQTYNQLFEENPINASGVDAKAILSARLSKSRRLENLIAQLPGEKKNGLFGNLIALSLGLTPNFKSNFDLAEDAKLQLSKDTYDDDLDNLLAQIGDQYADLFLAAKNLSDAILLSDILRVNTEITKAPLSASMIKRYDEHHQDLTLLKALVRQQLPEKYKEIFFDQSKNGYAGYIDGGASQEEFYKFIKPILEKMDGTEELLVKLNREDLLRKQRTFDNGSIPHQIHLGELHAILRRQEDFYPFLKDNREKIEKILTFRIPYYVGPLARGNSRFAWMTRKSEETITPWNFEEVVDKGASAQSFIERMTNFDKNLPNEKVLPKHSLLYEYFTVYNELTKVKYVTEGMRKPAFLSGEQKKAIVDLLFKTNRKVTVKQLKEDYFKKIECFDSVEISGVEDRFNASLGTYHDLLKIIKDKDFLDNEENEDILEDIVLTLTLFEDREMIEERLKTYAHLFDDKVMKQLKRRRYTGWGRLSRKLINGIRDKQSGKTILDFLKSDGFANRNFMQLIHDDSLTFKEDIQKAQVSGQGDSLHEHIANLAGSPAIKKGILQTVKVVDELVKVMGRHKPENIVIEMARENQTTQKGQKNSRERMKRIEEGIKELGSQILKEHPVENTQLQNEKLYLYYLQNGRDMYVDQELDINRLSDYDVDHIVPQSFLKDDSIDNKVLTRSDKARGKSDNVPSEEVVKKMKNYWRQLLNAKLITQRKFDNLTKAERGGLSELDKAGFIKRQLVETRQITKHVAQILDSRMNTKYDENDKLIREVKVITLKSKLVSDFRKDFQFYKVREINNYHHAHDAYLNAVVGTALIKKYPKLESEFVYGDYKVYDVRKMIAKSEQEIGKATAKYFFYSNIMNFFKTEITLANGEIRKRPLIETNGETGEIVWDKGRDFATVRKVLSMPQVNIVKKTEVQTGGFSKESILPKRNSDKLIARKKDWDPKKYGGFDSPTVAYSVLVVAKVEKGKSKKLKSVKELLGITIMERSSFEKNPIDFLEAKGYKEVKKDLIIKLPKYSLFELENGRKRMLASAGELQKGNELALPSKYVNFLYLASHYEKLKGSPEDNEQKQLFVEQHKHYLDEIIEQISEFSKRVILADANLDKVLSAYNKHRDKPIREQAENIIHLFTLTNLGAPAAFKYFDTTIDRKRYTSTKEVLDATLIHQSITGLYETRIDLSQLGGDGGGGGEAAAKGGSGGTLNIEDEHRLHETSKEPDVSLGSTWLSDFPQAWAETGGMGLAVRQAPLIIPLKATSTPVSIKQYPMSQEARLGIKPHIQRLLDQGILVPCQSPWNTPLLPVKKPGTNDYRPVQDLREVNKRVEDIHPTVPNPYNLLSGLPPSHQWYTVLDLKDAFFCLRLHPTSQPLFAFEWRDPEMGISGQLTWTRLPQGFKNSPTLFNEALHRDLADFRIQHPDLILLQYVDDLLLAATSELDCQQGTRALLQTLGNLGYRASAKKAQICQKQVKYLGYLLKEGQRWLTEARKETVMGQPTPKTPRQLREFLGTAGFCRLWIPGFAEMAAPLYPLTKPGTLFNWGPDQQKAYQEIKQALLTAPALGLPDLTKPFELFVDEKQGYAKGVLTQKLGPWRRPVAYLSKKLDPVAAGWPPCLRMVAAIAVLTKDAGKLTMGQPLVILAPHAVEALVKQPPDRWLSNARMTHYQALLLDTDRVQFGPVVALNPATLLPLPEEGLQHNCLDILAEAHGTRPDLTDQPLPDADHTWYTDGSSLLQEGQRKAGAAVTTETEVIWAKALPAGTSAQRAELIALTQALKMAEGKKLNVYTDSRYAFATAHIHGEIYRRRGWLTSEGKEIKNKDEILALLKALFLPKRLSIIHCPGHQKGHSAEARGNRMADQAARKAAITETPDTSTLLAGKRTADGSEFEKRTADGSEFESPKKKAKVE

SEQ ID NO: 2722 - protein, 2096 aa, synthetic construct
MPAAKRVKLDGGDKKYSIGLDIGTNSVGWAVITDEYKVPSKKFKVLGNTDRHSIKKNLIGALLFDSGETAEATRLKRTARRRYTRRKNRICYLQEIFSNEMAKVDDSFFHRLEESFLVEEDKKHERHPIFGNIVDEVAYHEKYPTIYHLRKKLVDSTDKADLRLIYLALAHMIKFRGHFLIEGDLNPDNSDVDKLFIQLVQTYNQLFEENPINASGVDAKAILSARLSKSRRLENLIAQLPGEKKNGLFGNLIALSLGLTPNFKSNFDLAEDAKLQLSKDTYDDDLDNLLAQIGDQYADLFLAAKNLSDAILLSDILRVNTEITKAPLSASMIKRYDEHHQDLTLLKALVRQQLPEKYKEIFFDQSKNGYAGYIDGGASQEEFYKFIKPILEKMDGTEELLVKLNREDLLRKQRTFDNGSIPHQIHLGELHAILRRQEDFYPFLKDNREKIEKILTFRIPYYVGPLARGNSRFAWMTRKSEETITPWNFEEVVDKGASAQSFIERMTNFDKNLPNEKVLPKHSLLYEYFTVYNELTKVKYVTEGMRKPAFLSGEQKKAIVDLLFKTNRKVTVKQLKEDYFKKIECFDSVEISGVEDRFNASLGTYHDLLKIIKDKDFLDNEENEDILEDIVLTLTLFEDREMIEERLKTYAHLFDDKVMKQLKRRRYTGWGRLSRKLINGIRDKQSGKTILDFLKSDGFANRNFMQLIHDDSLTFKEDIQKAQVSGQGDSLHEHIANLAGSPAIKKGILQTVKVVDELVKVMGRHKPENIVIEMARENQTTQKGQKNSRERMKRIEEGIKELGSQILKEHPVENTQLQNEKLYLYYLQNGRDMYVDQELDINRLSDYDVDHIVPQSFLKDDSIDNKVLTRSDKARGKSDNVPSEEVVKKMKNYWRQLLNAKLITQRKFDNLTKAERGGLSELDKAGFIKRQLVETRQITKHVAQILDSRMNTKYDENDKLIREVKVITLKSKLVSDFRKDFQFYKVREINNYHHAHDAYLNAVVGTALIKKYPKLESEFVYGDYKVYDVRKMIAKSEQEIGKATAKYFFYSNIMNFFKTEITLANGEIRKRPLIETNGETGEIVWDKGRDFATVRKVLSMPQVNIVKKTEVQTGGFSKESILPKRNSDKLIARKKDWDPKKYGGFDSPTVAYSVLVVAKVEKGKSKKLKSVKELLGITIMERSSFEKNPIDFLEAKGYKEVKKDLIIKLPKYSLFELENGRKRMLASAGELQKGNELALPSKYVNFLYLASHYEKLKGSPEDNEQKQLFVEQHKHYLDEIIEQISEFSKRVILADANLDKVLSAYNKHRDKPIREQAENIIHLFTLTNLGAPAAFKYFDTTIDRKRYTSTKEVLDATLIHQSITGLYETRIDLSQLGGDGGGGGGGSEAAAKGGTLNIEDEHRLHETSKEPDVSLGSTWLSDFPQAWAETGGMGLAVRQAPLIIPLKATSTPVSIKQYPMSQEARLGIKPHIQRLLDQGILVPCQSPWNTPLLPVKKPGTNDYRPVQDLREVNKRVEDIHPTVPNPYNLLSGLPPSHQWYTVLDLKDAFFCLRLHPTSQPLFAFEWRDPEMGISGQLTWTRLPQGFKNSPTLFNEALHRDLADFRIQHPDLILLQYVDDLLLAATSELDCQQGTRALLQTLGNLGYRASAKKAQICQKQVKYLGYLLKEGQRWLTEARKETVMGQPTPKTPRQLREFLGTAGFCRLWIPGFAEMAAPLYPLTKPGTLFNWGPDQQKAYQEIKQALLTAPALGLPDLTKPFELFVDEKQGYAKGVLTQKLGPWRRPVAYLSKKLDPVAAGWPPCLRMVAAIAVLTKDAGKLTMGQPLVILAPHAVEALVKQPPDRWLSNARMTHYQALLLDTDRVQFGPVVALNPATLLPLPEEGLQHNCLDILAEAHGTRPDLTDQPLPDADHTWYTDGSSLLQEGQRKAGAAVTTETEVIWAKALPAGTSAQRAELIALTQALKMAEGKKLNVYTDSRYAFATAHIHGEIYRRRGWLTSEGKEIKNKDEILALLKALFLPKRLSIIHCPGHQKGHSAEARGNRMADQAARKAAITETPDTSTLLAGKRTADGSEFEKRTADGSEFESPKKKAKVE

SEQ ID NO: 2723 - protein, 2096 aa, synthetic construct
MPAAKRVKLDGGDKKYSIGLDIGTNSVGWAVITDEYKVPSKKFKVLGNTDRHSIKKNLIGALLFDSGETAEATRLKRTARRRYTRRKNRICYLQEIFSNEMAKVDDSFFHRLEESFLVEEDKKHERHPIFGNIVDEVAYHEKYPTIYHLRKKLVDSTDKADLRLIYLALAHMIKFRGHFLIEGDLNPDNSDVDKLFIQLVQTYNQLFEENPINASGVDAKAILSARLSKSRRLENLIAQLPGEKKNGLFGNLIALSLGLTPNFKSNFDLAEDAKLQLSKDTYDDDLDNLLAQIGDQYADLFLAAKNLSDAILLSDILRVNTEITKAPLSASMIKRYDEHHQDLTLLKALVRQQLPEKYKEIFFDQSKNGYAGYIDGGASQEEFYKFIKPILEKMDGTEELLVKLNREDLLRKQRTFDNGSIPHQIHLGELHAILRRQEDFYPFLKDNREKIEKILTFRIPYYVGPLARGNSRFAWMTRKSEETITPWNFEEVVDKGASAQSFIERMTNFDKNLPNEKVLPKHSLLYEYFTVYNELTKVKYVTEGMRKPAFLSGEQKKAIVDLLFKTNRKVTVKQLKEDYFKKIECFDSVEISGVEDRFNASLGTYHDLLKIIKDKDFLDNEENEDILEDIVLTLTLFEDREMIEERLKTYAHLFDDKVMKQLKRRRYTGWGRLSRKLINGIRDKQSGKTILDFLKSDGFANRNFMQLIHDDSLTFKEDIQKAQVSGQGDSLHEHIANLAGSPAIKKGILQTVKVVDELVKVMGRHKPENIVIEMARENQTTQKGQKNSRERMKRIEEGIKELGSQILKEHPVENTQLQNEKLYLYYLQNGRDMYVDQELDINRLSDYDVDHIVPQSFLKDDSIDNKVLTRSDKARGKSDNVPSEEVVKKMKNYWRQLLNAKLITQRKFDNLTKAERGGLSELDKAGFIKRQLVETRQITKHVAQILDSRMNTKYDENDKLIREVKVITLKSKLVSDFRKDFQFYKVREINNYHHAHDAYLNAVVGTALIKKYPKLESEFVYGDYKVYDVRKMIAKSEQEIGKATAKYFFYSNIMNFFKTEITLANGEIRKRPLIETNGETGEIVWDKGRDFATVRKVLSMPQVNIVKKTEVQTGGFSKESILPKRNSDKLIARKKDWDPKKYGGFDSPTVAYSVLVVAKVEKGKSKKLKSVKELLGITIMERSSFEKNPIDFLEAKGYKEVKKDLIIKLPKYSLFELENGRKRMLASAGELQKGNELALPSKYVNFLYLASHYEKLKGSPEDNEQKQLFVEQHKHYLDEIIEQISEFSKRVILADANLDKVLSAYNKHRDKPIREQAENIIHLFTLTNLGAPAAFKYFDTTIDRKRYTSTKEVLDATLIHQSITGLYETRIDLSQLGGDGGEAAAKGSSPAPGGTLNIEDEHRLHETSKEPDVSLGSTWLSDFPQAWAETGGMGLAVRQAPLIIPLKATSTPVSIKQYPMSQEARLGIKPHIQRLLDQGILVPCQSPWNTPLLPVKKPGTNDYRPVQDLREVNKRVEDIHPTVPNPYNLLSGLPPSHQWYTVLDLKDAFFCLRLHPTSQPLFAFEWRDPEMGISGQLTWTRLPQGFKNSPTLFNEALHRDLADFRIQHPDLILLQYVDDLLLAATSELDCQQGTRALLQTLGNLGYRASAKKAQICQKQVKYLGYLLKEGQRWLTEARKETVMGQPTPKTPRQLREFLGTAGFCRLWIPGFAEMAAPLYPLTKPGTLFNWGPDQQKAYQEIKQALLTAPALGLPDLTKPFELFVDEKQGYAKGVLTQKLGPWRRPVAYLSKKLDPVAAGWPPCLRMVAAIAVLTKDAGKLTMGQPLVILAPHAVEALVKQPPDRWLSNARMTHYQALLLDTDRVQFGPVVALNPATLLPLPEEGLQHNCLDILAEAHGTRPDLTDQPLPDADHTWYTDGSSLLQEGQRKAGAAVTTETEVIWAKALPAGTSAQRAELIALTQALKMAEGKKLNVYTDSRYAFATAHIHGEIYRRRGWLTSEGKEIKNKDEILALLKALFLPKRLSIIHCPGHQKGHSAEARGNRMADQAARKAAITETPDTSTLLAGKRTADGSEFEKRTADGSEFESPKKKAKVE

SEQ ID NO: 2724 - protein, 2093 aa, synthetic construct
MPAAKRVKLDGGDKKYSIGLDIGTNSVGWAVITDEYKVPSKKFKVLGNTDRHSIKKNLIGALLFDSGETAEATRLKRTARRRYTRRKNRICYLQEIFSNEMAKVDDSFFHRLEESFLVEEDKKHERHPIFGNIVDEVAYHEKYPTIYHLRKKLVDSTDKADLRLIYLALAHMIKFRGHFLIEGDLNPDNSDVDKLFIQLVQTYNQLFEENPINASGVDAKAILSARLSKSRRLENLIAQLPGEKKNGLFGNLIALSLGLTPNFKSNFDLAEDAKLQLSKDTYDDDLDNLLAQIGDQYADLFLAAKNLSDAILLSDILRVNTEITKAPLSASMIKRYDEHHQDLTLLKALVRQQLPEKYKEIFFDQSKNGYAGYIDGGASQEEFYKFIKPILEKMDGTEELLVKLNREDLLRKQRTFDNGSIPHQIHLGELHAILRRQEDFYPFLKDNREKIEKILTFRIPYYVGPLARGNSRFAWMTRKSEETITPWNFEEVVDKGASAQSFIERMTNFDKNLPNEKVLPKHSLLYEYFTVYNELTKVKYVTEGMRKPAFLSGEQKKAIVDLLFKTNRKVTVKQLKEDYFKKIECFDSVEISGVEDRFNASLGTYHDLLKIIKDKDFLDNEENEDILEDIVLTLTLFEDREMIEERLKTYAHLFDDKVMKQLKRRRYTGWGRLSRKLINGIRDKQSGKTILDFLKSDGFANRNFMQLIHDDSLTFKEDIQKAQVSGQGDSLHEHIANLAGSPAIKKGILQTVKVVDELVKVMGRHKPENIVIEMARENQTTQKGQKNSRERMKRIEEGIKELGSQILKEHPVENTQLQNEKLYLYYLQNGRDMYVDQELDINRLSDYDVDHIVPQSFLKDDSIDNKVLTRSDKARGKSDNVPSEEVVKKMKNYWRQLLNAKLITQRKFDNLTKAERGGLSELDKAGFIKRQLVETRQITKHVAQILDSRMNTKYDENDKLIREVKVITLKSKLVSDFRKDFQFYKVREINNYHHAHDAYLNAVVGTALIKKYPKLESEFVYGDYKVYDVRKMIAKSEQEIGKATAKYFFYSNIMNFFKTEITLANGEIRKRPLIETNGETGEIVWDKGRDFATVRKVLSMPQVNIVKKTEVQTGGFSKESILPKRNSDKLIARKKDWDPKKYGGFDSPTVAYSVLVVAKVEKGKSKKLKSVKELLGITIMERSSFEKNPIDFLEAKGYKEVKKDLIIKLPKYSLFELENGRKRMLASAGELQKGNELALPSKYVNFLYLASHYEKLKGSPEDNEQKQLFVEQHKHYLDEIIEQISEFSKRVILADANLDKVLSAYNKHRDKPIREQAENIIHLFTLTNLGAPAAFKYFDTTIDRKRYTSTKEVLDATLIHQSITGLYETRIDLSQLGGDGGEAAAKPAPGGTLNIEDEHRLHETSKEPDVSLGSTWLSDFPQAWAETGGMGLAVRQAPLIIPLKATSTPVSIKQYPMSQEARLGIKPHIQRLLDQGILVPCQSPWNTPLLPVKKPGTNDYRPVQDLREVNKRVEDIHPTVPNPYNLLSGLPPSHQWYTVLDLKDAFFCLRLHPTSQPLFAFEWRDPEMGISGQLTWTRLPQGFKNSPTLFNEALHRDLADFRIQHPDLILLQYVDDLLLAATSELDCQQGTRALLQTLGNLGYRASAKKAQICQKQVKYLGYLLKEGQRWLTEARKETVMGQPTPKTPRQLREFLGTAGFCRLWIPGFAEMAAPLYPLTKPGTLFNWGPDQQKAYQEIKQALLTAPALGLPDLTKPFELFVDEKQGYAKGVLTQKLGPWRRPVAYLSKKLDPVAAGWPPCLRMVAAIAVLTKDAGKLTMGQPLVILAPHAVEALVKQPPDRWLSNARMTHYQALLLDTDRVQFGPVVALNPATLLPLPEEGLQHNCLDILAEAHGTRPDLTDQPLPDADHTWYTDGSSLLQEGQRKAGAAVTTETEVIWAKALPAGTSAQRAELIALTQALKMAEGKKLNVYTDSRYAFATAHIHGEIYRRRGWLTSEGKEIKNKDEILALLKALFLPKRLSIIHCPGHQKGHSAEARGNRMADQAARKAAITETPDTSTLLAGKRTADGSEFEKRTADGSEFESPKKKAKVE

SEQ ID NO: 2725 - protein, 2100 aa, synthetic construct
MPAAKRVKLDGGDKKYSIGLDIGTNSVGWAVITDEYKVPSKKFKVLGNTDRHSIKKNLIGALLFDSGETAEATRLKRTARRRYTRRKNRICYLQEIFSNEMAKVDDSFFHRLEESFLVEEDKKHERHPIFGNIVDEVAYHEKYPTIYHLRKKLVDSTDKADLRLIYLALAHMIKFRGHFLIEGDLNPDNSDVDKLFIQLVQTYNQLFEENPINASGVDAKAILSARLSKSRRLENLIAQLPGEKKNGLFGNLIALSLGLTPNFKSNFDLAEDAKLQLSKDTYDDDLDNLLAQIGDQYADLFLAAKNLSDAILLSDILRVNTEITKAPLSASMIKRYDEHHQDLTLLKALVRQQLPEKYKEIFFDQSKNGYAGYIDGGASQEEFYKFIKPILEKMDGTEELLVKLNREDLLRKQRTFDNGSIPHQIHLGELHAILRRQEDFYPFLKDNREKIEKILTFRIPYYVGPLARGNSRFAWMTRKSEETITPWNFEEVVDKGASAQSFIERMTNFDKNLPNEKVLPKHSLLYEYFTVYNELTKVKYVTEGMRKPAFLSGEQKKAIVDLLFKTNRKVTVKQLKEDYFKKIECFDSVEISGVEDRFNASLGTYHDLLKIIKDKDFLDNEENEDILEDIVLTLTLFEDREMIEERLKTYAHLFDDKVMKQLKRRRYTGWGRLSRKLINGIRDKQSGKTILDFLKSDGFANRNFMQLIHDDSLTFKEDIQKAQVSGQGDSLHEHIANLAGSPAIKKGILQTVKVVDELVKVMGRHKPENIVIEMARENQTTQKGQKNSRERMKRIEEGIKELGSQILKEHPVENTQLQNEKLYLYYLQNGRDMYVDQELDINRLSDYDVDHIVPQSFLKDDSIDNKVLTRSDKARGKSDNVPSEEVVKKMKNYWRQLLNAKLITQRKFDNLTKAERGGLSELDKAGFIKRQLVETRQITKHVAQILDSRMNTKYDENDKLIREVKVITLKSKLVSDFRKDFQFYKVREINNYHHAHDAYLNAVVGTALIKKYPKLESEFVYGDYKVYDVRKMIAKSEQEIGKATAKYFFYSNIMNFFKTEITLANGEIRKRPLIETNGETGEIVWDKGRDFATVRKVLSMPQVNIVKKTEVQTGGFSKESILPKRNSDKLIARKKDWDPKKYGGFDSPTVAYSVLVVAKVEKGKSKKLKSVKELLGITIMERSSFEKNPIDFLEAKGYKEVKKDLIIKLPKYSLFELENGRKRMLASAGELQKGNELALPSKYVNFLYLASHYEKLKGSPEDNEQKQLFVEQHKHYLDEIIEQISEFSKRVILADANLDKVLSAYNKHRDKPIREQAENIIHLFTLTNLGAPAAFKYFDTTIDRKRYTSTKEVLDATLIHQSITGLYETRIDLSQLGGDGGGGGGSEAAAKGGGGSGGTLNIEDEHRLHETSKEPDVSLGSTWLSDFPQAWAETGGMGLAVRQAPLIIPLKATSTPVSIKQYPMSQEARLGIKPHIQRLLDQGILVPCQSPWNTPLLPVKKPGTNDYRPVQDLREVNKRVEDIHPTVPNPYNLLSGLPPSHQWYTVLDLKDAFFCLRLHPTSQPLFAFEWRDPEMGISGQLTWTRLPQGFKNSPTLFNEALHRDLADFRIQHPDLILLQYVDDLLLAATSELDCQQGTRALLQTLGNLGYRASAKKAQICQKQVKYLGYLLKEGQRWLTEARKETVMGQPTPKTPRQLREFLGTAGFCRLWIPGFAEMAAPLYPLTKPGTLFNWGPDQQKAYQEIKQALLTAPALGLPDLTKPFELFVDEKQGYAKGVLTQKLGPWRRPVAYLSKKLDPVAAGWPPCLRMVAAIAVLTKDAGKLTMGQPLVILAPHAVEALVKQPPDRWLSNARMTHYQALLLDTDRVQFGPVVALNPATLLPLPEEGLQHNCLDILAEAHGTRPDLTDQPLPDADHTWYTDGSSLLQEGQRKAGAAVTTETEVIWAKALPAGTSAQRAELIALTQALKMAEGKKLNVYTDSRYAFATAHIHGEIYRRRGWLTSEGKEIKNKDEILALLKALFLPKRLSIIHCPGHQKGHSAEARGNRMADQAARKAAITETPDTSTLLAGKRTADGSEFEKRTADGSEFESPKKKAKVE

SEQ ID NO: 2726 - protein, 2093 aa, synthetic construct
MPAAKRVKLDGGDKKYSIGLDIGTNSVGWAVITDEYKVPSKKFKVLGNTDRHSIKKNLIGALLFDSGETAEATRLKRTARRRYTRRKNRICYLQEIFSNEMAKVDDSFFHRLEESFLVEEDKKHERHPIFGNIVDEVAYHEKYPTIYHLRKKLVDSTDKADLRLIYLALAHMIKFRGHFLIEGDLNPDNSDVDKLFIQLVQTYNQLFEENPINASGVDAKAILSARLSKSRRLENLIAQLPGEKKNGLFGNLIALSLGLTPNFKSNFDLAEDAKLQLSKDTYDDDLDNLLAQIGDQYADLFLAAKNLSDAILLSDILRVNTEITKAPLSASMIKRYDEHHQDLTLLKALVRQQLPEKYKEIFFDQSKNGYAGYIDGGASQEEFYKFIKPILEKMDGTEELLVKLNREDLLRKQRTFDNGSIPHQIHLGELHAILRRQEDFYPFLKDNREKIEKILTFRIPYYVGPLARGNSRFAWMTRKSEETITPWNFEEVVDKGASAQSFIERMTNFDKNLPNEKVLPKHSLLYEYFTVYNELTKVKYVTEGMRKPAFLSGEQKKAIVDLLFKTNRKVTVKQLKEDYFKKIECFDSVEISGVEDRFNASLGTYHDLLKIIKDKDFLDNEENEDILEDIVLTLTLFEDREMIEERLKTYAHLFDDKVMKQLKRRRYTGWGRLSRKLINGIRDKQSGKTILDFLKSDGFANRNFMQLIHDDSLTFKEDIQKAQVSGQGDSLHEHIANLAGSPAIKKGILQTVKVVDELVKVMGRHKPENIVIEMARENQTTQKGQKNSRERMKRIEEGIKELGSQILKEHPVENTQLQNEKLYLYYLQNGRDMYVDQELDINRLSDYDVDHIVPQSFLKDDSIDNKVLTRSDKARGKSDNVPSEEVVKKMKNYWRQLLNAKLITQRKFDNLTKAERGGLSELDKAGFIKRQLVETRQITKHVAQILDSRMNTKYDENDKLIREVKVITLKSKLVSDFRKDFQFYKVREINNYHHAHDAYLNAVVGTALIKKYPKLESEFVYGDYKVYDVRKMIAKSEQEIGKATAKYFFYSNIMNFFKTEITLANGEIRKRPLIETNGETGEIVWDKGRDFATVRKVLSMPQVNIVKKTEVQTGGFSKESILPKRNSDKLIARKKDWDPKKYGGFDSPTVAYSVLVVAKVEKGKSKKLKSVKELLGITIMERSSFEKNPIDFLEAKGYKEVKKDLIIKLPKYSLFELENGRKRMLASAGELQKGNELALPSKYVNFLYLASHYEKLKGSPEDNEQKQLFVEQHKHYLDEIIEQISEFSKRVILADANLDKVLSAYNKHRDKPIREQAENIIHLFTLTNLGAPAAFKYFDTTIDRKRYTSTKEVLDATLIHQSITGLYETRIDLSQLGGDGGEAAAKGGSGGTLNIEDEHRLHETSKEPDVSLGSTWLSDFPQAWAETGGMGLAVRQAPLIIPLKATSTPVSIKQYPMSQEARLGIKPHIQRLLDQGILVPCQSPWNTPLLPVKKPGTNDYRPVQDLREVNKRVEDIHPTVPNPYNLLSGLPPSHQWYTVLDLKDAFFCLRLHPTSQPLFAFEWRDPEMGISGQLTWTRLPQGFKNSPTLFNEALHRDLADFRIQHPDLILLQYVDDLLLAATSELDCQQGTRALLQTLGNLGYRASAKKAQICQKQVKYLGYLLKEGQRWLTEARKETVMGQPTPKTPRQLREFLGTAGFCRLWIPGFAEMAAPLYPLTKPGTLFNWGPDQQKAYQEIKQALLTAPALGLPDLTKPFELFVDEKQGYAKGVLTQKLGPWRRPVAYLSKKLDPVAAGWPPCLRMVAAIAVLTKDAGKLTMGQPLVILAPHAVEALVKQPPDRWLSNARMTHYQALLLDTDRVQFGPVVALNPATLLPLPEEGLQHNCLDILAEAHGTRPDLTDQPLPDADHTWYTDGSSLLQEGQRKAGAAVTTETEVIWAKALPAGTSAQRAELIALTQALKMAEGKKLNVYTDSRYAFATAHIHGEIYRRRGWLTSEGKEIKNKDEILALLKALFLPKRLSIIHCPGHQKGHSAEARGNRMADQAARKAAITETPDTSTLLAGKRTADGSEFEKRTADGSEFESPKKKAKVE

SEQ ID NO: 2727 - protein, 2096 aa, synthetic construct
MPAAKRVKLDGGDKKYSIGLDIGTNSVGWAVITDEYKVPSKKFKVLGNTDRHSIKKNLIGALLFDSGETAEATRLKRTARRRYTRRKNRICYLQEIFSNEMAKVDDSFFHRLEESFLVEEDKKHERHPIFGNIVDEVAYHEKYPTIYHLRKKLVDSTDKADLRLIYLALAHMIKFRGHFLIEGDLNPDNSDVDKLFIQLVQTYNQLFEENPINASGVDAKAILSARLSKSRRLENLIAQLPGEKKNGLFGNLIALSLGLTPNFKSNFDLAEDAKLQLSKDTYDDDLDNLLAQIGDQYADLFLAAKNLSDAILLSDILRVNTEITKAPLSASMIKRYDEHHQDLTLLKALVRQQLPEKYKEIFFDQSKNGYAGYIDGGASQEEFYKFIKPILEKMDGTEELLVKLNREDLLRKQRTFDNGSIPHQIHLGELHAILRRQEDFYPFLKDNREKIEKILTFRIPYYVGPLARGNSRFAWMTRKSEETITPWNFEEVVDKGASAQSFIERMTNFDKNLPNEKVLPKHSLLYEYFTVYNELTKVKYVTEGMRKPAFLSGEQKKAIVDLLFKTNRKVTVKQLKEDYFKKIECFDSVEISGVEDRFNASLGTYHDLLKIIKDKDFLDNEENEDILEDIVLTLTLFEDREMIEERLKTYAHLFDDKVMKQLKRRRYTGWGRLSRKLINGIRDKQSGKTILDFLKSDGFANRNFMQLIHDDSLTFKEDIQKAQVSGQGDSLHEHIANLAGSPAIKKGILQTVKVVDELVKVMGRHKPENIVIEMARENQTTQKGQKNSRERMKRIEEGIKELGSQILKEHPVENTQLQNEKLYLYYLQNGRDMYVDQELDINRLSDYDVDHIVPQSFLKDDSIDNKVLTRSDKARGKSDNVPSEEVVKKMKNYWRQLLNAKLITQRKFDNLTKAERGGLSELDKAGFIKRQLVETRQITKHVAQILDSRMNTKYDENDKLIREVKVITLKSKLVSDFRKDFQFYKVREINNYHHAHDAYLNAVVGTALIKKYPKLESEFVYGDYKVYDVRKMIAKSEQEIGKATAKYFFYSNIMNFFKTEITLANGEIRKRPLIETNGETGEIVWDKGRDFATVRKVLSMPQVNIVKKTEVQTGGFSKESILPKRNSDKLIARKKDWDPKKYGGFDSPTVAYSVLVVAKVEKGKSKKLKSVKELLGITIMERSSFEKNPIDFLEAKGYKEVKKDLIIKLPKYSLFELENGRKRMLASAGELQKGNELALPSKYVNFLYLASHYEKLKGSPEDNEQKQLFVEQHKHYLDEIIEQISEFSKRVILADANLDKVLSAYNKHRDKPIREQAENIIHLFTLTNLGAPAAFKYFDTTIDRKRYTSTKEVLDATLIHQSITGLYETRIDLSQLGGDGGEAAAKGGSGSSGGTLNIEDEHRLHETSKEPDVSLGSTWLSDFPQAWAETGGMGLAVRQAPLIIPLKATSTPVSIKQYPMSQEARLGIKPHIQRLLDQGILVPCQSPWNTPLLPVKKPGTNDYRPVQDLREVNKRVEDIHPTVPNPYNLLSGLPPSHQWYTVLDLKDAFFCLRLHPTSQPLFAFEWRDPEMGISGQLTWTRLPQGFKNSPTLFNEALHRDLADFRIQHPDLILLQYVDDLLLAATSELDCQQGTRALLQTLGNLGYRASAKKAQICQKQVKYLGYLLKEGQRWLTEARKETVMGQPTPKTPRQLREFLGTAGFCRLWIPGFAEMAAPLYPLTKPGTLFNWGPDQQKAYQEIKQALLTAPALGLPDLTKPFELFVDEKQGYAKGVLTQKLGPWRRPVAYLSKKLDPVAAGWPPCLRMVAAIAVLTKDAGKLTMGQPLVILAPHAVEALVKQPPDRWLSNARMTHYQALLLDTDRVQFGPVVALNPATLLPLPEEGLQHNCLDILAEAHGTRPDLTDQPLPDADHTWYTDGSSLLQEGQRKAGAAVTTETEVIWAKALPAGTSAQRAELIALTQALKMAEGKKLNVYTDSRYAFATAHIHGEIYRRRGWLTSEGKEIKNKDEILALLKALFLPKRLSIIHCPGHQKGHSAEARGNRMADQAARKAAITETPDTSTLLAGKRTADGSEFEKRTADGSEFESPKKKAKVE

SEQ ID NO: 2728 - protein, 2097 aa, synthetic construct
MPAAKRVKLDGGDKKYSIGLDIGTNSVGWAVITDEYKVPSKKFKVLGNTDRHSIKKNLIGALLFDSGETAEATRLKRTARRRYTRRKNRICYLQEIFSNEMAKVDDSFFHRLEESFLVEEDKKHERHPIFGNIVDEVAYHEKYPTIYHLRKKLVDSTDKADLRLIYLALAHMIKFRGHFLIEGDLNPDNSDVDKLFIQLVQTYNQLFEENPINASGVDAKAILSARLSKSRRLENLIAQLPGEKKNGLFGNLIALSLGLTPNFKSNFDLAEDAKLQLSKDTYDDDLDNLLAQIGDQYADLFLAAKNLSDAILLSDILRVNTEITKAPLSASMIKRYDEHHQDLTLLKALVRQQLPEKYKEIFFDQSKNGYAGYIDGGASQEEFYKFIKPILEKMDGTEELLVKLNREDLLRKQRTFDNGSIPHQIHLGELHAILRRQEDFYPFLKDNREKIEKILTFRIPYYVGPLARGNSRFAWMTRKSEETITPWNFEEVVDKGASAQSFIERMTNFDKNLPNEKVLPKHSLLYEYFTVYNELTKVKYVTEGMRKPAFLSGEQKKAIVDLLFKTNRKVTVKQLKEDYFKKIECFDSVEISGVEDRFNASLGTYHDLLKIIKDKDFLDNEENEDILEDIVLTLTLFEDREMIEERLKTYAHLFDDKVMKQLKRRRYTGWGRLSRKLINGIRDKQSGKTILDFLKSDGFANRNFMQLIHDDSLTFKEDIQKAQVSGQGDSLHEHIANLAGSPAIKKGILQTVKVVDELVKVMGRHKPENIVIEMARENQTTQKGQKNSRERMKRIEEGIKELGSQILKEHPVENTQLQNEKLYLYYLQNGRDMYVDQELDINRLSDYDVDHIVPQSFLKDDSIDNKVLTRSDKARGKSDNVPSEEVVKKMKNYWRQLLNAKLITQRKFDNLTKAERGGLSELDKAGFIKRQLVETRQITKHVAQILDSRMNTKYDENDKLIREVKVITLKSKLVSDFRKDFQFYKVREINNYHHAHDAYLNAVVGTALIKKYPKLESEFVYGDYKVYDVRKMIAKSEQEIGKATAKYFFYSNIMNFFKTEITLANGEIRKRPLIETNGETGEIVWDKGRDFATVRKVLSMPQVNIVKKTEVQTGGFSKESILPKRNSDKLIARKKDWDPKKYGGFDSPTVAYSVLVVAKVEKGKSKKLKSVKELLGITIMERSSFEKNPIDFLEAKGYKEVKKDLIIKLPKYSLFELENGRKRMLASAGELQKGNELALPSKYVNFLYLASHYEKLKGSPEDNEQKQLFVEQHKHYLDEIIEQISEFSKRVILADANLDKVLSAYNKHRDKPIREQAENIIHLFTLTNLGAPAAFKYFDTTIDRKRYTSTKEVLDATLIHQSITGLYETRIDLSQLGGDGGGSSGSSGSSGSSGGTLNIEDEHRLHETSKEPDVSLGSTWLSDFPQAWAETGGMGLAVRQAPLIIPLKATSTPVSIKQYPMSQEARLGIKPHIQRLLDQGILVPCQSPWNTPLLPVKKPGTNDYRPVQDLREVNKRVEDIHPTVPNPYNLLSGLPPSHQWYTVLDLKDAFFCLRLHPTSQPLFAFEWRDPEMGISGQLTWTRLPQGFKNSPTLFNEALHRDLADFRIQHPDLILLQYVDDLLLAATSELDCQQGTRALLQTLGNLGYRASAKKAQICQKQVKYLGYLLKEGQRWLTEARKETVMGQPTPKTPRQLREFLGTAGFCRLWIPGFAEMAAPLYPLTKPGTLFNWGPDQQKAYQEIKQALLTAPALGLPDLTKPFELFVDEKQGYAKGVLTQKLGPWRRPVAYLSKKLDPVAAGWPPCLRMVAAIAVLTKDAGKLTMGQPLVILAPHAVEALVKQPPDRWLSNARMTHYQALLLDTDRVQFGPVVALNPATLLPLPEEGLQHNCLDILAEAHGTRPDLTDQPLPDADHTWYTDGSSLLQEGQRKAGAAVTTETEVIWAKALPAGTSAQRAELIALTQALKMAEGKKLNVYTDSRYAFATAHIHGEIYRRRGWLTSEGKEIKNKDEILALLKALFLPKRLSIIHCPGHQKGHSAEARGNRMADQAARKAAITETPDTSTLLAGKRTADGSEFEKRTADGSEFESPKKKAKVE

SEQ ID NO: 2729 - protein, 2095 aa, synthetic construct
MPAAKRVKLDGGDKKYSIGLDIGTNSVGWAVITDEYKVPSKKFKVLGNTDRHSIKKNLIGALLFDSGETAEATRLKRTARRRYTRRKNRICYLQEIFSNEMAKVDDSFFHRLEESFLVEEDKKHERHPIFGNIVDEVAYHEKYPTIYHLRKKLVDSTDKADLRLIYLALAHMIKFRGHFLIEGDLNPDNSDVDKLFIQLVQTYNQLFEENPINASGVDAKAILSARLSKSRRLENLIAQLPGEKKNGLFGNLIALSLGLTPNFKSNFDLAEDAKLQLSKDTYDDDLDNLLAQIGDQYADLFLAAKNLSDAILLSDILRVNTEITKAPLSASMIKRYDEHHQDLTLLKALVRQQLPEKYKEIFFDQSKNGYAGYIDGGASQEEFYKFIKPILEKMDGTEELLVKLNREDLLRKQRTFDNGSIPHQIHLGELHAILRRQEDFYPFLKDNREKIEKILTFRIPYYVGPLARGNSRFAWMTRKSEETITPWNFEEVVDKGASAQSFIERMTNFDKNLPNEKVLPKHSLLYEYFTVYNELTKVKYVTEGMRKPAFLSGEQKKAIVDLLFKTNRKVTVKQLKEDYFKKIECFDSVEISGVEDRFNASLGTYHDLLKIIKDKDFLDNEENEDILEDIVLTLTLFEDREMIEERLKTYAHLFDDKVMKQLKRRRYTGWGRLSRKLINGIRDKQSGKTILDFLKSDGFANRNFMQLIHDDSLTFKEDIQKAQVSGQGDSLHEHIANLAGSPAIKKGILQTVKVVDELVKVMGRHKPENIVIEMARENQTTQKGQKNSRERMKRIEEGIKELGSQILKEHPVENTQLQNEKLYLYYLQNGRDMYVDQELDINRLSDYDVDHIVPQSFLKDDSIDNKVLTRSDKARGKSDNVPSEEVVKKMKNYWRQLLNAKLITQRKFDNLTKAERGGLSELDKAGFIKRQLVETRQITKHVAQILDSRMNTKYDENDKLIREVKVITLKSKLVSDFRKDFQFYKVREINNYHHAHDAYLNAVVGTALIKKYPKLESEFVYGDYKVYDVRKMIAKSEQEIGKATAKYFFYSNIMNFFKTEITLANGEIRKRPLIETNGETGEIVWDKGRDFATVRKVLSMPQVNIVKKTEVQTGGFSKESILPKRNSDKLIARKKDWDPKKYGGFDSPTVAYSVLVVAKVEKGKSKKLKSVKELLGITIMERSSFEKNPIDFLEAKGYKEVKKDLIIKLPKYSLFELENGRKRMLASAGELQKGNELALPSKYVNFLYLASHYEKLKGSPEDNEQKQLFVEQHKHYLDEIIEQISEFSKRVILADANLDKVLSAYNKHRDKPIREQAENIIHLFTLTNLGAPAAFKYFDTTIDRKRYTSTKEVLDATLIHQSITGLYETRIDLSQLGGDGGEAAAKEAAAKGGTLNIEDEHRLHETSKEPDVSLGSTWLSDFPQAWAETGGMGLAVRQAPLIIPLKATSTPVSIKQYPMSQEARLGIKPHIQRLLDQGILVPCQSPWNTPLLPVKKPGTNDYRPVQDLREVNKRVEDIHPTVPNPYNLLSGLPPSHQWYTVLDLKDAFFCLRLHPTSQPLFAFEWRDPEMGISGQLTWTRLPQGFKNSPTLFNEALHRDLADFRIQHPDLILLQYVDDLLLAATSELDCQQGTRALLQTLGNLGYRASAKKAQICQKQVKYLGYLLKEGQRWLTEARKETVMGQPTPKTPRQLREFLGTAGFCRLWIPGFAEMAAPLYPLTKPGTLFNWGPDQQKAYQEIKQALLTAPALGLPDLTKPFELFVDEKQGYAKGVLTQKLGPWRRPVAYLSKKLDPVAAGWPPCLRMVAAIAVLTKDAGKLTMGQPLVILAPHAVEALVKQPPDRWLSNARMTHYQALLLDTDRVQFGPVVALNPATLLPLPEEGLQHNCLDILAEAHGTRPDLTDQPLPDADHTWYTDGSSLLQEGQRKAGAAVTTETEVIWAKALPAGTSAQRAELIALTQALKMAEGKKLNVYTDSRYAFATAHIHGEIYRRRGWLTSEGKEIKNKDEILALLKALFLPKRLSIIHCPGHQKGHSAEARGNRMADQAARKAAITETPDTSTLLAGKRTADGSEFEKRTADGSEFESPKKKAKVE

SEQ ID NO: 2730 - protein, 2090 aa, synthetic construct
MPAAKRVKLDGGDKKYSIGLDIGTNSVGWAVITDEYKVPSKKFKVLGNTDRHSIKKNLIGALLFDSGETAEATRLKRTARRRYTRRKNRICYLQEIFSNEMAKVDDSFFHRLEESFLVEEDKKHERHPIFGNIVDEVAYHEKYPTIYHLRKKLVDSTDKADLRLIYLALAHMIKFRGHFLIEGDLNPDNSDVDKLFIQLVQTYNQLFEENPINASGVDAKAILSARLSKSRRLENLIAQLPGEKKNGLFGNLIALSLGLTPNFKSNFDLAEDAKLQLSKDTYDDDLDNLLAQIGDQYADLFLAAKNLSDAILLSDILRVNTEITKAPLSASMIKRYDEHHQDLTLLKALVRQQLPEKYKEIFFDQSKNGYAGYIDGGASQEEFYKFIKPILEKMDGTEELLVKLNREDLLRKQRTFDNGSIPHQIHLGELHAILRRQEDFYPFLKDNREKIEKILTFRIPYYVGPLARGNSRFAWMTRKSEETITPWNFEEVVDKGASAQSFIERMTNFDKNLPNEKVLPKHSLLYEYFTVYNELTKVKYVTEGMRKPAFLSGEQKKAIVDLLFKTNRKVTVKQLKEDYFKKIECFDSVEISGVEDRFNASLGTYHDLLKIIKDKDFLDNEENEDILEDIVLTLTLFEDREMIEERLKTYAHLFDDKVMKQLKRRRYTGWGRLSRKLINGIRDKQSGKTILDFLKSDGFANRNFMQLIHDDSLTFKEDIQKAQVSGQGDSLHEHIANLAGSPAIKKGILQTVKVVDELVKVMGRHKPENIVIEMARENQTTQKGQKNSRERMKRIEEGIKELGSQILKEHPVENTQLQNEKLYLYYLQNGRDMYVDQELDINRLSDYDVDHIVPQSFLKDDSIDNKVLTRSDKARGKSDNVPSEEVVKKMKNYWRQLLNAKLITQRKFDNLTKAERGGLSELDKAGFIKRQLVETRQITKHVAQILDSRMNTKYDENDKLIREVKVITLKSKLVSDFRKDFQFYKVREINNYHHAHDAYLNAVVGTALIKKYPKLESEFVYGDYKVYDVRKMIAKSEQEIGKATAKYFFYSNIMNFFKTEITLANGEIRKRPLIETNGETGEIVWDKGRDFATVRKVLSMPQVNIVKKTEVQTGGFSKESILPKRNSDKLIARKKDWDPKKYGGFDSPTVAYSVLVVAKVEKGKSKKLKSVKELLGITIMERSSFEKNPIDFLEAKGYKEVKKDLIIKLPKYSLFELENGRKRMLASAGELQKGNELALPSKYVNFLYLASHYEKLKGSPEDNEQKQLFVEQHKHYLDEIIEQISEFSKRVILADANLDKVLSAYNKHRDKPIREQAENIIHLFTLTNLGAPAAFKYFDTTIDRKRYTSTKEVLDATLIHQSITGLYETRIDLSQLGGDGGEAAAKGGTLNIEDEHRLHETSKEPDVSLGSTWLSDFPQAWAETGGMGLAVRQAPLIIPLKATSTPVSIKQYPMSQEARLGIKPHIQRLLDQGILVPCQSPWNTPLLPVKKPGTNDYRPVQDLREVNKRVEDIHPTVPNPYNLLSGLPPSHQWYTVLDLKDAFFCLRLHPTSQPLFAFEWRDPEMGISGQLTWTRLPQGFKNSPTLFNEALHRDLADFRIQHPDLILLQYVDDLLLAATSELDCQQGTRALLQTLGNLGYRASAKKAQICQKQVKYLGYLLKEGQRWLTEARKETVMGQPTPKTPRQLREFLGTAGFCRLWIPGFAEMAAPLYPLTKPGTLFNWGPDQQKAYQEIKQALLTAPALGLPDLTKPFELFVDEKQGYAKGVLTQKLGPWRRPVAYLSKKLDPVAAGWPPCLRMVAAIAVLTKDAGKLTMGQPLVILAPHAVEALVKQPPDRWLSNARMTHYQALLLDTDRVQFGPVVALNPATLLPLPEEGLQHNCLDILAEAHGTRPDLTDQPLPDADHTWYTDGSSLLQEGQRKAGAAVTTETEVIWAKALPAGTSAQRAELIALTQALKMAEGKKLNVYTDSRYAFATAHIHGEIYRRRGWLTSEGKEIKNKDEILALLKALFLPKRLSIIHCPGHQKGHSAEARGNRMADQAARKAAITETPDTSTLLAGKRTADGSEFEKRTADGSEFESPKKKAKVE

SEQ ID NO: 2731 - protein, 2094 aa, synthetic construct
MPAAKRVKLDGGDKKYSIGLDIGTNSVGWAVITDEYKVPSKKFKVLGNTDRHSIKKNLIGALLFDSGETAEATRLKRTARRRYTRRKNRICYLQEIFSNEMAKVDDSFFHRLEESFLVEEDKKHERHPIFGNIVDEVAYHEKYPTIYHLRKKLVDSTDKADLRLIYLALAHMIKFRGHFLIEGDLNPDNSDVDKLFIQLVQTYNQLFEENPINASGVDAKAILSARLSKSRRLENLIAQLPGEKKNGLFGNLIALSLGLTPNFKSNFDLAEDAKLQLSKDTYDDDLDNLLAQIGDQYADLFLAAKNLSDAILLSDILRVNTEITKAPLSASMIKRYDEHHQDLTLLKALVRQQLPEKYKEIFFDQSKNGYAGYIDGGASQEEFYKFIKPILEKMDGTEELLVKLNREDLLRKQRTFDNGSIPHQIHLGELHAILRRQEDFYPFLKDNREKIEKILTFRIPYYVGPLARGNSRFAWMTRKSEETITPWNFEEVVDKGASAQSFIERMTNFDKNLPNEKVLPKHSLLYEYFTVYNELTKVKYVTEGMRKPAFLSGEQKKAIVDLLFKTNRKVTVKQLKEDYFKKIECFDSVEISGVEDRFNASLGTYHDLLKIIKDKDFLDNEENEDILEDIVLTLTLFEDREMIEERLKTYAHLFDDKVMKQLKRRRYTGWGRLSRKLINGIRDKQSGKTILDFLKSDGFANRNFMQLIHDDSLTFKEDIQKAQVSGQGDSLHEHIANLAGSPAIKKGILQTVKVVDELVKVMGRHKPENIVIEMARENQTTQKGQKNSRERMKRIEEGIKELGSQILKEHPVENTQLQNEKLYLYYLQNGRDMYVDQELDINRLSDYDVDHIVPQSFLKDDSIDNKVLTRSDKARGKSDNVPSEEVVKKMKNYWRQLLNAKLITQRKFDNLTKAERGGLSELDKAGFIKRQLVETRQITKHVAQILDSRMNTKYDENDKLIREVKVITLKSKLVSDFRKDFQFYKVREINNYHHAHDAYLNAVVGTALIKKYPKLESEFVYGDYKVYDVRKMIAKSEQEIGKATAKYFFYSNIMNFFKTEITLANGEIRKRPLIETNGETGEIVWDKGRDFATVRKVLSMPQVNIVKKTEVQTGGFSKESILPKRNSDKLIARKKDWDPKKYGGFDSPTVAYSVLVVAKVEKGKSKKLKSVKELLGITIMERSSFEKNPIDFLEAKGYKEVKKDLIIKLPKYSLFELENGRKRMLASAGELQKGNELALPSKYVNFLYLASHYEKLKGSPEDNEQKQLFVEQHKHYLDEIIEQISEFSKRVILADANLDKVLSAYNKHRDKPIREQAENIIHLFTLTNLGAPAAFKYFDTTIDRKRYTSTKEVLDATLIHQSITGLYETRIDLSQLGGDGGPAPAPAPAPGGTLNIEDEHRLHETSKEPDVSLGSTWLSDFPQAWAETGGMGLAVRQAPLIIPLKATSTPVSIKQYPMSQEARLGIKPHIQRLLDQGILVPCQSPWNTPLLPVKKPGTNDYRPVQDLREVNKRVEDIHPTVPNPYNLLSGLPPSHQWYTVLDLKDAFFCLRLHPTSQPLFAFEWRDPEMGISGQLTWTRLPQGFKNSPTLFNEALHRDLADFRIQHPDLILLQYVDDLLLAATSELDCQQGTRALLQTLGNLGYRASAKKAQICQKQVKYLGYLLKEGQRWLTEARKETVMGQPTPKTPRQLREFLGTAGFCRLWIPGFAEMAAPLYPLTKPGTLFNWGPDQQKAYQEIKQALLTAPALGLPDLTKPFELFVDEKQGYAKGVLTQKLGPWRRPVAYLSKKLDPVAAGWPPCLRMVAAIAVLTKDAGKLTMGQPLVILAPHAVEALVKQPPDRWLSNARMTHYQALLLDTDRVQFGPVVALNPATLLPLPEEGLQHNCLDILAEAHGTRPDLTDQPLPDADHTWYTDGSSLLQEGQRKAGAAVTTETEVIWAKALPAGTSAQRAELIALTQALKMAEGKKLNVYTDSRYAFATAHIHGEIYRRRGWLTSEGKEIKNKDEILALLKALFLPKRLSIIHCPGHQKGHSAEARGNRMADQAARKAAITETPDTSTLLAGKRTADGSEFEKRTADGSEFESPKKKAKVE

SEQ ID NO: 2732 - protein, 2096 aa, synthetic construct
MPAAKRVKLDGGDKKYSIGLDIGTNSVGWAVITDEYKVPSKKFKVLGNTDRHSIKKNLIGALLFDSGETAEATRLKRTARRRYTRRKNRICYLQEIFSNEMAKVDDSFFHRLEESFLVEEDKKHERHPIFGNIVDEVAYHEKYPTIYHLRKKLVDSTDKADLRLIYLALAHMIKFRGHFLIEGDLNPDNSDVDKLFIQLVQTYNQLFEENPINASGVDAKAILSARLSKSRRLENLIAQLPGEKKNGLFGNLIALSLGLTPNFKSNFDLAEDAKLQLSKDTYDDDLDNLLAQIGDQYADLFLAAKNLSDAILLSDILRVNTEITKAPLSASMIKRYDEHHQDLTLLKALVRQQLPEKYKEIFFDQSKNGYAGYIDGGASQEEFYKFIKPILEKMDGTEELLVKLNREDLLRKQRTFDNGSIPHQIHLGELHAILRRQEDFYPFLKDNREKIEKILTFRIPYYVGPLARGNSRFAWMTRKSEETITPWNFEEVVDKGASAQSFIERMTNFDKNLPNEKVLPKHSLLYEYFTVYNELTKVKYVTEGMRKPAFLSGEQKKAIVDLLFKTNRKVTVKQLKEDYFKKIECFDSVEISGVEDRFNASLGTYHDLLKIIKDKDFLDNEENEDILEDIVLTLTLFEDREMIEERLKTYAHLFDDKVMKQLKRRRYTGWGRLSRKLINGIRDKQSGKTILDFLKSDGFANRNFMQLIHDDSLTFKEDIQKAQVSGQGDSLHEHIANLAGSPAIKKGILQTVKVVDELVKVMGRHKPENIVIEMARENQTTQKGQKNSRERMKRIEEGIKELGSQILKEHPVENTQLQNEKLYLYYLQNGRDMYVDQELDINRLSDYDVDHIVPQSFLKDDSIDNKVLTRSDKARGKSDNVPSEEVVKKMKNYWRQLLNAKLITQRKFDNLTKAERGGLSELDKAGFIKRQLVETRQITKHVAQILDSRMNTKYDENDKLIREVKVITLKSKLVSDFRKDFQFYKVREINNYHHAHDAYLNAVVGTALIKKYPKLESEFVYGDYKVYDVRKMIAKSEQEIGKATAKYFFYSNIMNFFKTEITLANGEIRKRPLIETNGETGEIVWDKGRDFATVRKVLSMPQVNIVKKTEVQTGGFSKESILPKRNSDKLIARKKDWDPKKYGGFDSPTVAYSVLVVAKVEKGKSKKLKSVKELLGITIMERSSFEKNPIDFLEAKGYKEVKKDLIIKLPKYSLFELENGRKRMLASAGELQKGNELALPSKYVNFLYLASHYEKLKGSPEDNEQKQLFVEQHKHYLDEIIEQISEFSKRVILADANLDKVLSAYNKHRDKPIREQAENIIHLFTLTNLGAPAAFKYFDTTIDRKRYTSTKEVLDATLIHQSITGLYETRIDLSQLGGDGGGSSEAAAKGGGGGTLNIEDEHRLHETSKEPDVSLGSTWLSDFPQAWAETGGMGLAVRQAPLIIPLKATSTPVSIKQYPMSQEARLGIKPHIQRLLDQGILVPCQSPWNTPLLPVKKPGTNDYRPVQDLREVNKRVEDIHPTVPNPYNLLSGLPPSHQWYTVLDLKDAFFCLRLHPTSQPLFAFEWRDPEMGISGQLTWTRLPQGFKNSPTLFNEALHRDLADFRIQHPDLILLQYVDDLLLAATSELDCQQGTRALLQTLGNLGYRASAKKAQICQKQVKYLGYLLKEGQRWLTEARKETVMGQPTPKTPRQLREFLGTAGFCRLWIPGFAEMAAPLYPLTKPGTLFNWGPDQQKAYQEIKQALLTAPALGLPDLTKPFELFVDEKQGYAKGVLTQKLGPWRRPVAYLSKKLDPVAAGWPPCLRMVAAIAVLTKDAGKLTMGQPLVILAPHAVEALVKQPPDRWLSNARMTHYQALLLDTDRVQFGPVVALNPATLLPLPEEGLQHNCLDILAEAHGTRPDLTDQPLPDADHTWYTDGSSLLQEGQRKAGAAVTTETEVIWAKALPAGTSAQRAELIALTQALKMAEGKKLNVYTDSRYAFATAHIHGEIYRRRGWLTSEGKEIKNKDEILALLKALFLPKRLSIIHCPGHQKGHSAEARGNRMADQAARKAAITETPDTSTLLAGKRTADGSEFEKRTADGSEFESPKKKAKVE

SEQ ID NO: 2733 - protein, 2091 aa, synthetic construct
MPAAKRVKLDGGDKKYSIGLDIGTNSVGWAVITDEYKVPSKKFKVLGNTDRHSIKKNLIGALLFDSGETAEATRLKRTARRRYTRRKNRICYLQEIFSNEMAKVDDSFFHRLEESFLVEEDKKHERHPIFGNIVDEVAYHEKYPTIYHLRKKLVDSTDKADLRLIYLALAHMIKFRGHFLIEGDLNPDNSDVDKLFIQLVQTYNQLFEENPINASGVDAKAILSARLSKSRRLENLIAQLPGEKKNGLFGNLIALSLGLTPNFKSNFDLAEDAKLQLSKDTYDDDLDNLLAQIGDQYADLFLAAKNLSDAILLSDILRVNTEITKAPLSASMIKRYDEHHQDLTLLKALVRQQLPEKYKEIFFDQSKNGYAGYIDGGASQEEFYKFIKPILEKMDGTEELLVKLNREDLLRKQRTFDNGSIPHQIHLGELHAILRRQEDFYPFLKDNREKIEKILTFRIPYYVGPLARGNSRFAWMTRKSEETITPWNFEEVVDKGASAQSFIERMTNFDKNLPNEKVLPKHSLLYEYFTVYNELTKVKYVTEGMRKPAFLSGEQKKAIVDLLFKTNRKVTVKQLKEDYFKKIECFDSVEISGVEDRFNASLGTYHDLLKIIKDKDFLDNEENEDILEDIVLTLTLFEDREMIEERLKTYAHLFDDKVMKQLKRRRYTGWGRLSRKLINGIRDKQSGKTILDFLKSDGFANRNFMQLIHDDSLTFKEDIQKAQVSGQGDSLHEHIANLAGSPAIKKGILQTVKVVDELVKVMGRHKPENIVIEMARENQTTQKGQKNSRERMKRIEEGIKELGSQILKEHPVENTQLQNEKLYLYYLQNGRDMYVDQELDINRLSDYDVDHIVPQSFLKDDSIDNKVLTRSDKARGKSDNVPSEEVVKKMKNYWRQLLNAKLITQRKFDNLTKAERGGLSELDKAGFIKRQLVETRQITKHVAQILDSRMNTKYDENDKLIREVKVITLKSKLVSDFRKDFQFYKVREINNYHHAHDAYLNAVVGTALIKKYPKLESEFVYGDYKVYDVRKMIAKSEQEIGKATAKYFFYSNIMNFFKTEITLANGEIRKRPLIETNGETGEIVWDKGRDFATVRKVLSMPQVNIVKKTEVQTGGFSKESILPKRNSDKLIARKKDWDPKKYGGFDSPTVAYSVLVVAKVEKGKSKKLKSVKELLGITIMERSSFEKNPIDFLEAKGYKEVKKDLIIKLPKYSLFELENGRKRMLASAGELQKGNELALPSKYVNFLYLASHYEKLKGSPEDNEQKQLFVEQHKHYLDEIIEQISEFSKRVILADANLDKVLSAYNKHRDKPIREQAENIIHLFTLTNLGAPAAFKYFDTTIDRKRYTSTKEVLDATLIHQSITGLYETRIDLSQLGGDGGPAPGGSGGTLNIEDEHRLHETSKEPDVSLGSTWLSDFPQAWAETGGMGLAVRQAPLIIPLKATSTPVSIKQYPMSQEARLGIKPHIQRLLDQGILVPCQSPWNTPLLPVKKPGTNDYRPVQDLREVNKRVEDIHPTVPNPYNLLSGLPPSHQWYTVLDLKDAFFCLRLHPTSQPLFAFEWRDPEMGISGQLTWTRLPQGFKNSPTLFNEALHRDLADFRIQHPDLILLQYVDDLLLAATSELDCQQGTRALLQTLGNLGYRASAKKAQICQKQVKYLGYLLKEGQRWLTEARKETVMGQPTPKTPRQLREFLGTAGFCRLWIPGFAEMAAPLYPLTKPGTLFNWGPDQQKAYQEIKQALLTAPALGLPDLTKPFELFVDEKQGYAKGVLTQKLGPWRRPVAYLSKKLDPVAAGWPPCLRMVAAIAVLTKDAGKLTMGQPLVILAPHAVEALVKQPPDRWLSNARMTHYQALLLDTDRVQFGPVVALNPATLLPLPEEGLQHNCLDILAEAHGTRPDLTDQPLPDADHTWYTDGSSLLQEGQRKAGAAVTTETEVIWAKALPAGTSAQRAELIALTQALKMAEGKKLNVYTDSRYAFATAHIHGEIYRRRGWLTSEGKEIKNKDEILALLKALFLPKRLSIIHCPGHQKGHSAEARGNRMADQAARKAAITETPDTSTLLAGKRTADGSEFEKRTADGSEFESPKKKAKVE

SEQ ID NO: 2734 - protein, 2118 aa, synthetic construct
MPAAKRVKLDGGDKKYSIGLDIGTNSVGWAVITDEYKVPSKKFKVLGNTDRHSIKKNLIGALLFDSGETAEATRLKRTARRRYTRRKNRICYLQEIFSNEMAKVDDSFFHRLEESFLVEEDKKHERHPIFGNIVDEVAYHEKYPTIYHLRKKLVDSTDKADLRLIYLALAHMIKFRGHFLIEGDLNPDNSDVDKLFIQLVQTYNQLFEENPINASGVDAKAILSARLSKSRRLENLIAQLPGEKKNGLFGNLIALSLGLTPNFKSNFDLAEDAKLQLSKDTYDDDLDNLLAQIGDQYADLFLAAKNLSDAILLSDILRVNTEITKAPLSASMIKRYDEHHQDLTLLKALVRQQLPEKYKEIFFDQSKNGYAGYIDGGASQEEFYKFIKPILEKMDGTEELLVKLNREDLLRKQRTFDNGSIPHQIHLGELHAILRRQEDFYPFLKDNREKIEKILTFRIPYYVGPLARGNSRFAWMTRKSEETITPWNFEEVVDKGASAQSFIERMTNFDKNLPNEKVLPKHSLLYEYFTVYNELTKVKYVTEGMRKPAFLSGEQKKAIVDLLFKTNRKVTVKQLKEDYFKKIECFDSVEISGVEDRFNASLGTYHDLLKIIKDKDFLDNEENEDILEDIVLTLTLFEDREMIEERLKTYAHLFDDKVMKQLKRRRYTGWGRLSRKLINGIRDKQSGKTILDFLKSDGFANRNFMQLIHDDSLTFKEDIQKAQVSGQGDSLHEHIANLAGSPAIKKGILQTVKVVDELVKVMGRHKPENIVIEMARENQTTQKGQKNSRERMKRIEEGIKELGSQILKEHPVENTQLQNEKLYLYYLQNGRDMYVDQELDINRLSDYDVDHIVPQSFLKDDSIDNKVLTRSDKARGKSDNVPSEEVVKKMKNYWRQLLNAKLITQRKFDNLTKAERGGLSELDKAGFIKRQLVETRQITKHVAQILDSRMNTKYDENDKLIREVKVITLKSKLVSDFRKDFQFYKVREINNYHHAHDAYLNAVVGTALIKKYPKLESEFVYGDYKVYDVRKMIAKSEQEIGKATAKYFFYSNIMNFFKTEITLANGEIRKRPLIETNGETGEIVWDKGRDFATVRKVLSMPQVNIVKKTEVQTGGFSKESILPKRNSDKLIARKKDWDPKKYGGFDSPTVAYSVLVVAKVEKGKSKKLKSVKELLGITIMERSSFEKNPIDFLEAKGYKEVKKDLIIKLPKYSLFELENGRKRMLASAGELQKGNELALPSKYVNFLYLASHYEKLKGSPEDNEQKQLFVEQHKHYLDEIIEQISEFSKRVILADANLDKVLSAYNKHRDKPIREQAENIIHLFTLTNLGAPAAFKYFDTTIDRKRYTSTKEVLDATLIHQSITGLYETRIDLSQLGGDGGSGGSSGGSSGSETPGTSESATPESSGGSSGGSSGGTLNIEDEHRLHETSKEPDVSLGSTWLSDFPQAWAETGGMGLAVRQAPLIIPLKATSTPVSIKQYPMSQEARLGIKPHIQRLLDQGILVPCQSPWNTPLLPVKKPGTNDYRPVQDLREVNKRVEDIHPTVPNPYNLLSGLPPSHQWYTVLDLKDAFFCLRLHPTSQPLFAFEWRDPEMGISGQLTWTRLPQGFKNSPTLFNEALHRDLADFRIQHPDLILLQYVDDLLLAATSELDCQQGTRALLQTLGNLGYRASAKKAQICQKQVKYLGYLLKEGQRWLTEARKETVMGQPTPKTPRQLREFLGTAGFCRLWIPGFAEMAAPLYPLTKPGTLFNWGPDQQKAYQEIKQALLTAPALGLPDLTKPFELFVDEKQGYAKGVLTQKLGPWRRPVAYLSKKLDPVAAGWPPCLRMVAAIAVLTKDAGKLTMGQPLVILAPHAVEALVKQPPDRWLSNARMTHYQALLLDTDRVQFGPVVALNPATLLPLPEEGLQHNCLDILAEAHGTRPDLTDQPLPDADHTWYTDGSSLLQEGQRKAGAAVTTETEVIWAKALPAGTSAQRAELIALTQALKMAEGKKLNVYTDSRYAFATAHIHGEIYRRRGWLTSEGKEIKNKDEILALLKALFLPKRLSIIHCPGHQKGHSAEARGNRMADQAARKAAITETPDTSTLLAGKRTADGSEFEKRTADGSEFESPKKKAKVE

SEQ ID NO: 2735 - protein, 2091 aa, synthetic construct
MPAAKRVKLDGGDKKYSIGLDIGTNSVGWAVITDEYKVPSKKFKVLGNTDRHSIKKNLIGALLFDSGETAEATRLKRTARRRYTRRKNRICYLQEIFSNEMAKVDDSFFHRLEESFLVEEDKKHERHPIFGNIVDEVAYHEKYPTIYHLRKKLVDSTDKADLRLIYLALAHMIKFRGHFLIEGDLNPDNSDVDKLFIQLVQTYNQLFEENPINASGVDAKAILSARLSKSRRLENLIAQLPGEKKNGLFGNLIALSLGLTPNFKSNFDLAEDAKLQLSKDTYDDDLDNLLAQIGDQYADLFLAAKNLSDAILLSDILRVNTEITKAPLSASMIKRYDEHHQDLTLLKALVRQQLPEKYKEIFFDQSKNGYAGYIDGGASQEEFYKFIKPILEKMDGTEELLVKLNREDLLRKQRTFDNGSIPHQIHLGELHAILRRQEDFYPFLKDNREKIEKILTFRIPYYVGPLARGNSRFAWMTRKSEETITPWNFEEVVDKGASAQSFIERMTNFDKNLPNEKVLPKHSLLYEYFTVYNELTKVKYVTEGMRKPAFLSGEQKKAIVDLLFKTNRKVTVKQLKEDYFKKIECFDSVEISGVEDRFNASLGTYHDLLKIIKDKDFLDNEENEDILEDIVLTLTLFEDREMIEERLKTYAHLFDDKVMKQLKRRRYTGWGRLSRKLINGIRDKQSGKTILDFLKSDGFANRNFMQLIHDDSLTFKEDIQKAQVSGQGDSLHEHIANLAGSPAIKKGILQTVKVVDELVKVMGRHKPENIVIEMARENQTTQKGQKNSRERMKRIEEGIKELGSQILKEHPVENTQLQNEKLYLYYLQNGRDMYVDQELDINRLSDYDVDHIVPQSFLKDDSIDNKVLTRSDKARGKSDNVPSEEVVKKMKNYWRQLLNAKLITQRKFDNLTKAERGGLSELDKAGFIKRQLVETRQITKHVAQILDSRMNTKYDENDKLIREVKVITLKSKLVSDFRKDFQFYKVREINNYHHAHDAYLNAVVGTALIKKYPKLESEFVYGDYKVYDVRKMIAKSEQEIGKATAKYFFYSNIMNFFKTEITLANGEIRKRPLIETNGETGEIVWDKGRDFATVRKVLSMPQVNIVKKTEVQTGGFSKESILPKRNSDKLIARKKDWDPKKYGGFDSPTVAYSVLVVAKVEKGKSKKLKSVKELLGITIMERSSFEKNPIDFLEAKGYKEVKKDLIIKLPKYSLFELENGRKRMLASAGELQKGNELALPSKYVNFLYLASHYEKLKGSPEDNEQKQLFVEQHKHYLDEIIEQISEFSKRVILADANLDKVLSAYNKHRDKPIREQAENIIHLFTLTNLGAPAAFKYFDTTIDRKRYTSTKEVLDATLIHQSITGLYETRIDLSQLGGDGGGGSPAPGGTLNIEDEHRLHETSKEPDVSLGSTWLSDFPQAWAETGGMGLAVRQAPLIIPLKATSTPVSIKQYPMSQEARLGIKPHIQRLLDQGILVPCQSPWNTPLLPVKKPGTNDYRPVQDLREVNKRVEDIHPTVPNPYNLLSGLPPSHQWYTVLDLKDAFFCLRLHPTSQPLFAFEWRDPEMGISGQLTWTRLPQGFKNSPTLFNEALHRDLADFRIQHPDLILLQYVDDLLLAATSELDCQQGTRALLQTLGNLGYRASAKKAQICQKQVKYLGYLLKEGQRWLTEARKETVMGQPTPKTPRQLREFLGTAGFCRLWIPGFAEMAAPLYPLTKPGTLFNWGPDQQKAYQEIKQALLTAPALGLPDLTKPFELFVDEKQGYAKGVLTQKLGPWRRPVAYLSKKLDPVAAGWPPCLRMVAAIAVLTKDAGKLTMGQPLVILAPHAVEALVKQPPDRWLSNARMTHYQALLLDTDRVQFGPVVALNPATLLPLPEEGLQHNCLDILAEAHGTRPDLTDQPLPDADHTWYTDGSSLLQEGQRKAGAAVTTETEVIWAKALPAGTSAQRAELIALTQALKMAEGKKLNVYTDSRYAFATAHIHGEIYRRRGWLTSEGKEIKNKDEILALLKALFLPKRLSIIHCPGHQKGHSAEARGNRMADQAARKAAITETPDTSTLLAGKRTADGSEFEKRTADGSEFESPKKKAKVE

SEQ ID NO: 2736 - protein, 2100 aa, synthetic construct
MPAAKRVKLDGGDKKYSIGLDIGTNSVGWAVITDEYKVPSKKFKVLGNTDRHSIKKNLIGALLFDSGETAEATRLKRTARRRYTRRKNRICYLQEIFSNEMAKVDDSFFHRLEESFLVEEDKKHERHPIFGNIVDEVAYHEKYPTIYHLRKKLVDSTDKADLRLIYLALAHMIKFRGHFLIEGDLNPDNSDVDKLFIQLVQTYNQLFEENPINASGVDAKAILSARLSKSRRLENLIAQLPGEKKNGLFGNLIALSLGLTPNFKSNFDLAEDAKLQLSKDTYDDDLDNLLAQIGDQYADLFLAAKNLSDAILLSDILRVNTEITKAPLSASMIKRYDEHHQDLTLLKALVRQQLPEKYKEIFFDQSKNGYAGYIDGGASQEEFYKFIKPILEKMDGTEELLVKLNREDLLRKQRTFDNGSIPHQIHLGELHAILRRQEDFYPFLKDNREKIEKILTFRIPYYVGPLARGNSRFAWMTRKSEETITPWNFEEVVDKGASAQSFIERMTNFDKNLPNEKVLPKHSLLYEYFTVYNELTKVKYVTEGMRKPAFLSGEQKKAIVDLLFKTNRKVTVKQLKEDYFKKIECFDSVEISGVEDRFNASLGTYHDLLKIIKDKDFLDNEENEDILEDIVLTLTLFEDREMIEERLKTYAHLFDDKVMKQLKRRRYTGWGRLSRKLINGIRDKQSGKTILDFLKSDGFANRNFMQLIHDDSLTFKEDIQKAQVSGQGDSLHEHIANLAGSPAIKKGILQTVKVVDELVKVMGRHKPENIVIEMARENQTTQKGQKNSRERMKRIEEGIKELGSQILKEHPVENTQLQNEKLYLYYLQNGRDMYVDQELDINRLSDYDVDHIVPQSFLKDDSIDNKVLTRSDKARGKSDNVPSEEVVKKMKNYWRQLLNAKLITQRKFDNLTKAERGGLSELDKAGFIKRQLVETRQITKHVAQILDSRMNTKYDENDKLIREVKVITLKSKLVSDFRKDFQFYKVREINNYHHAHDAYLNAVVGTALIKKYPKLESEFVYGDYKVYDVRKMIAKSEQEIGKATAKYFFYSNIMNFFKTEITLANGEIRKRPLIETNGETGEIVWDKGRDFATVRKVLSMPQVNIVKKTEVQTGGFSKESILPKRNSDKLIARKKDWDPKKYGGFDSPTVAYSVLVVAKVEKGKSKKLKSVKELLGITIMERSSFEKNPIDFLEAKGYKEVKKDLIIKLPKYSLFELENGRKRMLASAGELQKGNELALPSKYVNFLYLASHYEKLKGSPEDNEQKQLFVEQHKHYLDEIIEQISEFSKRVILADANLDKVLSAYNKHRDKPIREQAENIIHLFTLTNLGAPAAFKYFDTTIDRKRYTSTKEVLDATLIHQSITGLYETRIDLSQLGGDGGGGGGSGGGGSGGGGSGGTLNIEDEHRLHETSKEPDVSLGSTWLSDFPQAWAETGGMGLAVRQAPLIIPLKATSTPVSIKQYPMSQEARLGIKPHIQRLLDQGILVPCQSPWNTPLLPVKKPGTNDYRPVQDLREVNKRVEDIHPTVPNPYNLLSGLPPSHQWYTVLDLKDAFFCLRLHPTSQPLFAFEWRDPEMGISGQLTWTRLPQGFKNSPTLFNEALHRDLADFRIQHPDLILLQYVDDLLLAATSELDCQQGTRALLQTLGNLGYRASAKKAQICQKQVKYLGYLLKEGQRWLTEARKETVMGQPTPKTPRQLREFLGTAGFCRLWIPGFAEMAAPLYPLTKPGTLFNWGPDQQKAYQEIKQALLTAPALGLPDLTKPFELFVDEKQGYAKGVLTQKLGPWRRPVAYLSKKLDPVAAGWPPCLRMVAAIAVLTKDAGKLTMGQPLVILAPHAVEALVKQPPDRWLSNARMTHYQALLLDTDRVQFGPVVALNPATLLPLPEEGLQHNCLDILAEAHGTRPDLTDQPLPDADHTWYTDGSSLLQEGQRKAGAAVTTETEVIWAKALPAGTSAQRAELIALTQALKMAEGKKLNVYTDSRYAFATAHIHGEIYRRRGWLTSEGKEIKNKDEILALLKALFLPKRLSIIHCPGHQKGHSAEARGNRMADQAARKAAITETPDTSTLLAGKRTADGSEFEKRTADGSEFESPKKKAKVE

SEQ ID NO: 2737 - protein, 2093 aa, synthetic construct
MPAAKRVKLDGGDKKYSIGLDIGTNSVGWAVITDEYKVPSKKFKVLGNTDRHSIKKNLIGALLFDSGETAEATRLKRTARRRYTRRKNRICYLQEIFSNEMAKVDDSFFHRLEESFLVEEDKKHERHPIFGNIVDEVAYHEKYPTIYHLRKKLVDSTDKADLRLIYLALAHMIKFRGHFLIEGDLNPDNSDVDKLFIQLVQTYNQLFEENPINASGVDAKAILSARLSKSRRLENLIAQLPGEKKNGLFGNLIALSLGLTPNFKSNFDLAEDAKLQLSKDTYDDDLDNLLAQIGDQYADLFLAAKNLSDAILLSDILRVNTEITKAPLSASMIKRYDEHHQDLTLLKALVRQQLPEKYKEIFFDQSKNGYAGYIDGGASQEEFYKFIKPILEKMDGTEELLVKLNREDLLRKQRTFDNGSIPHQIHLGELHAILRRQEDFYPFLKDNREKIEKILTFRIPYYVGPLARGNSRFAWMTRKSEETITPWNFEEVVDKGASAQSFIERMTNFDKNLPNEKVLPKHSLLYEYFTVYNELTKVKYVTEGMRKPAFLSGEQKKAIVDLLFKTNRKVTVKQLKEDYFKKIECFDSVEISGVEDRFNASLGTYHDLLKIIKDKDFLDNEENEDILEDIVLTLTLFEDREMIEERLKTYAHLFDDKVMKQLKRRRYTGWGRLSRKLINGIRDKQSGKTILDFLKSDGFANRNFMQLIHDDSLTFKEDIQKAQVSGQGDSLHEHIANLAGSPAIKKGILQTVKVVDELVKVMGRHKPENIVIEMARENQTTQKGQKNSRERMKRIEEGIKELGSQILKEHPVENTQLQNEKLYLYYLQNGRDMYVDQELDINRLSDYDVDHIVPQSFLKDDSIDNKVLTRSDKARGKSDNVPSEEVVKKMKNYWRQLLNAKLITQRKFDNLTKAERGGLSELDKAGFIKRQLVETRQITKHVAQILDSRMNTKYDENDKLIREVKVITLKSKLVSDFRKDFQFYKVREINNYHHAHDAYLNAVVGTALIKKYPKLESEFVYGDYKVYDVRKMIAKSEQEIGKATAKYFFYSNIMNFFKTEITLANGEIRKRPLIETNGETGEIVWDKGRDFATVRKVLSMPQVNIVKKTEVQTGGFSKESILPKRNSDKLIARKKDWDPKKYGGFDSPTVAYSVLVVAKVEKGKSKKLKSVKELLGITIMERSSFEKNPIDFLEAKGYKEVKKDLIIKLPKYSLFELENGRKRMLASAGELQKGNELALPSKYVNFLYLASHYEKLKGSPEDNEQKQLFVEQHKHYLDEIIEQISEFSKRVILADANLDKVLSAYNKHRDKPIREQAENIIHLFTLTNLGAPAAFKYFDTTIDRKRYTSTKEVLDATLIHQSITGLYETRIDLSQLGGDGGEAAAKGSSGGTLNIEDEHRLHETSKEPDVSLGSTWLSDFPQAWAETGGMGLAVRQAPLIIPLKATSTPVSIKQYPMSQEARLGIKPHIQRLLDQGILVPCQSPWNTPLLPVKKPGTNDYRPVQDLREVNKRVEDIHPTVPNPYNLLSGLPPSHQWYTVLDLKDAFFCLRLHPTSQPLFAFEWRDPEMGISGQLTWTRLPQGFKNSPTLFNEALHRDLADFRIQHPDLILLQYVDDLLLAATSELDCQQGTRALLQTLGNLGYRASAKKAQICQKQVKYLGYLLKEGQRWLTEARKETVMGQPTPKTPRQLREFLGTAGFCRLWIPGFAEMAAPLYPLTKPGTLFNWGPDQQKAYQEIKQALLTAPALGLPDLTKPFELFVDEKQGYAKGVLTQKLGPWRRPVAYLSKKLDPVAAGWPPCLRMVAAIAVLTKDAGKLTMGQPLVILAPHAVEALVKQPPDRWLSNARMTHYQALLLDTDRVQFGPVVALNPATLLPLPEEGLQHNCLDILAEAHGTRPDLTDQPLPDADHTWYTDGSSLLQEGQRKAGAAVTTETEVIWAKALPAGTSAQRAELIALTQALKMAEGKKLNVYTDSRYAFATAHIHGEIYRRRGWLTSEGKEIKNKDEILALLKALFLPKRLSIIHCPGHQKGHSAEARGNRMADQAARKAAITETPDTSTLLAGKRTADGSEFEKRTADGSEFESPKKKAKVE

SEQ ID NO: 2738 - protein, 2094 aa, synthetic construct
MPAAKRVKLDGGDKKYSIGLDIGTNSVGWAVITDEYKVPSKKFKVLGNTDRHSIKKNLIGALLFDSGETAEATRLKRTARRRYTRRKNRICYLQEIFSNEMAKVDDSFFHRLEESFLVEEDKKHERHPIFGNIVDEVAYHEKYPTIYHLRKKLVDSTDKADLRLIYLALAHMIKFRGHFLIEGDLNPDNSDVDKLFIQLVQTYNQLFEENPINASGVDAKAILSARLSKSRRLENLIAQLPGEKKNGLFGNLIALSLGLTPNFKSNFDLAEDAKLQLSKDTYDDDLDNLLAQIGDQYADLFLAAKNLSDAILLSDILRVNTEITKAPLSASMIKRYDEHHQDLTLLKALVRQQLPEKYKEIFFDQSKNGYAGYIDGGASQEEFYKFIKPILEKMDGTEELLVKLNREDLLRKQRTFDNGSIPHQIHLGELHAILRRQEDFYPFLKDNREKIEKILTFRIPYYVGPLARGNSRFAWMTRKSEETITPWNFEEVVDKGASAQSFIERMTNFDKNLPNEKVLPKHSLLYEYFTVYNELTKVKYVTEGMRKPAFLSGEQKKAIVDLLFKTNRKVTVKQLKEDYFKKIECFDSVEISGVEDRFNASLGTYHDLLKIIKDKDFLDNEENEDILEDIVLTLTLFEDREMIEERLKTYAHLFDDKVMKQLKRRRYTGWGRLSRKLINGIRDKQSGKTILDFLKSDGFANRNFMQLIHDDSLTFKEDIQKAQVSGQGDSLHEHIANLAGSPAIKKGILQTVKVVDELVKVMGRHKPENIVIEMARENQTTQKGQKNSRERMKRIEEGIKELGSQILKEHPVENTQLQNEKLYLYYLQNGRDMYVDQELDINRLSDYDVDHIVPQSFLKDDSIDNKVLTRSDKARGKSDNVPSEEVVKKMKNYWRQLLNAKLITQRKFDNLTKAERGGLSELDKAGFIKRQLVETRQITKHVAQILDSRMNTKYDENDKLIREVKVITLKSKLVSDFRKDFQFYKVREINNYHHAHDAYLNAVVGTALIKKYPKLESEFVYGDYKVYDVRKMIAKSEQEIGKATAKYFFYSNIMNFFKTEITLANGEIRKRPLIETNGETGEIVWDKGRDFATVRKVLSMPQVNIVKKTEVQTGGFSKESILPKRNSDKLIARKKDWDPKKYGGFDSPTVAYSVLVVAKVEKGKSKKLKSVKELLGITIMERSSFEKNPIDFLEAKGYKEVKKDLIIKLPKYSLFELENGRKRMLASAGELQKGNELALPSKYVNFLYLASHYEKLKGSPEDNEQKQLFVEQHKHYLDEIIEQISEFSKRVILADANLDKVLSAYNKHRDKPIREQAENIIHLFTLTNLGAPAAFKYFDTTIDRKRYTSTKEVLDATLIHQSITGLYETRIDLSQLGGDGGPAPGGGGGSGGTLNIEDEHRLHETSKEPDVSLGSTWLSDFPQAWAETGGMGLAVRQAPLIIPLKATSTPVSIKQYPMSQEARLGIKPHIQRLLDQGILVPCQSPWNTPLLPVKKPGTNDYRPVQDLREVNKRVEDIHPTVPNPYNLLSGLPPSHQWYTVLDLKDAFFCLRLHPTSQPLFAFEWRDPEMGISGQLTWTRLPQGFKNSPTLFNEALHRDLADFRIQHPDLILLQYVDDLLLAATSELDCQQGTRALLQTLGNLGYRASAKKAQICQKQVKYLGYLLKEGQRWLTEARKETVMGQPTPKTPRQLREFLGTAGFCRLWIPGFAEMAAPLYPLTKPGTLFNWGPDQQKAYQEIKQALLTAPALGLPDLTKPFELFVDEKQGYAKGVLTQKLGPWRRPVAYLSKKLDPVAAGWPPCLRMVAAIAVLTKDAGKLTMGQPLVILAPHAVEALVKQPPDRWLSNARMTHYQALLLDTDRVQFGPVVALNPATLLPLPEEGLQHNCLDILAEAHGTRPDLTDQPLPDADHTWYTDGSSLLQEGQRKAGAAVTTETEVIWAKALPAGTSAQRAELIALTQALKMAEGKKLNVYTDSRYAFATAHIHGEIYRRRGWLTSEGKEIKNKDEILALLKALFLPKRLSIIHCPGHQKGHSAEARGNRMADQAARKAAITETPDTSTLLAGKRTADGSEFEKRTADGSEFESPKKKAKVE

SEQ ID NO: 2739 - protein, 2093 aa, synthetic construct
MPAAKRVKLDGGDKKYSIGLDIGTNSVGWAVITDEYKVPSKKFKVLGNTDRHSIKKNLIGALLFDSGETAEATRLKRTARRRYTRRKNRICYLQEIFSNEMAKVDDSFFHRLEESFLVEEDKKHERHPIFGNIVDEVAYHEKYPTIYHLRKKLVDSTDKADLRLIYLALAHMIKFRGHFLIEGDLNPDNSDVDKLFIQLVQTYNQLFEENPINASGVDAKAILSARLSKSRRLENLIAQLPGEKKNGLFGNLIALSLGLTPNFKSNFDLAEDAKLQLSKDTYDDDLDNLLAQIGDQYADLFLAAKNLSDAILLSDILRVNTEITKAPLSASMIKRYDEHHQDLTLLKALVRQQLPEKYKEIFFDQSKNGYAGYIDGGASQEEFYKFIKPILEKMDGTEELLVKLNREDLLRKQRTFDNGSIPHQIHLGELHAILRRQEDFYPFLKDNREKIEKILTFRIPYYVGPLARGNSRFAWMTRKSEETITPWNFEEVVDKGASAQSFIERMTNFDKNLPNEKVLPKHSLLYEYFTVYNELTKVKYVTEGMRKPAFLSGEQKKAIVDLLFKTNRKVTVKQLKEDYFKKIECFDSVEISGVEDRFNASLGTYHDLLKIIKDKDFLDNEENEDILEDIVLTLTLFEDREMIEERLKTYAHLFDDKVMKQLKRRRYTGWGRLSRKLINGIRDKQSGKTILDFLKSDGFANRNFMQLIHDDSLTFKEDIQKAQVSGQGDSLHEHIANLAGSPAIKKGILQTVKVVDELVKVMGRHKPENIVIEMARENQTTQKGQKNSRERMKRIEEGIKELGSQILKEHPVENTQLQNEKLYLYYLQNGRDMYVDQELDINRLSDYDVDHIVPQSFLKDDSIDNKVLTRSDKARGKSDNVPSEEVVKKMKNYWRQLLNAKLITQRKFDNLTKAERGGLSELDKAGFIKRQLVETRQITKHVAQILDSRMNTKYDENDKLIREVKVITLKSKLVSDFRKDFQFYKVREINNYHHAHDAYLNAVVGTALIKKYPKLESEFVYGDYKVYDVRKMIAKSEQEIGKATAKYFFYSNIMNFFKTEITLANGEIRKRPLIETNGETGEIVWDKGRDFATVRKVLSMPQVNIVKKTEVQTGGFSKESILPKRNSDKLIARKKDWDPKKYGGFDSPTVAYSVLVVAKVEKGKSKKLKSVKELLGITIMERSSFEKNPIDFLEAKGYKEVKKDLIIKLPKYSLFELENGRKRMLASAGELQKGNELALPSKYVNFLYLASHYEKLKGSPEDNEQKQLFVEQHKHYLDEIIEQISEFSKRVILADANLDKVLSAYNKHRDKPIREQAENIIHLFTLTNLGAPAAFKYFDTTIDRKRYTSTKEVLDATLIHQSITGLYETRIDLSQLGGDGGGGGGGGGGGGTLNIEDEHRLHETSKEPDVSLGSTWLSDFPQAWAETGGMGLAVRQAPLIIPLKATSTPVSIKQYPMSQEARLGIKPHIQRLLDQGILVPCQSPWNTPLLPVKKPGTNDYRPVQDLREVNKRVEDIHPTVPNPYNLLSGLPPSHQWYTVLDLKDAFFCLRLHPTSQPLFAFEWRDPEMGISGQLTWTRLPQGFKNSPTLFNEALHRDLADFRIQHPDLILLQYVDDLLLAATSELDCQQGTRALLQTLGNLGYRASAKKAQICQKQVKYLGYLLKEGQRWLTEARKETVMGQPTPKTPRQLREFLGTAGFCRLWIPGFAEMAAPLYPLTKPGTLFNWGPDQQKAYQEIKQALLTAPALGLPDLTKPFELFVDEKQGYAKGVLTQKLGPWRRPVAYLSKKLDPVAAGWPPCLRMVAAIAVLTKDAGKLTMGQPLVILAPHAVEALVKQPPDRWLSNARMTHYQALLLDTDRVQFGPVVALNPATLLPLPEEGLQHNCLDILAEAHGTRPDLTDQPLPDADHTWYTDGSSLLQEGQRKAGAAVTTETEVIWAKALPAGTSAQRAELIALTQALKMAEGKKLNVYTDSRYAFATAHIHGEIYRRRGWLTSEGKEIKNKDEILALLKALFLPKRLSIIHCPGHQKGHSAEARGNRMADQAARKAAITETPDTSTLLAGKRTADGSEFEKRTADGSEFESPKKKAKVE

SEQ ID NO: 2740 - protein, 2093 aa, synthetic construct
MPAAKRVKLDGGDKKYSIGLDIGTNSVGWAVITDEYKVPSKKFKVLGNTDRHSIKKNLIGALLFDSGETAEATRLKRTARRRYTRRKNRICYLQEIFSNEMAKVDDSFFHRLEESFLVEEDKKHERHPIFGNIVDEVAYHEKYPTIYHLRKKLVDSTDKADLRLIYLALAHMIKFRGHFLIEGDLNPDNSDVDKLFIQLVQTYNQLFEENPINASGVDAKAILSARLSKSRRLENLIAQLPGEKKNGLFGNLIALSLGLTPNFKSNFDLAEDAKLQLSKDTYDDDLDNLLAQIGDQYADLFLAAKNLSDAILLSDILRVNTEITKAPLSASMIKRYDEHHQDLTLLKALVRQQLPEKYKEIFFDQSKNGYAGYIDGGASQEEFYKFIKPILEKMDGTEELLVKLNREDLLRKQRTFDNGSIPHQIHLGELHAILRRQEDFYPFLKDNREKIEKILTFRIPYYVGPLARGNSRFAWMTRKSEETITPWNFEEVVDKGASAQSFIERMTNFDKNLPNEKVLPKHSLLYEYFTVYNELTKVKYVTEGMRKPAFLSGEQKKAIVDLLFKTNRKVTVKQLKEDYFKKIECFDSVEISGVEDRFNASLGTYHDLLKIIKDKDFLDNEENEDILEDIVLTLTLFEDREMIEERLKTYAHLFDDKVMKQLKRRRYTGWGRLSRKLINGIRDKQSGKTILDFLKSDGFANRNFMQLIHDDSLTFKEDIQKAQVSGQGDSLHEHIANLAGSPAIKKGILQTVKVVDELVKVMGRHKPENIVIEMARENQTTQKGQKNSRERMKRIEEGIKELGSQILKEHPVENTQLQNEKLYLYYLQNGRDMYVDQELDINRLSDYDVDHIVPQSFLKDDSIDNKVLTRSDKARGKSDNVPSEEVVKKMKNYWRQLLNAKLITQRKFDNLTKAERGGLSELDKAGFIKRQLVETRQITKHVAQILDSRMNTKYDENDKLIREVKVITLKSKLVSDFRKDFQFYKVREINNYHHAHDAYLNAVVGTALIKKYPKLESEFVYGDYKVYDVRKMIAKSEQEIGKATAKYFFYSNIMNFFKTEITLANGEIRKRPLIETNGETGEIVWDKGRDFATVRKVLSMPQVNIVKKTEVQTGGFSKESILPKRNSDKLIARKKDWDPKKYGGFDSPTVAYSVLVVAKVEKGKSKKLKSVKELLGITIMERSSFEKNPIDFLEAKGYKEVKKDLIIKLPKYSLFELENGRKRMLASAGELQKGNELALPSKYVNFLYLASHYEKLKGSPEDNEQKQLFVEQHKHYLDEIIEQISEFSKRVILADANLDKVLSAYNKHRDKPIREQAENIIHLFTLTNLGAPAAFKYFDTTIDRKRYTSTKEVLDATLIHQSITGLYETRIDLSQLGGDGGPAPEAAAKGGTLNIEDEHRLHETSKEPDVSLGSTWLSDFPQAWAETGGMGLAVRQAPLIIPLKATSTPVSIKQYPMSQEARLGIKPHIQRLLDQGILVPCQSPWNTPLLPVKKPGTNDYRPVQDLREVNKRVEDIHPTVPNPYNLLSGLPPSHQWYTVLDLKDAFFCLRLHPTSQPLFAFEWRDPEMGISGQLTWTRLPQGFKNSPTLFNEALHRDLADFRIQHPDLILLQYVDDLLLAATSELDCQQGTRALLQTLGNLGYRASAKKAQICQKQVKYLGYLLKEGQRWLTEARKETVMGQPTPKTPRQLREFLGTAGFCRLWIPGFAEMAAPLYPLTKPGTLFNWGPDQQKAYQEIKQALLTAPALGLPDLTKPFELFVDEKQGYAKGVLTQKLGPWRRPVAYLSKKLDPVAAGWPPCLRMVAAIAVLTKDAGKLTMGQPLVILAPHAVEALVKQPPDRWLSNARMTHYQALLLDTDRVQFGPVVALNPATLLPLPEEGLQHNCLDILAEAHGTRPDLTDQPLPDADHTWYTDGSSLLQEGQRKAGAAVTTETEVIWAKALPAGTSAQRAELIALTQALKMAEGKKLNVYTDSRYAFATAHIHGEIYRRRGWLTSEGKEIKNKDEILALLKALFLPKRLSIIHCPGHQKGHSAEARGNRMADQAARKAAITETPDTSTLLAGKRTADGSEFEKRTADGSEFESPKKKAKVE

SEQ ID NO: 2741 - protein, 2115 aa, synthetic construct
MPAAKRVKLDGGDKKYSIGLDIGTNSVGWAVITDEYKVPSKKFKVLGNTDRHSIKKNLIGALLFDSGETAEATRLKRTARRRYTRRKNRICYLQEIFSNEMAKVDDSFFHRLEESFLVEEDKKHERHPIFGNIVDEVAYHEKYPTIYHLRKKLVDSTDKADLRLIYLALAHMIKFRGHFLIEGDLNPDNSDVDKLFIQLVQTYNQLFEENPINASGVDAKAILSARLSKSRRLENLIAQLPGEKKNGLFGNLIALSLGLTPNFKSNFDLAEDAKLQLSKDTYDDDLDNLLAQIGDQYADLFLAAKNLSDAILLSDILRVNTEITKAPLSASMIKRYDEHHQDLTLLKALVRQQLPEKYKEIFFDQSKNGYAGYIDGGASQEEFYKFIKPILEKMDGTEELLVKLNREDLLRKQRTFDNGSIPHQIHLGELHAILRRQEDFYPFLKDNREKIEKILTFRIPYYVGPLARGNSRFAWMTRKSEETITPWNFEEVVDKGASAQSFIERMTNFDKNLPNEKVLPKHSLLYEYFTVYNELTKVKYVTEGMRKPAFLSGEQKKAIVDLLFKTNRKVTVKQLKEDYFKKIECFDSVEISGVEDRFNASLGTYHDLLKIIKDKDFLDNEENEDILEDIVLTLTLFEDREMIEERLKTYAHLFDDKVMKQLKRRRYTGWGRLSRKLINGIRDKQSGKTILDFLKSDGFANRNFMQLIHDDSLTFKEDIQKAQVSGQGDSLHEHIANLAGSPAIKKGILQTVKVVDELVKVMGRHKPENIVIEMARENQTTQKGQKNSRERMKRIEEGIKELGSQILKEHPVENTQLQNEKLYLYYLQNGRDMYVDQELDINRLSDYDVDHIVPQSFLKDDSIDNKVLTRSDKARGKSDNVPSEEVVKKMKNYWRQLLNAKLITQRKFDNLTKAERGGLSELDKAGFIKRQLVETRQITKHVAQILDSRMNTKYDENDKLIREVKVITLKSKLVSDFRKDFQFYKVREINNYHHAHDAYLNAVVGTALIKKYPKLESEFVYGDYKVYDVRKMIAKSEQEIGKATAKYFFYSNIMNFFKTEITLANGEIRKRPLIETNGETGEIVWDKGRDFATVRKVLSMPQVNIVKKTEVQTGGFSKESILPKRNSDKLIARKKDWDPKKYGGFDSPTVAYSVLVVAKVEKGKSKKLKSVKELLGITIMERSSFEKNPIDFLEAKGYKEVKKDLIIKLPKYSLFELENGRKRMLASAGELQKGNELALPSKYVNFLYLASHYEKLKGSPEDNEQKQLFVEQHKHYLDEIIEQISEFSKRVILADANLDKVLSAYNKHRDKPIREQAENIIHLFTLTNLGAPAAFKYFDTTIDRKRYTSTKEVLDATLIHQSITGLYETRIDLSQLGGDGGGGGGSGGGGSGGGGSGGGGSGGGGSGGGGSGGTLNIEDEHRLHETSKEPDVSLGSTWLSDFPQAWAETGGMGLAVRQAPLIIPLKATSTPVSIKQYPMSQEARLGIKPHIQRLLDQGILVPCQSPWNTPLLPVKKPGTNDYRPVQDLREVNKRVEDIHPTVPNPYNLLSGLPPSHQWYTVLDLKDAFFCLRLHPTSQPLFAFEWRDPEMGISGQLTWTRLPQGFKNSPTLFNEALHRDLADFRIQHPDLILLQYVDDLLLAATSELDCQQGTRALLQTLGNLGYRASAKKAQICQKQVKYLGYLLKEGQRWLTEARKETVMGQPTPKTPRQLREFLGTAGFCRLWIPGFAEMAAPLYPLTKPGTLFNWGPDQQKAYQEIKQALLTAPALGLPDLTKPFELFVDEKQGYAKGVLTQKLGPWRRPVAYLSKKLDPVAAGWPPCLRMVAAIAVLTKDAGKLTMGQPLVILAPHAVEALVKQPPDRWLSNARMTHYQALLLDTDRVQFGPVVALNPATLLPLPEEGLQHNCLDILAEAHGTRPDLTDQPLPDADHTWYTDGSSLLQEGQRKAGAAVTTETEVIWAKALPAGTSAQRAELIALTQALKMAEGKKLNVYTDSRYAFATAHIHGEIYRRRGWLTSEGKEIKNKDEILALLKALFLPKRLSIIHCPGHQKGHSAEARGNRMADQAARKAAITETPDTSTLLAGKRTADGSEFEKRTADGSEFESPKKKAKVE

SEQ ID NO: 2742 - protein, 2094 aa, synthetic construct
MPAAKRVKLDGGDKKYSIGLDIGTNSVGWAVITDEYKVPSKKFKVLGNTDRHSIKKNLIGALLFDSGETAEATRLKRTARRRYTRRKNRICYLQEIFSNEMAKVDDSFFHRLEESFLVEEDKKHERHPIFGNIVDEVAYHEKYPTIYHLRKKLVDSTDKADLRLIYLALAHMIKFRGHFLIEGDLNPDNSDVDKLFIQLVQTYNQLFEENPINASGVDAKAILSARLSKSRRLENLIAQLPGEKKNGLFGNLIALSLGLTPNFKSNFDLAEDAKLQLSKDTYDDDLDNLLAQIGDQYADLFLAAKNLSDAILLSDILRVNTEITKAPLSASMIKRYDEHHQDLTLLKALVRQQLPEKYKEIFFDQSKNGYAGYIDGGASQEEFYKFIKPILEKMDGTEELLVKLNREDLLRKQRTFDNGSIPHQIHLGELHAILRRQEDFYPFLKDNREKIEKILTFRIPYYVGPLARGNSRFAWMTRKSEETITPWNFEEVVDKGASAQSFIERMTNFDKNLPNEKVLPKHSLLYEYFTVYNELTKVKYVTEGMRKPAFLSGEQKKAIVDLLFKTNRKVTVKQLKEDYFKKIECFDSVEISGVEDRFNASLGTYHDLLKIIKDKDFLDNEENEDILEDIVLTLTLFEDREMIEERLKTYAHLFDDKVMKQLKRRRYTGWGRLSRKLINGIRDKQSGKTILDFLKSDGFANRNFMQLIHDDSLTFKEDIQKAQVSGQGDSLHEHIANLAGSPAIKKGILQTVKVVDELVKVMGRHKPENIVIEMARENQTTQKGQKNSRERMKRIEEGIKELGSQILKEHPVENTQLQNEKLYLYYLQNGRDMYVDQELDINRLSDYDVDHIVPQSFLKDDSIDNKVLTRSDKARGKSDNVPSEEVVKKMKNYWRQLLNAKLITQRKFDNLTKAERGGLSELDKAGFIKRQLVETRQITKHVAQILDSRMNTKYDENDKLIREVKVITLKSKLVSDFRKDFQFYKVREINNYHHAHDAYLNAVVGTALIKKYPKLESEFVYGDYKVYDVRKMIAKSEQEIGKATAKYFFYSNIMNFFKTEITLANGEIRKRPLIETNGETGEIVWDKGRDFATVRKVLSMPQVNIVKKTEVQTGGFSKESILPKRNSDKLIARKKDWDPKKYGGFDSPTVAYSVLVVAKVEKGKSKKLKSVKELLGITIMERSSFEKNPIDFLEAKGYKEVKKDLIIKLPKYSLFELENGRKRMLASAGELQKGNELALPSKYVNFLYLASHYEKLKGSPEDNEQKQLFVEQHKHYLDEIIEQISEFSKRVILADANLDKVLSAYNKHRDKPIREQAENIIHLFTLTNLGAPAAFKYFDTTIDRKRYTSTKEVLDATLIHQSITGLYETRIDLSQLGGDGGGGGPAPGGSGGTLNIEDEHRLHETSKEPDVSLGSTWLSDFPQAWAETGGMGLAVRQAPLIIPLKATSTPVSIKQYPMSQEARLGIKPHIQRLLDQGILVPCQSPWNTPLLPVKKPGTNDYRPVQDLREVNKRVEDIHPTVPNPYNLLSGLPPSHQWYTVLDLKDAFFCLRLHPTSQPLFAFEWRDPEMGISGQLTWTRLPQGFKNSPTLFNEALHRDLADFRIQHPDLILLQYVDDLLLAATSELDCQQGTRALLQTLGNLGYRASAKKAQICQKQVKYLGYLLKEGQRWLTEARKETVMGQPTPKTPRQLREFLGTAGFCRLWIPGFAEMAAPLYPLTKPGTLFNWGPDQQKAYQEIKQALLTAPALGLPDLTKPFELFVDEKQGYAKGVLTQKLGPWRRPVAYLSKKLDPVAAGWPPCLRMVAAIAVLTKDAGKLTMGQPLVILAPHAVEALVKQPPDRWLSNARMTHYQALLLDTDRVQFGPVVALNPATLLPLPEEGLQHNCLDILAEAHGTRPDLTDQPLPDADHTWYTDGSSLLQEGQRKAGAAVTTETEVIWAKALPAGTSAQRAELIALTQALKMAEGKKLNVYTDSRYAFATAHIHGEIYRRRGWLTSEGKEIKNKDEILALLKALFLPKRLSIIHCPGHQKGHSAEARGNRMADQAARKAAITETPDTSTLLAGKRTADGSEFEKRTADGSEFESPKKKAKVE

SEQ ID NO: 2743 - protein, 2091 aa, synthetic construct
MPAAKRVKLDGGDKKYSIGLDIGTNSVGWAVITDEYKVPSKKFKVLGNTDRHSIKKNLIGALLFDSGETAEATRLKRTARRRYTRRKNRICYLQEIFSNEMAKVDDSFFHRLEESFLVEEDKKHERHPIFGNIVDEVAYHEKYPTIYHLRKKLVDSTDKADLRLIYLALAHMIKFRGHFLIEGDLNPDNSDVDKLFIQLVQTYNQLFEENPINASGVDAKAILSARLSKSRRLENLIAQLPGEKKNGLFGNLIALSLGLTPNFKSNFDLAEDAKLQLSKDTYDDDLDNLLAQIGDQYADLFLAAKNLSDAILLSDILRVNTEITKAPLSASMIKRYDEHHQDLTLLKALVRQQLPEKYKEIFFDQSKNGYAGYIDGGASQEEFYKFIKPILEKMDGTEELLVKLNREDLLRKQRTFDNGSIPHQIHLGELHAILRRQEDFYPFLKDNREKIEKILTFRIPYYVGPLARGNSRFAWMTRKSEETITPWNFEEVVDKGASAQSFIERMTNFDKNLPNEKVLPKHSLLYEYFTVYNELTKVKYVTEGMRKPAFLSGEQKKAIVDLLFKTNRKVTVKQLKEDYFKKIECFDSVEISGVEDRFNASLGTYHDLLKIIKDKDFLDNEENEDILEDIVLTLTLFEDREMIEERLKTYAHLFDDKVMKQLKRRRYTGWGRLSRKLINGIRDKQSGKTILDFLKSDGFANRNFMQLIHDDSLTFKEDIQKAQVSGQGDSLHEHIANLAGSPAIKKGILQTVKVVDELVKVMGRHKPENIVIEMARENQTTQKGQKNSRERMKRIEEGIKELGSQILKEHPVENTQLQNEKLYLYYLQNGRDMYVDQELDINRLSDYDVDHIVPQSFLKDDSIDNKVLTRSDKARGKSDNVPSEEVVKKMKNYWRQLLNAKLITQRKFDNLTKAERGGLSELDKAGFIKRQLVETRQITKHVAQILDSRMNTKYDENDKLIREVKVITLKSKLVSDFRKDFQFYKVREINNYHHAHDAYLNAVVGTALIKKYPKLESEFVYGDYKVYDVRKMIAKSEQEIGKATAKYFFYSNIMNFFKTEITLANGEIRKRPLIETNGETGEIVWDKGRDFATVRKVLSMPQVNIVKKTEVQTGGFSKESILPKRNSDKLIARKKDWDPKKYGGFDSPTVAYSVLVVAKVEKGKSKKLKSVKELLGITIMERSSFEKNPIDFLEAKGYKEVKKDLIIKLPKYSLFELENGRKRMLASAGELQKGNELALPSKYVNFLYLASHYEKLKGSPEDNEQKQLFVEQHKHYLDEIIEQISEFSKRVILADANLDKVLSAYNKHRDKPIREQAENIIHLFTLTNLGAPAAFKYFDTTIDRKRYTSTKEVLDATLIHQSITGLYETRIDLSQLGGDGGPAPGGGGGTLNIEDEHRLHETSKEPDVSLGSTWLSDFPQAWAETGGMGLAVRQAPLIIPLKATSTPVSIKQYPMSQEARLGIKPHIQRLLDQGILVPCQSPWNTPLLPVKKPGTNDYRPVQDLREVNKRVEDIHPTVPNPYNLLSGLPPSHQWYTVLDLKDAFFCLRLHPTSQPLFAFEWRDPEMGISGQLTWTRLPQGFKNSPTLFNEALHRDLADFRIQHPDLILLQYVDDLLLAATSELDCQQGTRALLQTLGNLGYRASAKKAQICQKQVKYLGYLLKEGQRWLTEARKETVMGQPTPKTPRQLREFLGTAGFCRLWIPGFAEMAAPLYPLTKPGTLFNWGPDQQKAYQEIKQALLTAPALGLPDLTKPFELFVDEKQGYAKGVLTQKLGPWRRPVAYLSKKLDPVAAGWPPCLRMVAAIAVLTKDAGKLTMGQPLVILAPHAVEALVKQPPDRWLSNARMTHYQALLLDTDRVQFGPVVALNPATLLPLPEEGLQHNCLDILAEAHGTRPDLTDQPLPDADHTWYTDGSSLLQEGQRKAGAAVTTETEVIWAKALPAGTSAQRAELIALTQALKMAEGKKLNVYTDSRYAFATAHIHGEIYRRRGWLTSEGKEIKNKDEILALLKALFLPKRLSIIHCPGHQKGHSAEARGNRMADQAARKAAITETPDTSTLLAGKRTADGSEFEKRTADGSEFESPKKKAKVE

SEQ ID NO: 2744 - protein, 2096 aa, synthetic construct
MPAAKRVKLDGGDKKYSIGLDIGTNSVGWAVITDEYKVPSKKFKVLGNTDRHSIKKNLIGALLFDSGETAEATRLKRTARRRYTRRKNRICYLQEIFSNEMAKVDDSFFHRLEESFLVEEDKKHERHPIFGNIVDEVAYHEKYPTIYHLRKKLVDSTDKADLRLIYLALAHMIKFRGHFLIEGDLNPDNSDVDKLFIQLVQTYNQLFEENPINASGVDAKAILSARLSKSRRLENLIAQLPGEKKNGLFGNLIALSLGLTPNFKSNFDLAEDAKLQLSKDTYDDDLDNLLAQIGDQYADLFLAAKNLSDAILLSDILRVNTEITKAPLSASMIKRYDEHHQDLTLLKALVRQQLPEKYKEIFFDQSKNGYAGYIDGGASQEEFYKFIKPILEKMDGTEELLVKLNREDLLRKQRTFDNGSIPHQIHLGELHAILRRQEDFYPFLKDNREKIEKILTFRIPYYVGPLARGNSRFAWMTRKSEETITPWNFEEVVDKGASAQSFIERMTNFDKNLPNEKVLPKHSLLYEYFTVYNELTKVKYVTEGMRKPAFLSGEQKKAIVDLLFKTNRKVTVKQLKEDYFKKIECFDSVEISGVEDRFNASLGTYHDLLKIIKDKDFLDNEENEDILEDIVLTLTLFEDREMIEERLKTYAHLFDDKVMKQLKRRRYTGWGRLSRKLINGIRDKQSGKTILDFLKSDGFANRNFMQLIHDDSLTFKEDIQKAQVSGQGDSLHEHIANLAGSPAIKKGILQTVKVVDELVKVMGRHKPENIVIEMARENQTTQKGQKNSRERMKRIEEGIKELGSQILKEHPVENTQLQNEKLYLYYLQNGRDMYVDQELDINRLSDYDVDHIVPQSFLKDDSIDNKVLTRSDKARGKSDNVPSEEVVKKMKNYWRQLLNAKLITQRKFDNLTKAERGGLSELDKAGFIKRQLVETRQITKHVAQILDSRMNTKYDENDKLIREVKVITLKSKLVSDFRKDFQFYKVREINNYHHAHDAYLNAVVGTALIKKYPKLESEFVYGDYKVYDVRKMIAKSEQEIGKATAKYFFYSNIMNFFKTEITLANGEIRKRPLIETNGETGEIVWDKGRDFATVRKVLSMPQVNIVKKTEVQTGGFSKESILPKRNSDKLIARKKDWDPKKYGGFDSPTVAYSVLVVAKVEKGKSKKLKSVKELLGITIMERSSFEKNPIDFLEAKGYKEVKKDLIIKLPKYSLFELENGRKRMLASAGELQKGNELALPSKYVNFLYLASHYEKLKGSPEDNEQKQLFVEQHKHYLDEIIEQISEFSKRVILADANLDKVLSAYNKHRDKPIREQAENIIHLFTLTNLGAPAAFKYFDTTIDRKRYTSTKEVLDATLIHQSITGLYETRIDLSQLGGDGGGGSEAAAKPAPGGTLNIEDEHRLHETSKEPDVSLGSTWLSDFPQAWAETGGMGLAVRQAPLIIPLKATSTPVSIKQYPMSQEARLGIKPHIQRLLDQGILVPCQSPWNTPLLPVKKPGTNDYRPVQDLREVNKRVEDIHPTVPNPYNLLSGLPPSHQWYTVLDLKDAFFCLRLHPTSQPLFAFEWRDPEMGISGQLTWTRLPQGFKNSPTLFNEALHRDLADFRIQHPDLILLQYVDDLLLAATSELDCQQGTRALLQTLGNLGYRASAKKAQICQKQVKYLGYLLKEGQRWLTEARKETVMGQPTPKTPRQLREFLGTAGFCRLWIPGFAEMAAPLYPLTKPGTLFNWGPDQQKAYQEIKQALLTAPALGLPDLTKPFELFVDEKQGYAKGVLTQKLGPWRRPVAYLSKKLDPVAAGWPPCLRMVAAIAVLTKDAGKLTMGQPLVILAPHAVEALVKQPPDRWLSNARMTHYQALLLDTDRVQFGPVVALNPATLLPLPEEGLQHNCLDILAEAHGTRPDLTDQPLPDADHTWYTDGSSLLQEGQRKAGAAVTTETEVIWAKALPAGTSAQRAELIALTQALKMAEGKKLNVYTDSRYAFATAHIHGEIYRRRGWLTSEGKEIKNKDEILALLKALFLPKRLSIIHCPGHQKGHSAEARGNRMADQAARKAAITETPDTSTLLAGKRTADGSEFEKRTADGSEFESPKKKAKVE

SEQ ID NO: 2745 - protein, 2096 aa, synthetic construct
MPAAKRVKLDGGDKKYSIGLDIGTNSVGWAVITDEYKVPSKKFKVLGNTDRHSIKKNLIGALLFDSGETAEATRLKRTARRRYTRRKNRICYLQEIFSNEMAKVDDSFFHRLEESFLVEEDKKHERHPIFGNIVDEVAYHEKYPTIYHLRKKLVDSTDKADLRLIYLALAHMIKFRGHFLIEGDLNPDNSDVDKLFIQLVQTYNQLFEENPINASGVDAKAILSARLSKSRRLENLIAQLPGEKKNGLFGNLIALSLGLTPNFKSNFDLAEDAKLQLSKDTYDDDLDNLLAQIGDQYADLFLAAKNLSDAILLSDILRVNTEITKAPLSASMIKRYDEHHQDLTLLKALVRQQLPEKYKEIFFDQSKNGYAGYIDGGASQEEFYKFIKPILEKMDGTEELLVKLNREDLLRKQRTFDNGSIPHQIHLGELHAILRRQEDFYPFLKDNREKIEKILTFRIPYYVGPLARGNSRFAWMTRKSEETITPWNFEEVVDKGASAQSFIERMTNFDKNLPNEKVLPKHSLLYEYFTVYNELTKVKYVTEGMRKPAFLSGEQKKAIVDLLFKTNRKVTVKQLKEDYFKKIECFDSVEISGVEDRFNASLGTYHDLLKIIKDKDFLDNEENEDILEDIVLTLTLFEDREMIEERLKTYAHLFDDKVMKQLKRRRYTGWGRLSRKLINGIRDKQSGKTILDFLKSDGFANRNFMQLIHDDSLTFKEDIQKAQVSGQGDSLHEHIANLAGSPAIKKGILQTVKVVDELVKVMGRHKPENIVIEMARENQTTQKGQKNSRERMKRIEEGIKELGSQILKEHPVENTQLQNEKLYLYYLQNGRDMYVDQELDINRLSDYDVDHIVPQSFLKDDSIDNKVLTRSDKARGKSDNVPSEEVVKKMKNYWRQLLNAKLITQRKFDNLTKAERGGLSELDKAGFIKRQLVETRQITKHVAQILDSRMNTKYDENDKLIREVKVITLKSKLVSDFRKDFQFYKVREINNYHHAHDAYLNAVVGTALIKKYPKLESEFVYGDYKVYDVRKMIAKSEQEIGKATAKYFFYSNIMNFFKTEITLANGEIRKRPLIETNGETGEIVWDKGRDFATVRKVLSMPQVNIVKKTEVQTGGFSKESILPKRNSDKLIARKKDWDPKKYGGFDSPTVAYSVLVVAKVEKGKSKKLKSVKELLGITIMERSSFEKNPIDFLEAKGYKEVKKDLIIKLPKYSLFELENGRKRMLASAGELQKGNELALPSKYVNFLYLASHYEKLKGSPEDNEQKQLFVEQHKHYLDEIIEQISEFSKRVILADANLDKVLSAYNKHRDKPIREQAENIIHLFTLTNLGAPAAFKYFDTTIDRKRYTSTKEVLDATLIHQSITGLYETRIDLSQLGGDGGEAAAKGGGGGSGGTLNIEDEHRLHETSKEPDVSLGSTWLSDFPQAWAETGGMGLAVRQAPLIIPLKATSTPVSIKQYPMSQEARLGIKPHIQRLLDQGILVPCQSPWNTPLLPVKKPGTNDYRPVQDLREVNKRVEDIHPTVPNPYNLLSGLPPSHQWYTVLDLKDAFFCLRLHPTSQPLFAFEWRDPEMGISGQLTWTRLPQGFKNSPTLFNEALHRDLADFRIQHPDLILLQYVDDLLLAATSELDCQQGTRALLQTLGNLGYRASAKKAQICQKQVKYLGYLLKEGQRWLTEARKETVMGQPTPKTPRQLREFLGTAGFCRLWIPGFAEMAAPLYPLTKPGTLFNWGPDQQKAYQEIKQALLTAPALGLPDLTKPFELFVDEKQGYAKGVLTQKLGPWRRPVAYLSKKLDPVAAGWPPCLRMVAAIAVLTKDAGKLTMGQPLVILAPHAVEALVKQPPDRWLSNARMTHYQALLLDTDRVQFGPVVALNPATLLPLPEEGLQHNCLDILAEAHGTRPDLTDQPLPDADHTWYTDGSSLLQEGQRKAGAAVTTETEVIWAKALPAGTSAQRAELIALTQALKMAEGKKLNVYTDSRYAFATAHIHGEIYRRRGWLTSEGKEIKNKDEILALLKALFLPKRLSIIHCPGHQKGHSAEARGNRMADQAARKAAITETPDTSTLLAGKRTADGSEFEKRTADGSEFESPKKKAKVE

SEQ ID NO: 2746 - protein, 2093 aa, synthetic construct
MPAAKRVKLDGGDKKYSIGLDIGTNSVGWAVITDEYKVPSKKFKVLGNTDRHSIKKNLIGALLFDSGETAEATRLKRTARRRYTRRKNRICYLQEIFSNEMAKVDDSFFHRLEESFLVEEDKKHERHPIFGNIVDEVAYHEKYPTIYHLRKKLVDSTDKADLRLIYLALAHMIKFRGHFLIEGDLNPDNSDVDKLFIQLVQTYNQLFEENPINASGVDAKAILSARLSKSRRLENLIAQLPGEKKNGLFGNLIALSLGLTPNFKSNFDLAEDAKLQLSKDTYDDDLDNLLAQIGDQYADLFLAAKNLSDAILLSDILRVNTEITKAPLSASMIKRYDEHHQDLTLLKALVRQQLPEKYKEIFFDQSKNGYAGYIDGGASQEEFYKFIKPILEKMDGTEELLVKLNREDLLRKQRTFDNGSIPHQIHLGELHAILRRQEDFYPFLKDNREKIEKILTFRIPYYVGPLARGNSRFAWMTRKSEETITPWNFEEVVDKGASAQSFIERMTNFDKNLPNEKVLPKHSLLYEYFTVYNELTKVKYVTEGMRKPAFLSGEQKKAIVDLLFKTNRKVTVKQLKEDYFKKIECFDSVEISGVEDRFNASLGTYHDLLKIIKDKDFLDNEENEDILEDIVLTLTLFEDREMIEERLKTYAHLFDDKVMKQLKRRRYTGWGRLSRKLINGIRDKQSGKTILDFLKSDGFANRNFMQLIHDDSLTFKEDIQKAQVSGQGDSLHEHIANLAGSPAIKKGILQTVKVVDELVKVMGRHKPENIVIEMARENQTTQKGQKNSRERMKRIEEGIKELGSQILKEHPVENTQLQNEKLYLYYLQNGRDMYVDQELDINRLSDYDVDHIVPQSFLKDDSIDNKVLTRSDKARGKSDNVPSEEVVKKMKNYWRQLLNAKLITQRKFDNLTKAERGGLSELDKAGFIKRQLVETRQITKHVAQILDSRMNTKYDENDKLIREVKVITLKSKLVSDFRKDFQFYKVREINNYHHAHDAYLNAVVGTALIKKYPKLESEFVYGDYKVYDVRKMIAKSEQEIGKATAKYFFYSNIMNFFKTEITLANGEIRKRPLIETNGETGEIVWDKGRDFATVRKVLSMPQVNIVKKTEVQTGGFSKESILPKRNSDKLIARKKDWDPKKYGGFDSPTVAYSVLVVAKVEKGKSKKLKSVKELLGITIMERSSFEKNPIDFLEAKGYKEVKKDLIIKLPKYSLFELENGRKRMLASAGELQKGNELALPSKYVNFLYLASHYEKLKGSPEDNEQKQLFVEQHKHYLDEIIEQISEFSKRVILADANLDKVLSAYNKHRDKPIREQAENIIHLFTLTNLGAPAAFKYFDTTIDRKRYTSTKEVLDATLIHQSITGLYETRIDLSQLGGDGGGGGEAAAKGGTLNIEDEHRLHETSKEPDVSLGSTWLSDFPQAWAETGGMGLAVRQAPLIIPLKATSTPVSIKQYPMSQEARLGIKPHIQRLLDQGILVPCQSPWNTPLLPVKKPGTNDYRPVQDLREVNKRVEDIHPTVPNPYNLLSGLPPSHQWYTVLDLKDAFFCLRLHPTSQPLFAFEWRDPEMGISGQLTWTRLPQGFKNSPTLFNEALHRDLADFRIQHPDLILLQYVDDLLLAATSELDCQQGTRALLQTLGNLGYRASAKKAQICQKQVKYLGYLLKEGQRWLTEARKETVMGQPTPKTPRQLREFLGTAGFCRLWIPGFAEMAAPLYPLTKPGTLFNWGPDQQKAYQEIKQALLTAPALGLPDLTKPFELFVDEKQGYAKGVLTQKLGPWRRPVAYLSKKLDPVAAGWPPCLRMVAAIAVLTKDAGKLTMGQPLVILAPHAVEALVKQPPDRWLSNARMTHYQALLLDTDRVQFGPVVALNPATLLPLPEEGLQHNCLDILAEAHGTRPDLTDQPLPDADHTWYTDGSSLLQEGQRKAGAAVTTETEVIWAKALPAGTSAQRAELIALTQALKMAEGKKLNVYTDSRYAFATAHIHGEIYRRRGWLTSEGKEIKNKDEILALLKALFLPKRLSIIHCPGHQKGHSAEARGNRMADQAARKAAITETPDTSTLLAGKRTADGSEFEKRTADGSEFESPKKKAKVE

SEQ ID NO: 2747 - protein, 2096 aa, synthetic construct
MPAAKRVKLDGGDKKYSIGLDIGTNSVGWAVITDEYKVPSKKFKVLGNTDRHSIKKNLIGALLFDSGETAEATRLKRTARRRYTRRKNRICYLQEIFSNEMAKVDDSFFHRLEESFLVEEDKKHERHPIFGNIVDEVAYHEKYPTIYHLRKKLVDSTDKADLRLIYLALAHMIKFRGHFLIEGDLNPDNSDVDKLFIQLVQTYNQLFEENPINASGVDAKAILSARLSKSRRLENLIAQLPGEKKNGLFGNLIALSLGLTPNFKSNFDLAEDAKLQLSKDTYDDDLDNLLAQIGDQYADLFLAAKNLSDAILLSDILRVNTEITKAPLSASMIKRYDEHHQDLTLLKALVRQQLPEKYKEIFFDQSKNGYAGYIDGGASQEEFYKFIKPILEKMDGTEELLVKLNREDLLRKQRTFDNGSIPHQIHLGELHAILRRQEDFYPFLKDNREKIEKILTFRIPYYVGPLARGNSRFAWMTRKSEETITPWNFEEVVDKGASAQSFIERMTNFDKNLPNEKVLPKHSLLYEYFTVYNELTKVKYVTEGMRKPAFLSGEQKKAIVDLLFKTNRKVTVKQLKEDYFKKIECFDSVEISGVEDRFNASLGTYHDLLKIIKDKDFLDNEENEDILEDIVLTLTLFEDREMIEERLKTYAHLFDDKVMKQLKRRRYTGWGRLSRKLINGIRDKQSGKTILDFLKSDGFANRNFMQLIHDDSLTFKEDIQKAQVSGQGDSLHEHIANLAGSPAIKKGILQTVKVVDELVKVMGRHKPENIVIEMARENQTTQKGQKNSRERMKRIEEGIKELGSQILKEHPVENTQLQNEKLYLYYLQNGRDMYVDQELDINRLSDYDVDHIVPQSFLKDDSIDNKVLTRSDKARGKSDNVPSEEVVKKMKNYWRQLLNAKLITQRKFDNLTKAERGGLSELDKAGFIKRQLVETRQITKHVAQILDSRMNTKYDENDKLIREVKVITLKSKLVSDFRKDFQFYKVREINNYHHAHDAYLNAVVGTALIKKYPKLESEFVYGDYKVYDVRKMIAKSEQEIGKATAKYFFYSNIMNFFKTEITLANGEIRKRPLIETNGETGEIVWDKGRDFATVRKVLSMPQVNIVKKTEVQTGGFSKESILPKRNSDKLIARKKDWDPKKYGGFDSPTVAYSVLVVAKVEKGKSKKLKSVKELLGITIMERSSFEKNPIDFLEAKGYKEVKKDLIIKLPKYSLFELENGRKRMLASAGELQKGNELALPSKYVNFLYLASHYEKLKGSPEDNEQKQLFVEQHKHYLDEIIEQISEFSKRVILADANLDKVLSAYNKHRDKPIREQAENIIHLFTLTNLGAPAAFKYFDTTIDRKRYTSTKEVLDATLIHQSITGLYETRIDLSQLGGDGGGGSGSSEAAAKGGTLNIEDEHRLHETSKEPDVSLGSTWLSDFPQAWAETGGMGLAVRQAPLIIPLKATSTPVSIKQYPMSQEARLGIKPHIQRLLDQGILVPCQSPWNTPLLPVKKPGTNDYRPVQDLREVNKRVEDIHPTVPNPYNLLSGLPPSHQWYTVLDLKDAFFCLRLHPTSQPLFAFEWRDPEMGISGQLTWTRLPQGFKNSPTLFNEALHRDLADFRIQHPDLILLQYVDDLLLAATSELDCQQGTRALLQTLGNLGYRASAKKAQICQKQVKYLGYLLKEGQRWLTEARKETVMGQPTPKTPRQLREFLGTAGFCRLWIPGFAEMAAPLYPLTKPGTLFNWGPDQQKAYQEIKQALLTAPALGLPDLTKPFELFVDEKQGYAKGVLTQKLGPWRRPVAYLSKKLDPVAAGWPPCLRMVAAIAVLTKDAGKLTMGQPLVILAPHAVEALVKQPPDRWLSNARMTHYQALLLDTDRVQFGPVVALNPATLLPLPEEGLQHNCLDILAEAHGTRPDLTDQPLPDADHTWYTDGSSLLQEGQRKAGAAVTTETEVIWAKALPAGTSAQRAELIALTQALKMAEGKKLNVYTDSRYAFATAHIHGEIYRRRGWLTSEGKEIKNKDEILALLKALFLPKRLSIIHCPGHQKGHSAEARGNRMADQAARKAAITETPDTSTLLAGKRTADGSEFEKRTADGSEFESPKKKAKVE

SEQ ID NO: 2748 - protein, 2096 aa, synthetic construct
MPAAKRVKLDGGDKKYSIGLDIGTNSVGWAVITDEYKVPSKKFKVLGNTDRHSIKKNLIGALLFDSGETAEATRLKRTARRRYTRRKNRICYLQEIFSNEMAKVDDSFFHRLEESFLVEEDKKHERHPIFGNIVDEVAYHEKYPTIYHLRKKLVDSTDKADLRLIYLALAHMIKFRGHFLIEGDLNPDNSDVDKLFIQLVQTYNQLFEENPINASGVDAKAILSARLSKSRRLENLIAQLPGEKKNGLFGNLIALSLGLTPNFKSNFDLAEDAKLQLSKDTYDDDLDNLLAQIGDQYADLFLAAKNLSDAILLSDILRVNTEITKAPLSASMIKRYDEHHQDLTLLKALVRQQLPEKYKEIFFDQSKNGYAGYIDGGASQEEFYKFIKPILEKMDGTEELLVKLNREDLLRKQRTFDNGSIPHQIHLGELHAILRRQEDFYPFLKDNREKIEKILTFRIPYYVGPLARGNSRFAWMTRKSEETITPWNFEEVVDKGASAQSFIERMTNFDKNLPNEKVLPKHSLLYEYFTVYNELTKVKYVTEGMRKPAFLSGEQKKAIVDLLFKTNRKVTVKQLKEDYFKKIECFDSVEISGVEDRFNASLGTYHDLLKIIKDKDFLDNEENEDILEDIVLTLTLFEDREMIEERLKTYAHLFDDKVMKQLKRRRYTGWGRLSRKLINGIRDKQSGKTILDFLKSDGFANRNFMQLIHDDSLTFKEDIQKAQVSGQGDSLHEHIANLAGSPAIKKGILQTVKVVDELVKVMGRHKPENIVIEMARENQTTQKGQKNSRERMKRIEEGIKELGSQILKEHPVENTQLQNEKLYLYYLQNGRDMYVDQELDINRLSDYDVDHIVPQSFLKDDSIDNKVLTRSDKARGKSDNVPSEEVVKKMKNYWRQLLNAKLITQRKFDNLTKAERGGLSELDKAGFIKRQLVETRQITKHVAQILDSRMNTKYDENDKLIREVKVITLKSKLVSDFRKDFQFYKVREINNYHHAHDAYLNAVVGTALIKKYPKLESEFVYGDYKVYDVRKMIAKSEQEIGKATAKYFFYSNIMNFFKTEITLANGEIRKRPLIETNGETGEIVWDKGRDFATVRKVLSMPQVNIVKKTEVQTGGFSKESILPKRNSDKLIARKKDWDPKKYGGFDSPTVAYSVLVVAKVEKGKSKKLKSVKELLGITIMERSSFEKNPIDFLEAKGYKEVKKDLIIKLPKYSLFELENGRKRMLASAGELQKGNELALPSKYVNFLYLASHYEKLKGSPEDNEQKQLFVEQHKHYLDEIIEQISEFSKRVILADANLDKVLSAYNKHRDKPIREQAENIIHLFTLTNLGAPAAFKYFDTTIDRKRYTSTKEVLDATLIHQSITGLYETRIDLSQLGGDGGPAPGSSEAAAKGGTLNIEDEHRLHETSKEPDVSLGSTWLSDFPQAWAETGGMGLAVRQAPLIIPLKATSTPVSIKQYPMSQEARLGIKPHIQRLLDQGILVPCQSPWNTPLLPVKKPGTNDYRPVQDLREVNKRVEDIHPTVPNPYNLLSGLPPSHQWYTVLDLKDAFFCLRLHPTSQPLFAFEWRDPEMGISGQLTWTRLPQGFKNSPTLFNEALHRDLADFRIQHPDLILLQYVDDLLLAATSELDCQQGTRALLQTLGNLGYRASAKKAQICQKQVKYLGYLLKEGQRWLTEARKETVMGQPTPKTPRQLREFLGTAGFCRLWIPGFAEMAAPLYPLTKPGTLFNWGPDQQKAYQEIKQALLTAPALGLPDLTKPFELFVDEKQGYAKGVLTQKLGPWRRPVAYLSKKLDPVAAGWPPCLRMVAAIAVLTKDAGKLTMGQPLVILAPHAVEALVKQPPDRWLSNARMTHYQALLLDTDRVQFGPVVALNPATLLPLPEEGLQHNCLDILAEAHGTRPDLTDQPLPDADHTWYTDGSSLLQEGQRKAGAAVTTETEVIWAKALPAGTSAQRAELIALTQALKMAEGKKLNVYTDSRYAFATAHIHGEIYRRRGWLTSEGKEIKNKDEILALLKALFLPKRLSIIHCPGHQKGHSAEARGNRMADQAARKAAITETPDTSTLLAGKRTADGSEFEKRTADGSEFESPKKKAKVE

SEQ ID NO: 2749 - protein, 2095 aa, synthetic construct
MPAAKRVKLDGGDKKYSIGLDIGTNSVGWAVITDEYKVPSKKFKVLGNTDRHSIKKNLIGALLFDSGETAEATRLKRTARRRYTRRKNRICYLQEIFSNEMAKVDDSFFHRLEESFLVEEDKKHERHPIFGNIVDEVAYHEKYPTIYHLRKKLVDSTDKADLRLIYLALAHMIKFRGHFLIEGDLNPDNSDVDKLFIQLVQTYNQLFEENPINASGVDAKAILSARLSKSRRLENLIAQLPGEKKNGLFGNLIALSLGLTPNFKSNFDLAEDAKLQLSKDTYDDDLDNLLAQIGDQYADLFLAAKNLSDAILLSDILRVNTEITKAPLSASMIKRYDEHHQDLTLLKALVRQQLPEKYKEIFFDQSKNGYAGYIDGGASQEEFYKFIKPILEKMDGTEELLVKLNREDLLRKQRTFDNGSIPHQIHLGELHAILRRQEDFYPFLKDNREKIEKILTFRIPYYVGPLARGNSRFAWMTRKSEETITPWNFEEVVDKGASAQSFIERMTNFDKNLPNEKVLPKHSLLYEYFTVYNELTKVKYVTEGMRKPAFLSGEQKKAIVDLLFKTNRKVTVKQLKEDYFKKIECFDSVEISGVEDRFNASLGTYHDLLKIIKDKDFLDNEENEDILEDIVLTLTLFEDREMIEERLKTYAHLFDDKVMKQLKRRRYTGWGRLSRKLINGIRDKQSGKTILDFLKSDGFANRNFMQLIHDDSLTFKEDIQKAQVSGQGDSLHEHIANLAGSPAIKKGILQTVKVVDELVKVMGRHKPENIVIEMARENQTTQKGQKNSRERMKRIEEGIKELGSQILKEHPVENTQLQNEKLYLYYLQNGRDMYVDQELDINRLSDYDVDHIVPQSFLKDDSIDNKVLTRSDKARGKSDNVPSEEVVKKMKNYWRQLLNAKLITQRKFDNLTKAERGGLSELDKAGFIKRQLVETRQITKHVAQILDSRMNTKYDENDKLIREVKVITLKSKLVSDFRKDFQFYKVREINNYHHAHDAYLNAVVGTALIKKYPKLESEFVYGDYKVYDVRKMIAKSEQEIGKATAKYFFYSNIMNFFKTEITLANGEIRKRPLIETNGETGEIVWDKGRDFATVRKVLSMPQVNIVKKTEVQTGGFSKESILPKRNSDKLIARKKDWDPKKYGGFDSPTVAYSVLVVAKVEKGKSKKLKSVKELLGITIMERSSFEKNPIDFLEAKGYKEVKKDLIIKLPKYSLFELENGRKRMLASAGELQKGNELALPSKYVNFLYLASHYEKLKGSPEDNEQKQLFVEQHKHYLDEIIEQISEFSKRVILADANLDKVLSAYNKHRDKPIREQAENIIHLFTLTNLGAPAAFKYFDTTIDRKRYTSTKEVLDATLIHQSITGLYETRIDLSQLGGDGGGGGGSGGGGSGGTLNIEDEHRLHETSKEPDVSLGSTWLSDFPQAWAETGGMGLAVRQAPLIIPLKATSTPVSIKQYPMSQEARLGIKPHIQRLLDQGILVPCQSPWNTPLLPVKKPGTNDYRPVQDLREVNKRVEDIHPTVPNPYNLLSGLPPSHQWYTVLDLKDAFFCLRLHPTSQPLFAFEWRDPEMGISGQLTWTRLPQGFKNSPTLFNEALHRDLADFRIQHPDLILLQYVDDLLLAATSELDCQQGTRALLQTLGNLGYRASAKKAQICQKQVKYLGYLLKEGQRWLTEARKETVMGQPTPKTPRQLREFLGTAGFCRLWIPGFAEMAAPLYPLTKPGTLFNWGPDQQKAYQEIKQALLTAPALGLPDLTKPFELFVDEKQGYAKGVLTQKLGPWRRPVAYLSKKLDPVAAGWPPCLRMVAAIAVLTKDAGKLTMGQPLVILAPHAVEALVKQPPDRWLSNARMTHYQALLLDTDRVQFGPVVALNPATLLPLPEEGLQHNCLDILAEAHGTRPDLTDQPLPDADHTWYTDGSSLLQEGQRKAGAAVTTETEVIWAKALPAGTSAQRAELIALTQALKMAEGKKLNVYTDSRYAFATAHIHGEIYRRRGWLTSEGKEIKNKDEILALLKALFLPKRLSIIHCPGHQKGHSAEARGNRMADQAARKAAITETPDTSTLLAGKRTADGSEFEKRTADGSEFESPKKKAKVE

SEQ ID NO: 2750 - protein, 2091 aa, synthetic construct
MPAAKRVKLDGGDKKYSIGLDIGTNSVGWAVITDEYKVPSKKFKVLGNTDRHSIKKNLIGALLFDSGETAEATRLKRTARRRYTRRKNRICYLQEIFSNEMAKVDDSFFHRLEESFLVEEDKKHERHPIFGNIVDEVAYHEKYPTIYHLRKKLVDSTDKADLRLIYLALAHMIKFRGHFLIEGDLNPDNSDVDKLFIQLVQTYNQLFEENPINASGVDAKAILSARLSKSRRLENLIAQLPGEKKNGLFGNLIALSLGLTPNFKSNFDLAEDAKLQLSKDTYDDDLDNLLAQIGDQYADLFLAAKNLSDAILLSDILRVNTEITKAPLSASMIKRYDEHHQDLTLLKALVRQQLPEKYKEIFFDQSKNGYAGYIDGGASQEEFYKFIKPILEKMDGTEELLVKLNREDLLRKQRTFDNGSIPHQIHLGELHAILRRQEDFYPFLKDNREKIEKILTFRIPYYVGPLARGNSRFAWMTRKSEETITPWNFEEVVDKGASAQSFIERMTNFDKNLPNEKVLPKHSLLYEYFTVYNELTKVKYVTEGMRKPAFLSGEQKKAIVDLLFKTNRKVTVKQLKEDYFKKIECFDSVEISGVEDRFNASLGTYHDLLKIIKDKDFLDNEENEDILEDIVLTLTLFEDREMIEERLKTYAHLFDDKVMKQLKRRRYTGWGRLSRKLINGIRDKQSGKTILDFLKSDGFANRNFMQLIHDDSLTFKEDIQKAQVSGQGDSLHEHIANLAGSPAIKKGILQTVKVVDELVKVMGRHKPENIVIEMARENQTTQKGQKNSRERMKRIEEGIKELGSQILKEHPVENTQLQNEKLYLYYLQNGRDMYVDQELDINRLSDYDVDHIVPQSFLKDDSIDNKVLTRSDKARGKSDNVPSEEVVKKMKNYWRQLLNAKLITQRKFDNLTKAERGGLSELDKAGFIKRQLVETRQITKHVAQILDSRMNTKYDENDKLIREVKVITLKSKLVSDFRKDFQFYKVREINNYHHAHDAYLNAVVGTALIKKYPKLESEFVYGDYKVYDVRKMIAKSEQEIGKATAKYFFYSNIMNFFKTEITLANGEIRKRPLIETNGETGEIVWDKGRDFATVRKVLSMPQVNIVKKTEVQTGGFSKESILPKRNSDKLIARKKDWDPKKYGGFDSPTVAYSVLVVAKVEKGKSKKLKSVKELLGITIMERSSFEKNPIDFLEAKGYKEVKKDLIIKLPKYSLFELENGRKRMLASAGELQKGNELALPSKYVNFLYLASHYEKLKGSPEDNEQKQLFVEQHKHYLDEIIEQISEFSKRVILADANLDKVLSAYNKHRDKPIREQAENIIHLFTLTNLGAPAAFKYFDTTIDRKRYTSTKEVLDATLIHQSITGLYETRIDLSQLGGDGGGSSPAPGGTLNIEDEHRLHETSKEPDVSLGSTWLSDFPQAWAETGGMGLAVRQAPLIIPLKATSTPVSIKQYPMSQEARLGIKPHIQRLLDQGILVPCQSPWNTPLLPVKKPGTNDYRPVQDLREVNKRVEDIHPTVPNPYNLLSGLPPSHQWYTVLDLKDAFFCLRLHPTSQPLFAFEWRDPEMGISGQLTWTRLPQGFKNSPTLFNEALHRDLADFRIQHPDLILLQYVDDLLLAATSELDCQQGTRALLQTLGNLGYRASAKKAQICQKQVKYLGYLLKEGQRWLTEARKETVMGQPTPKTPRQLREFLGTAGFCRLWIPGFAEMAAPLYPLTKPGTLFNWGPDQQKAYQEIKQALLTAPALGLPDLTKPFELFVDEKQGYAKGVLTQKLGPWRRPVAYLSKKLDPVAAGWPPCLRMVAAIAVLTKDAGKLTMGQPLVILAPHAVEALVKQPPDRWLSNARMTHYQALLLDTDRVQFGPVVALNPATLLPLPEEGLQHNCLDILAEAHGTRPDLTDQPLPDADHTWYTDGSSLLQEGQRKAGAAVTTETEVIWAKALPAGTSAQRAELIALTQALKMAEGKKLNVYTDSRYAFATAHIHGEIYRRRGWLTSEGKEIKNKDEILALLKALFLPKRLSIIHCPGHQKGHSAEARGNRMADQAARKAAITETPDTSTLLAGKRTADGSEFEKRTADGSEFESPKKKAKVE

SEQ ID NO: 2751 - protein, 2096 aa, synthetic construct
MPAAKRVKLDGGDKKYSIGLDIGTNSVGWAVITDEYKVPSKKFKVLGNTDRHSIKKNLIGALLFDSGETAEATRLKRTARRRYTRRKNRICYLQEIFSNEMAKVDDSFFHRLEESFLVEEDKKHERHPIFGNIVDEVAYHEKYPTIYHLRKKLVDSTDKADLRLIYLALAHMIKFRGHFLIEGDLNPDNSDVDKLFIQLVQTYNQLFEENPINASGVDAKAILSARLSKSRRLENLIAQLPGEKKNGLFGNLIALSLGLTPNFKSNFDLAEDAKLQLSKDTYDDDLDNLLAQIGDQYADLFLAAKNLSDAILLSDILRVNTEITKAPLSASMIKRYDEHHQDLTLLKALVRQQLPEKYKEIFFDQSKNGYAGYIDGGASQEEFYKFIKPILEKMDGTEELLVKLNREDLLRKQRTFDNGSIPHQIHLGELHAILRRQEDFYPFLKDNREKIEKILTFRIPYYVGPLARGNSRFAWMTRKSEETITPWNFEEVVDKGASAQSFIERMTNFDKNLPNEKVLPKHSLLYEYFTVYNELTKVKYVTEGMRKPAFLSGEQKKAIVDLLFKTNRKVTVKQLKEDYFKKIECFDSVEISGVEDRFNASLGTYHDLLKIIKDKDFLDNEENEDILEDIVLTLTLFEDREMIEERLKTYAHLFDDKVMKQLKRRRYTGWGRLSRKLINGIRDKQSGKTILDFLKSDGFANRNFMQLIHDDSLTFKEDIQKAQVSGQGDSLHEHIANLAGSPAIKKGILQTVKVVDELVKVMGRHKPENIVIEMARENQTTQKGQKNSRERMKRIEEGIKELGSQILKEHPVENTQLQNEKLYLYYLQNGRDMYVDQELDINRLSDYDVDHIVPQSFLKDDSIDNKVLTRSDKARGKSDNVPSEEVVKKMKNYWRQLLNAKLITQRKFDNLTKAERGGLSELDKAGFIKRQLVETRQITKHVAQILDSRMNTKYDENDKLIREVKVITLKSKLVSDFRKDFQFYKVREINNYHHAHDAYLNAVVGTALIKKYPKLESEFVYGDYKVYDVRKMIAKSEQEIGKATAKYFFYSNIMNFFKTEITLANGEIRKRPLIETNGETGEIVWDKGRDFATVRKVLSMPQVNIVKKTEVQTGGFSKESILPKRNSDKLIARKKDWDPKKYGGFDSPTVAYSVLVVAKVEKGKSKKLKSVKELLGITIMERSSFEKNPIDFLEAKGYKEVKKDLIIKLPKYSLFELENGRKRMLASAGELQKGNELALPSKYVNFLYLASHYEKLKGSPEDNEQKQLFVEQHKHYLDEIIEQISEFSKRVILADANLDKVLSAYNKHRDKPIREQAENIIHLFTLTNLGAPAAFKYFDTTIDRKRYTSTKEVLDATLIHQSITGLYETRIDLSQLGGDGGGGSGGGEAAAKGGTLNIEDEHRLHETSKEPDVSLGSTWLSDFPQAWAETGGMGLAVRQAPLIIPLKATSTPVSIKQYPMSQEARLGIKPHIQRLLDQGILVPCQSPWNTPLLPVKKPGTNDYRPVQDLREVNKRVEDIHPTVPNPYNLLSGLPPSHQWYTVLDLKDAFFCLRLHPTSQPLFAFEWRDPEMGISGQLTWTRLPQGFKNSPTLFNEALHRDLADFRIQHPDLILLQYVDDLLLAATSELDCQQGTRALLQTLGNLGYRASAKKAQICQKQVKYLGYLLKEGQRWLTEARKETVMGQPTPKTPRQLREFLGTAGFCRLWIPGFAEMAAPLYPLTKPGTLFNWGPDQQKAYQEIKQALLTAPALGLPDLTKPFELFVDEKQGYAKGVLTQKLGPWRRPVAYLSKKLDPVAAGWPPCLRMVAAIAVLTKDAGKLTMGQPLVILAPHAVEALVKQPPDRWLSNARMTHYQALLLDTDRVQFGPVVALNPATLLPLPEEGLQHNCLDILAEAHGTRPDLTDQPLPDADHTWYTDGSSLLQEGQRKAGAAVTTETEVIWAKALPAGTSAQRAELIALTQALKMAEGKKLNVYTDSRYAFATAHIHGEIYRRRGWLTSEGKEIKNKDEILALLKALFLPKRLSIIHCPGHQKGHSAEARGNRMADQAARKAAITETPDTSTLLAGKRTADGSEFEKRTADGSEFESPKKKAKVE

SEQ ID NO: 2752 - protein, 2094 aa, synthetic construct
MPAAKRVKLDGGDKKYSIGLDIGTNSVGWAVITDEYKVPSKKFKVLGNTDRHSIKKNLIGALLFDSGETAEATRLKRTARRRYTRRKNRICYLQEIFSNEMAKVDDSFFHRLEESFLVEEDKKHERHPIFGNIVDEVAYHEKYPTIYHLRKKLVDSTDKADLRLIYLALAHMIKFRGHFLIEGDLNPDNSDVDKLFIQLVQTYNQLFEENPINASGVDAKAILSARLSKSRRLENLIAQLPGEKKNGLFGNLIALSLGLTPNFKSNFDLAEDAKLQLSKDTYDDDLDNLLAQIGDQYADLFLAAKNLSDAILLSDILRVNTEITKAPLSASMIKRYDEHHQDLTLLKALVRQQLPEKYKEIFFDQSKNGYAGYIDGGASQEEFYKFIKPILEKMDGTEELLVKLNREDLLRKQRTFDNGSIPHQIHLGELHAILRRQEDFYPFLKDNREKIEKILTFRIPYYVGPLARGNSRFAWMTRKSEETITPWNFEEVVDKGASAQSFIERMTNFDKNLPNEKVLPKHSLLYEYFTVYNELTKVKYVTEGMRKPAFLSGEQKKAIVDLLFKTNRKVTVKQLKEDYFKKIECFDSVEISGVEDRFNASLGTYHDLLKIIKDKDFLDNEENEDILEDIVLTLTLFEDREMIEERLKTYAHLFDDKVMKQLKRRRYTGWGRLSRKLINGIRDKQSGKTILDFLKSDGFANRNFMQLIHDDSLTFKEDIQKAQVSGQGDSLHEHIANLAGSPAIKKGILQTVKVVDELVKVMGRHKPENIVIEMARENQTTQKGQKNSRERMKRIEEGIKELGSQILKEHPVENTQLQNEKLYLYYLQNGRDMYVDQELDINRLSDYDVDHIVPQSFLKDDSIDNKVLTRSDKARGKSDNVPSEEVVKKMKNYWRQLLNAKLITQRKFDNLTKAERGGLSELDKAGFIKRQLVETRQITKHVAQILDSRMNTKYDENDKLIREVKVITLKSKLVSDFRKDFQFYKVREINNYHHAHDAYLNAVVGTALIKKYPKLESEFVYGDYKVYDVRKMIAKSEQEIGKATAKYFFYSNIMNFFKTEITLANGEIRKRPLIETNGETGEIVWDKGRDFATVRKVLSMPQVNIVKKTEVQTGGFSKESILPKRNSDKLIARKKDWDPKKYGGFDSPTVAYSVLVVAKVEKGKSKKLKSVKELLGITIMERSSFEKNPIDFLEAKGYKEVKKDLIIKLPKYSLFELENGRKRMLASAGELQKGNELALPSKYVNFLYLASHYEKLKGSPEDNEQKQLFVEQHKHYLDEIIEQISEFSKRVILADANLDKVLSAYNKHRDKPIREQAENIIHLFTLTNLGAPAAFKYFDTTIDRKRYTSTKEVLDATLIHQSITGLYETRIDLSQLGGDGGGGSPAPGSSGGTLNIEDEHRLHETSKEPDVSLGSTWLSDFPQAWAETGGMGLAVRQAPLIIPLKATSTPVSIKQYPMSQEARLGIKPHIQRLLDQGILVPCQSPWNTPLLPVKKPGTNDYRPVQDLREVNKRVEDIHPTVPNPYNLLSGLPPSHQWYTVLDLKDAFFCLRLHPTSQPLFAFEWRDPEMGISGQLTWTRLPQGFKNSPTLFNEALHRDLADFRIQHPDLILLQYVDDLLLAATSELDCQQGTRALLQTLGNLGYRASAKKAQICQKQVKYLGYLLKEGQRWLTEARKETVMGQPTPKTPRQLREFLGTAGFCRLWIPGFAEMAAPLYPLTKPGTLFNWGPDQQKAYQEIKQALLTAPALGLPDLTKPFELFVDEKQGYAKGVLTQKLGPWRRPVAYLSKKLDPVAAGWPPCLRMVAAIAVLTKDAGKLTMGQPLVILAPHAVEALVKQPPDRWLSNARMTHYQALLLDTDRVQFGPVVALNPATLLPLPEEGLQHNCLDILAEAHGTRPDLTDQPLPDADHTWYTDGSSLLQEGQRKAGAAVTTETEVIWAKALPAGTSAQRAELIALTQALKMAEGKKLNVYTDSRYAFATAHIHGEIYRRRGWLTSEGKEIKNKDEILALLKALFLPKRLSIIHCPGHQKGHSAEARGNRMADQAARKAAITETPDTSTLLAGKRTADGSEFEKRTADGSEFESPKKKAKVE

SEQ ID NO: 2753 - protein, 2096 aa, synthetic construct
MPAAKRVKLDGGDKKYSIGLDIGTNSVGWAVITDEYKVPSKKFKVLGNTDRHSIKKNLIGALLFDSGETAEATRLKRTARRRYTRRKNRICYLQEIFSNEMAKVDDSFFHRLEESFLVEEDKKHERHPIFGNIVDEVAYHEKYPTIYHLRKKLVDSTDKADLRLIYLALAHMIKFRGHFLIEGDLNPDNSDVDKLFIQLVQTYNQLFEENPINASGVDAKAILSARLSKSRRLENLIAQLPGEKKNGLFGNLIALSLGLTPNFKSNFDLAEDAKLQLSKDTYDDDLDNLLAQIGDQYADLFLAAKNLSDAILLSDILRVNTEITKAPLSASMIKRYDEHHQDLTLLKALVRQQLPEKYKEIFFDQSKNGYAGYIDGGASQEEFYKFIKPILEKMDGTEELLVKLNREDLLRKQRTFDNGSIPHQIHLGELHAILRRQEDFYPFLKDNREKIEKILTFRIPYYVGPLARGNSRFAWMTRKSEETITPWNFEEVVDKGASAQSFIERMTNFDKNLPNEKVLPKHSLLYEYFTVYNELTKVKYVTEGMRKPAFLSGEQKKAIVDLLFKTNRKVTVKQLKEDYFKKIECFDSVEISGVEDRFNASLGTYHDLLKIIKDKDFLDNEENEDILEDIVLTLTLFEDREMIEERLKTYAHLFDDKVMKQLKRRRYTGWGRLSRKLINGIRDKQSGKTILDFLKSDGFANRNFMQLIHDDSLTFKEDIQKAQVSGQGDSLHEHIANLAGSPAIKKGILQTVKVVDELVKVMGRHKPENIVIEMARENQTTQKGQKNSRERMKRIEEGIKELGSQILKEHPVENTQLQNEKLYLYYLQNGRDMYVDQELDINRLSDYDVDHIVPQSFLKDDSIDNKVLTRSDKARGKSDNVPSEEVVKKMKNYWRQLLNAKLITQRKFDNLTKAERGGLSELDKAGFIKRQLVETRQITKHVAQILDSRMNTKYDENDKLIREVKVITLKSKLVSDFRKDFQFYKVREINNYHHAHDAYLNAVVGTALIKKYPKLESEFVYGDYKVYDVRKMIAKSEQEIGKATAKYFFYSNIMNFFKTEITLANGEIRKRPLIETNGETGEIVWDKGRDFATVRKVLSMPQVNIVKKTEVQTGGFSKESILPKRNSDKLIARKKDWDPKKYGGFDSPTVAYSVLVVAKVEKGKSKKLKSVKELLGITIMERSSFEKNPIDFLEAKGYKEVKKDLIIKLPKYSLFELENGRKRMLASAGELQKGNELALPSKYVNFLYLASHYEKLKGSPEDNEQKQLFVEQHKHYLDEIIEQISEFSKRVILADANLDKVLSAYNKHRDKPIREQAENIIHLFTLTNLGAPAAFKYFDTTIDRKRYTSTKEVLDATLIHQSITGLYETRIDLSQLGGDGGPAPGGSEAAAKGGTLNIEDEHRLHETSKEPDVSLGSTWLSDFPQAWAETGGMGLAVRQAPLIIPLKATSTPVSIKQYPMSQEARLGIKPHIQRLLDQGILVPCQSPWNTPLLPVKKPGTNDYRPVQDLREVNKRVEDIHPTVPNPYNLLSGLPPSHQWYTVLDLKDAFFCLRLHPTSQPLFAFEWRDPEMGISGQLTWTRLPQGFKNSPTLFNEALHRDLADFRIQHPDLILLQYVDDLLLAATSELDCQQGTRALLQTLGNLGYRASAKKAQICQKQVKYLGYLLKEGQRWLTEARKETVMGQPTPKTPRQLREFLGTAGFCRLWIPGFAEMAAPLYPLTKPGTLFNWGPDQQKAYQEIKQALLTAPALGLPDLTKPFELFVDEKQGYAKGVLTQKLGPWRRPVAYLSKKLDPVAAGWPPCLRMVAAIAVLTKDAGKLTMGQPLVILAPHAVEALVKQPPDRWLSNARMTHYQALLLDTDRVQFGPVVALNPATLLPLPEEGLQHNCLDILAEAHGTRPDLTDQPLPDADHTWYTDGSSLLQEGQRKAGAAVTTETEVIWAKALPAGTSAQRAELIALTQALKMAEGKKLNVYTDSRYAFATAHIHGEIYRRRGWLTSEGKEIKNKDEILALLKALFLPKRLSIIHCPGHQKGHSAEARGNRMADQAARKAAITETPDTSTLLAGKRTADGSEFEKRTADGSEFESPKKKAKVE

SEQ ID NO: 2754 - protein, 2090 aa, synthetic construct
MPAAKRVKLDGGDKKYSIGLDIGTNSVGWAVITDEYKVPSKKFKVLGNTDRHSIKKNLIGALLFDSGETAEATRLKRTARRRYTRRKNRICYLQEIFSNEMAKVDDSFFHRLEESFLVEEDKKHERHPIFGNIVDEVAYHEKYPTIYHLRKKLVDSTDKADLRLIYLALAHMIKFRGHFLIEGDLNPDNSDVDKLFIQLVQTYNQLFEENPINASGVDAKAILSARLSKSRRLENLIAQLPGEKKNGLFGNLIALSLGLTPNFKSNFDLAEDAKLQLSKDTYDDDLDNLLAQIGDQYADLFLAAKNLSDAILLSDILRVNTEITKAPLSASMIKRYDEHHQDLTLLKALVRQQLPEKYKEIFFDQSKNGYAGYIDGGASQEEFYKFIKPILEKMDGTEELLVKLNREDLLRKQRTFDNGSIPHQIHLGELHAILRRQEDFYPFLKDNREKIEKILTFRIPYYVGPLARGNSRFAWMTRKSEETITPWNFEEVVDKGASAQSFIERMTNFDKNLPNEKVLPKHSLLYEYFTVYNELTKVKYVTEGMRKPAFLSGEQKKAIVDLLFKTNRKVTVKQLKEDYFKKIECFDSVEISGVEDRFNASLGTYHDLLKIIKDKDFLDNEENEDILEDIVLTLTLFEDREMIEERLKTYAHLFDDKVMKQLKRRRYTGWGRLSRKLINGIRDKQSGKTILDFLKSDGFANRNFMQLIHDDSLTFKEDIQKAQVSGQGDSLHEHIANLAGSPAIKKGILQTVKVVDELVKVMGRHKPENIVIEMARENQTTQKGQKNSRERMKRIEEGIKELGSQILKEHPVENTQLQNEKLYLYYLQNGRDMYVDQELDINRLSDYDVDHIVPQSFLKDDSIDNKVLTRSDKARGKSDNVPSEEVVKKMKNYWRQLLNAKLITQRKFDNLTKAERGGLSELDKAGFIKRQLVETRQITKHVAQILDSRMNTKYDENDKLIREVKVITLKSKLVSDFRKDFQFYKVREINNYHHAHDAYLNAVVGTALIKKYPKLESEFVYGDYKVYDVRKMIAKSEQEIGKATAKYFFYSNIMNFFKTEITLANGEIRKRPLIETNGETGEIVWDKGRDFATVRKVLSMPQVNIVKKTEVQTGGFSKESILPKRNSDKLIARKKDWDPKKYGGFDSPTVAYSVLVVAKVEKGKSKKLKSVKELLGITIMERSSFEKNPIDFLEAKGYKEVKKDLIIKLPKYSLFELENGRKRMLASAGELQKGNELALPSKYVNFLYLASHYEKLKGSPEDNEQKQLFVEQHKHYLDEIIEQISEFSKRVILADANLDKVLSAYNKHRDKPIREQAENIIHLFTLTNLGAPAAFKYFDTTIDRKRYTSTKEVLDATLIHQSITGLYETRIDLSQLGGDGGGGGGSGGTLNIEDEHRLHETSKEPDVSLGSTWLSDFPQAWAETGGMGLAVRQAPLIIPLKATSTPVSIKQYPMSQEARLGIKPHIQRLLDQGILVPCQSPWNTPLLPVKKPGTNDYRPVQDLREVNKRVEDIHPTVPNPYNLLSGLPPSHQWYTVLDLKDAFFCLRLHPTSQPLFAFEWRDPEMGISGQLTWTRLPQGFKNSPTLFNEALHRDLADFRIQHPDLILLQYVDDLLLAATSELDCQQGTRALLQTLGNLGYRASAKKAQICQKQVKYLGYLLKEGQRWLTEARKETVMGQPTPKTPRQLREFLGTAGFCRLWIPGFAEMAAPLYPLTKPGTLFNWGPDQQKAYQEIKQALLTAPALGLPDLTKPFELFVDEKQGYAKGVLTQKLGPWRRPVAYLSKKLDPVAAGWPPCLRMVAAIAVLTKDAGKLTMGQPLVILAPHAVEALVKQPPDRWLSNARMTHYQALLLDTDRVQFGPVVALNPATLLPLPEEGLQHNCLDILAEAHGTRPDLTDQPLPDADHTWYTDGSSLLQEGQRKAGAAVTTETEVIWAKALPAGTSAQRAELIALTQALKMAEGKKLNVYTDSRYAFATAHIHGEIYRRRGWLTSEGKEIKNKDEILALLKALFLPKRLSIIHCPGHQKGHSAEARGNRMADQAARKAAITETPDTSTLLAGKRTADGSEFEKRTADGSEFESPKKKAKVE

SEQ ID NO: 2755 - protein, 2096 aa, synthetic construct
MPAAKRVKLDGGDKKYSIGLDIGTNSVGWAVITDEYKVPSKKFKVLGNTDRHSIKKNLIGALLFDSGETAEATRLKRTARRRYTRRKNRICYLQEIFSNEMAKVDDSFFHRLEESFLVEEDKKHERHPIFGNIVDEVAYHEKYPTIYHLRKKLVDSTDKADLRLIYLALAHMIKFRGHFLIEGDLNPDNSDVDKLFIQLVQTYNQLFEENPINASGVDAKAILSARLSKSRRLENLIAQLPGEKKNGLFGNLIALSLGLTPNFKSNFDLAEDAKLQLSKDTYDDDLDNLLAQIGDQYADLFLAAKNLSDAILLSDILRVNTEITKAPLSASMIKRYDEHHQDLTLLKALVRQQLPEKYKEIFFDQSKNGYAGYIDGGASQEEFYKFIKPILEKMDGTEELLVKLNREDLLRKQRTFDNGSIPHQIHLGELHAILRRQEDFYPFLKDNREKIEKILTFRIPYYVGPLARGNSRFAWMTRKSEETITPWNFEEVVDKGASAQSFIERMTNFDKNLPNEKVLPKHSLLYEYFTVYNELTKVKYVTEGMRKPAFLSGEQKKAIVDLLFKTNRKVTVKQLKEDYFKKIECFDSVEISGVEDRFNASLGTYHDLLKIIKDKDFLDNEENEDILEDIVLTLTLFEDREMIEERLKTYAHLFDDKVMKQLKRRRYTGWGRLSRKLINGIRDKQSGKTILDFLKSDGFANRNFMQLIHDDSLTFKEDIQKAQVSGQGDSLHEHIANLAGSPAIKKGILQTVKVVDELVKVMGRHKPENIVIEMARENQTTQKGQKNSRERMKRIEEGIKELGSQILKEHPVENTQLQNEKLYLYYLQNGRDMYVDQELDINRLSDYDVDHIVPQSFLKDDSIDNKVLTRSDKARGKSDNVPSEEVVKKMKNYWRQLLNAKLITQRKFDNLTKAERGGLSELDKAGFIKRQLVETRQITKHVAQILDSRMNTKYDENDKLIREVKVITLKSKLVSDFRKDFQFYKVREINNYHHAHDAYLNAVVGTALIKKYPKLESEFVYGDYKVYDVRKMIAKSEQEIGKATAKYFFYSNIMNFFKTEITLANGEIRKRPLIETNGETGEIVWDKGRDFATVRKVLSMPQVNIVKKTEVQTGGFSKESILPKRNSDKLIARKKDWDPKKYGGFDSPTVAYSVLVVAKVEKGKSKKLKSVKELLGITIMERSSFEKNPIDFLEAKGYKEVKKDLIIKLPKYSLFELENGRKRMLASAGELQKGNELALPSKYVNFLYLASHYEKLKGSPEDNEQKQLFVEQHKHYLDEIIEQISEFSKRVILADANLDKVLSAYNKHRDKPIREQAENIIHLFTLTNLGAPAAFKYFDTTIDRKRYTSTKEVLDATLIHQSITGLYETRIDLSQLGGDGGEAAAKGGSPAPGGTLNIEDEHRLHETSKEPDVSLGSTWLSDFPQAWAETGGMGLAVRQAPLIIPLKATSTPVSIKQYPMSQEARLGIKPHIQRLLDQGILVPCQSPWNTPLLPVKKPGTNDYRPVQDLREVNKRVEDIHPTVPNPYNLLSGLPPSHQWYTVLDLKDAFFCLRLHPTSQPLFAFEWRDPEMGISGQLTWTRLPQGFKNSPTLFNEALHRDLADFRIQHPDLILLQYVDDLLLAATSELDCQQGTRALLQTLGNLGYRASAKKAQICQKQVKYLGYLLKEGQRWLTEARKETVMGQPTPKTPRQLREFLGTAGFCRLWIPGFAEMAAPLYPLTKPGTLFNWGPDQQKAYQEIKQALLTAPALGLPDLTKPFELFVDEKQGYAKGVLTQKLGPWRRPVAYLSKKLDPVAAGWPPCLRMVAAIAVLTKDAGKLTMGQPLVILAPHAVEALVKQPPDRWLSNARMTHYQALLLDTDRVQFGPVVALNPATLLPLPEEGLQHNCLDILAEAHGTRPDLTDQPLPDADHTWYTDGSSLLQEGQRKAGAAVTTETEVIWAKALPAGTSAQRAELIALTQALKMAEGKKLNVYTDSRYAFATAHIHGEIYRRRGWLTSEGKEIKNKDEILALLKALFLPKRLSIIHCPGHQKGHSAEARGNRMADQAARKAAITETPDTSTLLAGKRTADGSEFEKRTADGSEFESPKKKAKVE

SEQ ID NO: 2756 - protein, 2096 aa, synthetic construct
MPAAKRVKLDGGDKKYSIGLDIGTNSVGWAVITDEYKVPSKKFKVLGNTDRHSIKKNLIGALLFDSGETAEATRLKRTARRRYTRRKNRICYLQEIFSNEMAKVDDSFFHRLEESFLVEEDKKHERHPIFGNIVDEVAYHEKYPTIYHLRKKLVDSTDKADLRLIYLALAHMIKFRGHFLIEGDLNPDNSDVDKLFIQLVQTYNQLFEENPINASGVDAKAILSARLSKSRRLENLIAQLPGEKKNGLFGNLIALSLGLTPNFKSNFDLAEDAKLQLSKDTYDDDLDNLLAQIGDQYADLFLAAKNLSDAILLSDILRVNTEITKAPLSASMIKRYDEHHQDLTLLKALVRQQLPEKYKEIFFDQSKNGYAGYIDGGASQEEFYKFIKPILEKMDGTEELLVKLNREDLLRKQRTFDNGSIPHQIHLGELHAILRRQEDFYPFLKDNREKIEKILTFRIPYYVGPLARGNSRFAWMTRKSEETITPWNFEEVVDKGASAQSFIERMTNFDKNLPNEKVLPKHSLLYEYFTVYNELTKVKYVTEGMRKPAFLSGEQKKAIVDLLFKTNRKVTVKQLKEDYFKKIECFDSVEISGVEDRFNASLGTYHDLLKIIKDKDFLDNEENEDILEDIVLTLTLFEDREMIEERLKTYAHLFDDKVMKQLKRRRYTGWGRLSRKLINGIRDKQSGKTILDFLKSDGFANRNFMQLIHDDSLTFKEDIQKAQVSGQGDSLHEHIANLAGSPAIKKGILQTVKVVDELVKVMGRHKPENIVIEMARENQTTQKGQKNSRERMKRIEEGIKELGSQILKEHPVENTQLQNEKLYLYYLQNGRDMYVDQELDINRLSDYDVDHIVPQSFLKDDSIDNKVLTRSDKARGKSDNVPSEEVVKKMKNYWRQLLNAKLITQRKFDNLTKAERGGLSELDKAGFIKRQLVETRQITKHVAQILDSRMNTKYDENDKLIREVKVITLKSKLVSDFRKDFQFYKVREINNYHHAHDAYLNAVVGTALIKKYPKLESEFVYGDYKVYDVRKMIAKSEQEIGKATAKYFFYSNIMNFFKTEITLANGEIRKRPLIETNGETGEIVWDKGRDFATVRKVLSMPQVNIVKKTEVQTGGFSKESILPKRNSDKLIARKKDWDPKKYGGFDSPTVAYSVLVVAKVEKGKSKKLKSVKELLGITIMERSSFEKNPIDFLEAKGYKEVKKDLIIKLPKYSLFELENGRKRMLASAGELQKGNELALPSKYVNFLYLASHYEKLKGSPEDNEQKQLFVEQHKHYLDEIIEQISEFSKRVILADANLDKVLSAYNKHRDKPIREQAENIIHLFTLTNLGAPAAFKYFDTTIDRKRYTSTKEVLDATLIHQSITGLYETRIDLSQLGGDGGPAPEAAAKGGSGGTLNIEDEHRLHETSKEPDVSLGSTWLSDFPQAWAETGGMGLAVRQAPLIIPLKATSTPVSIKQYPMSQEARLGIKPHIQRLLDQGILVPCQSPWNTPLLPVKKPGTNDYRPVQDLREVNKRVEDIHPTVPNPYNLLSGLPPSHQWYTVLDLKDAFFCLRLHPTSQPLFAFEWRDPEMGISGQLTWTRLPQGFKNSPTLFNEALHRDLADFRIQHPDLILLQYVDDLLLAATSELDCQQGTRALLQTLGNLGYRASAKKAQICQKQVKYLGYLLKEGQRWLTEARKETVMGQPTPKTPRQLREFLGTAGFCRLWIPGFAEMAAPLYPLTKPGTLFNWGPDQQKAYQEIKQALLTAPALGLPDLTKPFELFVDEKQGYAKGVLTQKLGPWRRPVAYLSKKLDPVAAGWPPCLRMVAAIAVLTKDAGKLTMGQPLVILAPHAVEALVKQPPDRWLSNARMTHYQALLLDTDRVQFGPVVALNPATLLPLPEEGLQHNCLDILAEAHGTRPDLTDQPLPDADHTWYTDGSSLLQEGQRKAGAAVTTETEVIWAKALPAGTSAQRAELIALTQALKMAEGKKLNVYTDSRYAFATAHIHGEIYRRRGWLTSEGKEIKNKDEILALLKALFLPKRLSIIHCPGHQKGHSAEARGNRMADQAARKAAITETPDTSTLLAGKRTADGSEFEKRTADGSEFESPKKKAKVE

SEQ ID NO: 2757 - protein, 2094 aa, synthetic construct
MPAAKRVKLDGGDKKYSIGLDIGTNSVGWAVITDEYKVPSKKFKVLGNTDRHSIKKNLIGALLFDSGETAEATRLKRTARRRYTRRKNRICYLQEIFSNEMAKVDDSFFHRLEESFLVEEDKKHERHPIFGNIVDEVAYHEKYPTIYHLRKKLVDSTDKADLRLIYLALAHMIKFRGHFLIEGDLNPDNSDVDKLFIQLVQTYNQLFEENPINASGVDAKAILSARLSKSRRLENLIAQLPGEKKNGLFGNLIALSLGLTPNFKSNFDLAEDAKLQLSKDTYDDDLDNLLAQIGDQYADLFLAAKNLSDAILLSDILRVNTEITKAPLSASMIKRYDEHHQDLTLLKALVRQQLPEKYKEIFFDQSKNGYAGYIDGGASQEEFYKFIKPILEKMDGTEELLVKLNREDLLRKQRTFDNGSIPHQIHLGELHAILRRQEDFYPFLKDNREKIEKILTFRIPYYVGPLARGNSRFAWMTRKSEETITPWNFEEVVDKGASAQSFIERMTNFDKNLPNEKVLPKHSLLYEYFTVYNELTKVKYVTEGMRKPAFLSGEQKKAIVDLLFKTNRKVTVKQLKEDYFKKIECFDSVEISGVEDRFNASLGTYHDLLKIIKDKDFLDNEENEDILEDIVLTLTLFEDREMIEERLKTYAHLFDDKVMKQLKRRRYTGWGRLSRKLINGIRDKQSGKTILDFLKSDGFANRNFMQLIHDDSLTFKEDIQKAQVSGQGDSLHEHIANLAGSPAIKKGILQTVKVVDELVKVMGRHKPENIVIEMARENQTTQKGQKNSRERMKRIEEGIKELGSQILKEHPVENTQLQNEKLYLYYLQNGRDMYVDQELDINRLSDYDVDHIVPQSFLKDDSIDNKVLTRSDKARGKSDNVPSEEVVKKMKNYWRQLLNAKLITQRKFDNLTKAERGGLSELDKAGFIKRQLVETRQITKHVAQILDSRMNTKYDENDKLIREVKVITLKSKLVSDFRKDFQFYKVREINNYHHAHDAYLNAVVGTALIKKYPKLESEFVYGDYKVYDVRKMIAKSEQEIGKATAKYFFYSNIMNFFKTEITLANGEIRKRPLIETNGETGEIVWDKGRDFATVRKVLSMPQVNIVKKTEVQTGGFSKESILPKRNSDKLIARKKDWDPKKYGGFDSPTVAYSVLVVAKVEKGKSKKLKSVKELLGITIMERSSFEKNPIDFLEAKGYKEVKKDLIIKLPKYSLFELENGRKRMLASAGELQKGNELALPSKYVNFLYLASHYEKLKGSPEDNEQKQLFVEQHKHYLDEIIEQISEFSKRVILADANLDKVLSAYNKHRDKPIREQAENIIHLFTLTNLGAPAAFKYFDTTIDRKRYTSTKEVLDATLIHQSITGLYETRIDLSQLGGDGGPAPGSSGGSGGTLNIEDEHRLHETSKEPDVSLGSTWLSDFPQAWAETGGMGLAVRQAPLIIPLKATSTPVSIKQYPMSQEARLGIKPHIQRLLDQGILVPCQSPWNTPLLPVKKPGTNDYRPVQDLREVNKRVEDIHPTVPNPYNLLSGLPPSHQWYTVLDLKDAFFCLRLHPTSQPLFAFEWRDPEMGISGQLTWTRLPQGFKNSPTLFNEALHRDLADFRIQHPDLILLQYVDDLLLAATSELDCQQGTRALLQTLGNLGYRASAKKAQICQKQVKYLGYLLKEGQRWLTEARKETVMGQPTPKTPRQLREFLGTAGFCRLWIPGFAEMAAPLYPLTKPGTLFNWGPDQQKAYQEIKQALLTAPALGLPDLTKPFELFVDEKQGYAKGVLTQKLGPWRRPVAYLSKKLDPVAAGWPPCLRMVAAIAVLTKDAGKLTMGQPLVILAPHAVEALVKQPPDRWLSNARMTHYQALLLDTDRVQFGPVVALNPATLLPLPEEGLQHNCLDILAEAHGTRPDLTDQPLPDADHTWYTDGSSLLQEGQRKAGAAVTTETEVIWAKALPAGTSAQRAELIALTQALKMAEGKKLNVYTDSRYAFATAHIHGEIYRRRGWLTSEGKEIKNKDEILALLKALFLPKRLSIIHCPGHQKGHSAEARGNRMADQAARKAAITETPDTSTLLAGKRTADGSEFEKRTADGSEFESPKKKAKVE

SEQ ID NO: 2758 - protein, 2096 aa, synthetic construct
MPAAKRVKLDGGDKKYSIGLDIGTNSVGWAVITDEYKVPSKKFKVLGNTDRHSIKKNLIGALLFDSGETAEATRLKRTARRRYTRRKNRICYLQEIFSNEMAKVDDSFFHRLEESFLVEEDKKHERHPIFGNIVDEVAYHEKYPTIYHLRKKLVDSTDKADLRLIYLALAHMIKFRGHFLIEGDLNPDNSDVDKLFIQLVQTYNQLFEENPINASGVDAKAILSARLSKSRRLENLIAQLPGEKKNGLFGNLIALSLGLTPNFKSNFDLAEDAKLQLSKDTYDDDLDNLLAQIGDQYADLFLAAKNLSDAILLSDILRVNTEITKAPLSASMIKRYDEHHQDLTLLKALVRQQLPEKYKEIFFDQSKNGYAGYIDGGASQEEFYKFIKPILEKMDGTEELLVKLNREDLLRKQRTFDNGSIPHQIHLGELHAILRRQEDFYPFLKDNREKIEKILTFRIPYYVGPLARGNSRFAWMTRKSEETITPWNFEEVVDKGASAQSFIERMTNFDKNLPNEKVLPKHSLLYEYFTVYNELTKVKYVTEGMRKPAFLSGEQKKAIVDLLFKTNRKVTVKQLKEDYFKKIECFDSVEISGVEDRFNASLGTYHDLLKIIKDKDFLDNEENEDILEDIVLTLTLFEDREMIEERLKTYAHLFDDKVMKQLKRRRYTGWGRLSRKLINGIRDKQSGKTILDFLKSDGFANRNFMQLIHDDSLTFKEDIQKAQVSGQGDSLHEHIANLAGSPAIKKGILQTVKVVDELVKVMGRHKPENIVIEMARENQTTQKGQKNSRERMKRIEEGIKELGSQILKEHPVENTQLQNEKLYLYYLQNGRDMYVDQELDINRLSDYDVDHIVPQSFLKDDSIDNKVLTRSDKARGKSDNVPSEEVVKKMKNYWRQLLNAKLITQRKFDNLTKAERGGLSELDKAGFIKRQLVETRQITKHVAQILDSRMNTKYDENDKLIREVKVITLKSKLVSDFRKDFQFYKVREINNYHHAHDAYLNAVVGTALIKKYPKLESEFVYGDYKVYDVRKMIAKSEQEIGKATAKYFFYSNIMNFFKTEITLANGEIRKRPLIETNGETGEIVWDKGRDFATVRKVLSMPQVNIVKKTEVQTGGFSKESILPKRNSDKLIARKKDWDPKKYGGFDSPTVAYSVLVVAKVEKGKSKKLKSVKELLGITIMERSSFEKNPIDFLEAKGYKEVKKDLIIKLPKYSLFELENGRKRMLASAGELQKGNELALPSKYVNFLYLASHYEKLKGSPEDNEQKQLFVEQHKHYLDEIIEQISEFSKRVILADANLDKVLSAYNKHRDKPIREQAENIIHLFTLTNLGAPAAFKYFDTTIDRKRYTSTKEVLDATLIHQSITGLYETRIDLSQLGGDGGGSSPAPEAAAKGGTLNIEDEHRLHETSKEPDVSLGSTWLSDFPQAWAETGGMGLAVRQAPLIIPLKATSTPVSIKQYPMSQEARLGIKPHIQRLLDQGILVPCQSPWNTPLLPVKKPGTNDYRPVQDLREVNKRVEDIHPTVPNPYNLLSGLPPSHQWYTVLDLKDAFFCLRLHPTSQPLFAFEWRDPEMGISGQLTWTRLPQGFKNSPTLFNEALHRDLADFRIQHPDLILLQYVDDLLLAATSELDCQQGTRALLQTLGNLGYRASAKKAQICQKQVKYLGYLLKEGQRWLTEARKETVMGQPTPKTPRQLREFLGTAGFCRLWIPGFAEMAAPLYPLTKPGTLFNWGPDQQKAYQEIKQALLTAPALGLPDLTKPFELFVDEKQGYAKGVLTQKLGPWRRPVAYLSKKLDPVAAGWPPCLRMVAAIAVLTKDAGKLTMGQPLVILAPHAVEALVKQPPDRWLSNARMTHYQALLLDTDRVQFGPVVALNPATLLPLPEEGLQHNCLDILAEAHGTRPDLTDQPLPDADHTWYTDGSSLLQEGQRKAGAAVTTETEVIWAKALPAGTSAQRAELIALTQALKMAEGKKLNVYTDSRYAFATAHIHGEIYRRRGWLTSEGKEIKNKDEILALLKALFLPKRLSIIHCPGHQKGHSAEARGNRMADQAARKAAITETPDTSTLLAGKRTADGSEFEKRTADGSEFESPKKKAKVE

SEQ ID NO: 2759 - protein, 2096 aa, synthetic construct
MPAAKRVKLDGGDKKYSIGLDIGTNSVGWAVITDEYKVPSKKFKVLGNTDRHSIKKNLIGALLFDSGETAEATRLKRTARRRYTRRKNRICYLQEIFSNEMAKVDDSFFHRLEESFLVEEDKKHERHPIFGNIVDEVAYHEKYPTIYHLRKKLVDSTDKADLRLIYLALAHMIKFRGHFLIEGDLNPDNSDVDKLFIQLVQTYNQLFEENPINASGVDAKAILSARLSKSRRLENLIAQLPGEKKNGLFGNLIALSLGLTPNFKSNFDLAEDAKLQLSKDTYDDDLDNLLAQIGDQYADLFLAAKNLSDAILLSDILRVNTEITKAPLSASMIKRYDEHHQDLTLLKALVRQQLPEKYKEIFFDQSKNGYAGYIDGGASQEEFYKFIKPILEKMDGTEELLVKLNREDLLRKQRTFDNGSIPHQIHLGELHAILRRQEDFYPFLKDNREKIEKILTFRIPYYVGPLARGNSRFAWMTRKSEETITPWNFEEVVDKGASAQSFIERMTNFDKNLPNEKVLPKHSLLYEYFTVYNELTKVKYVTEGMRKPAFLSGEQKKAIVDLLFKTNRKVTVKQLKEDYFKKIECFDSVEISGVEDRFNASLGTYHDLLKIIKDKDFLDNEENEDILEDIVLTLTLFEDREMIEERLKTYAHLFDDKVMKQLKRRRYTGWGRLSRKLINGIRDKQSGKTILDFLKSDGFANRNFMQLIHDDSLTFKEDIQKAQVSGQGDSLHEHIANLAGSPAIKKGILQTVKVVDELVKVMGRHKPENIVIEMARENQTTQKGQKNSRERMKRIEEGIKELGSQILKEHPVENTQLQNEKLYLYYLQNGRDMYVDQELDINRLSDYDVDHIVPQSFLKDDSIDNKVLTRSDKARGKSDNVPSEEVVKKMKNYWRQLLNAKLITQRKFDNLTKAERGGLSELDKAGFIKRQLVETRQITKHVAQILDSRMNTKYDENDKLIREVKVITLKSKLVSDFRKDFQFYKVREINNYHHAHDAYLNAVVGTALIKKYPKLESEFVYGDYKVYDVRKMIAKSEQEIGKATAKYFFYSNIMNFFKTEITLANGEIRKRPLIETNGETGEIVWDKGRDFATVRKVLSMPQVNIVKKTEVQTGGFSKESILPKRNSDKLIARKKDWDPKKYGGFDSPTVAYSVLVVAKVEKGKSKKLKSVKELLGITIMERSSFEKNPIDFLEAKGYKEVKKDLIIKLPKYSLFELENGRKRMLASAGELQKGNELALPSKYVNFLYLASHYEKLKGSPEDNEQKQLFVEQHKHYLDEIIEQISEFSKRVILADANLDKVLSAYNKHRDKPIREQAENIIHLFTLTNLGAPAAFKYFDTTIDRKRYTSTKEVLDATLIHQSITGLYETRIDLSQLGGDGGPAPEAAAKGSSGGTLNIEDEHRLHETSKEPDVSLGSTWLSDFPQAWAETGGMGLAVRQAPLIIPLKATSTPVSIKQYPMSQEARLGIKPHIQRLLDQGILVPCQSPWNTPLLPVKKPGTNDYRPVQDLREVNKRVEDIHPTVPNPYNLLSGLPPSHQWYTVLDLKDAFFCLRLHPTSQPLFAFEWRDPEMGISGQLTWTRLPQGFKNSPTLFNEALHRDLADFRIQHPDLILLQYVDDLLLAATSELDCQQGTRALLQTLGNLGYRASAKKAQICQKQVKYLGYLLKEGQRWLTEARKETVMGQPTPKTPRQLREFLGTAGFCRLWIPGFAEMAAPLYPLTKPGTLFNWGPDQQKAYQEIKQALLTAPALGLPDLTKPFELFVDEKQGYAKGVLTQKLGPWRRPVAYLSKKLDPVAAGWPPCLRMVAAIAVLTKDAGKLTMGQPLVILAPHAVEALVKQPPDRWLSNARMTHYQALLLDTDRVQFGPVVALNPATLLPLPEEGLQHNCLDILAEAHGTRPDLTDQPLPDADHTWYTDGSSLLQEGQRKAGAAVTTETEVIWAKALPAGTSAQRAELIALTQALKMAEGKKLNVYTDSRYAFATAHIHGEIYRRRGWLTSEGKEIKNKDEILALLKALFLPKRLSIIHCPGHQKGHSAEARGNRMADQAARKAAITETPDTSTLLAGKRTADGSEFEKRTADGSEFESPKKKAKVE

SEQ ID NO: 2760 - protein, 2096 aa, synthetic construct
MPAAKRVKLDGGDKKYSIGLDIGTNSVGWAVITDEYKVPSKKFKVLGNTDRHSIKKNLIGALLFDSGETAEATRLKRTARRRYTRRKNRICYLQEIFSNEMAKVDDSFFHRLEESFLVEEDKKHERHPIFGNIVDEVAYHEKYPTIYHLRKKLVDSTDKADLRLIYLALAHMIKFRGHFLIEGDLNPDNSDVDKLFIQLVQTYNQLFEENPINASGVDAKAILSARLSKSRRLENLIAQLPGEKKNGLFGNLIALSLGLTPNFKSNFDLAEDAKLQLSKDTYDDDLDNLLAQIGDQYADLFLAAKNLSDAILLSDILRVNTEITKAPLSASMIKRYDEHHQDLTLLKALVRQQLPEKYKEIFFDQSKNGYAGYIDGGASQEEFYKFIKPILEKMDGTEELLVKLNREDLLRKQRTFDNGSIPHQIHLGELHAILRRQEDFYPFLKDNREKIEKILTFRIPYYVGPLARGNSRFAWMTRKSEETITPWNFEEVVDKGASAQSFIERMTNFDKNLPNEKVLPKHSLLYEYFTVYNELTKVKYVTEGMRKPAFLSGEQKKAIVDLLFKTNRKVTVKQLKEDYFKKIECFDSVEISGVEDRFNASLGTYHDLLKIIKDKDFLDNEENEDILEDIVLTLTLFEDREMIEERLKTYAHLFDDKVMKQLKRRRYTGWGRLSRKLINGIRDKQSGKTILDFLKSDGFANRNFMQLIHDDSLTFKEDIQKAQVSGQGDSLHEHIANLAGSPAIKKGILQTVKVVDELVKVMGRHKPENIVIEMARENQTTQKGQKNSRERMKRIEEGIKELGSQILKEHPVENTQLQNEKLYLYYLQNGRDMYVDQELDINRLSDYDVDHIVPQSFLKDDSIDNKVLTRSDKARGKSDNVPSEEVVKKMKNYWRQLLNAKLITQRKFDNLTKAERGGLSELDKAGFIKRQLVETRQITKHVAQILDSRMNTKYDENDKLIREVKVITLKSKLVSDFRKDFQFYKVREINNYHHAHDAYLNAVVGTALIKKYPKLESEFVYGDYKVYDVRKMIAKSEQEIGKATAKYFFYSNIMNFFKTEITLANGEIRKRPLIETNGETGEIVWDKGRDFATVRKVLSMPQVNIVKKTEVQTGGFSKESILPKRNSDKLIARKKDWDPKKYGGFDSPTVAYSVLVVAKVEKGKSKKLKSVKELLGITIMERSSFEKNPIDFLEAKGYKEVKKDLIIKLPKYSLFELENGRKRMLASAGELQKGNELALPSKYVNFLYLASHYEKLKGSPEDNEQKQLFVEQHKHYLDEIIEQISEFSKRVILADANLDKVLSAYNKHRDKPIREQAENIIHLFTLTNLGAPAAFKYFDTTIDRKRYTSTKEVLDATLIHQSITGLYETRIDLSQLGGDGGGSSGGSEAAAKGGTLNIEDEHRLHETSKEPDVSLGSTWLSDFPQAWAETGGMGLAVRQAPLIIPLKATSTPVSIKQYPMSQEARLGIKPHIQRLLDQGILVPCQSPWNTPLLPVKKPGTNDYRPVQDLREVNKRVEDIHPTVPNPYNLLSGLPPSHQWYTVLDLKDAFFCLRLHPTSQPLFAFEWRDPEMGISGQLTWTRLPQGFKNSPTLFNEALHRDLADFRIQHPDLILLQYVDDLLLAATSELDCQQGTRALLQTLGNLGYRASAKKAQICQKQVKYLGYLLKEGQRWLTEARKETVMGQPTPKTPRQLREFLGTAGFCRLWIPGFAEMAAPLYPLTKPGTLFNWGPDQQKAYQEIKQALLTAPALGLPDLTKPFELFVDEKQGYAKGVLTQKLGPWRRPVAYLSKKLDPVAAGWPPCLRMVAAIAVLTKDAGKLTMGQPLVILAPHAVEALVKQPPDRWLSNARMTHYQALLLDTDRVQFGPVVALNPATLLPLPEEGLQHNCLDILAEAHGTRPDLTDQPLPDADHTWYTDGSSLLQEGQRKAGAAVTTETEVIWAKALPAGTSAQRAELIALTQALKMAEGKKLNVYTDSRYAFATAHIHGEIYRRRGWLTSEGKEIKNKDEILALLKALFLPKRLSIIHCPGHQKGHSAEARGNRMADQAARKAAITETPDTSTLLAGKRTADGSEFEKRTADGSEFESPKKKAKVE

SEQ ID NO: 2761 - protein, 2096 aa, synthetic construct
MPAAKRVKLDGGDKKYSIGLDIGTNSVGWAVITDEYKVPSKKFKVLGNTDRHSIKKNLIGALLFDSGETAEATRLKRTARRRYTRRKNRICYLQEIFSNEMAKVDDSFFHRLEESFLVEEDKKHERHPIFGNIVDEVAYHEKYPTIYHLRKKLVDSTDKADLRLIYLALAHMIKFRGHFLIEGDLNPDNSDVDKLFIQLVQTYNQLFEENPINASGVDAKAILSARLSKSRRLENLIAQLPGEKKNGLFGNLIALSLGLTPNFKSNFDLAEDAKLQLSKDTYDDDLDNLLAQIGDQYADLFLAAKNLSDAILLSDILRVNTEITKAPLSASMIKRYDEHHQDLTLLKALVRQQLPEKYKEIFFDQSKNGYAGYIDGGASQEEFYKFIKPILEKMDGTEELLVKLNREDLLRKQRTFDNGSIPHQIHLGELHAILRRQEDFYPFLKDNREKIEKILTFRIPYYVGPLARGNSRFAWMTRKSEETITPWNFEEVVDKGASAQSFIERMTNFDKNLPNEKVLPKHSLLYEYFTVYNELTKVKYVTEGMRKPAFLSGEQKKAIVDLLFKTNRKVTVKQLKEDYFKKIECFDSVEISGVEDRFNASLGTYHDLLKIIKDKDFLDNEENEDILEDIVLTLTLFEDREMIEERLKTYAHLFDDKVMKQLKRRRYTGWGRLSRKLINGIRDKQSGKTILDFLKSDGFANRNFMQLIHDDSLTFKEDIQKAQVSGQGDSLHEHIANLAGSPAIKKGILQTVKVVDELVKVMGRHKPENIVIEMARENQTTQKGQKNSRERMKRIEEGIKELGSQILKEHPVENTQLQNEKLYLYYLQNGRDMYVDQELDINRLSDYDVDHIVPQSFLKDDSIDNKVLTRSDKARGKSDNVPSEEVVKKMKNYWRQLLNAKLITQRKFDNLTKAERGGLSELDKAGFIKRQLVETRQITKHVAQILDSRMNTKYDENDKLIREVKVITLKSKLVSDFRKDFQFYKVREINNYHHAHDAYLNAVVGTALIKKYPKLESEFVYGDYKVYDVRKMIAKSEQEIGKATAKYFFYSNIMNFFKTEITLANGEIRKRPLIETNGETGEIVWDKGRDFATVRKVLSMPQVNIVKKTEVQTGGFSKESILPKRNSDKLIARKKDWDPKKYGGFDSPTVAYSVLVVAKVEKGKSKKLKSVKELLGITIMERSSFEKNPIDFLEAKGYKEVKKDLIIKLPKYSLFELENGRKRMLASAGELQKGNELALPSKYVNFLYLASHYEKLKGSPEDNEQKQLFVEQHKHYLDEIIEQISEFSKRVILADANLDKVLSAYNKHRDKPIREQAENIIHLFTLTNLGAPAAFKYFDTTIDRKRYTSTKEVLDATLIHQSITGLYETRIDLSQLGGDGGGGSEAAAKGSSGGTLNIEDEHRLHETSKEPDVSLGSTWLSDFPQAWAETGGMGLAVRQAPLIIPLKATSTPVSIKQYPMSQEARLGIKPHIQRLLDQGILVPCQSPWNTPLLPVKKPGTNDYRPVQDLREVNKRVEDIHPTVPNPYNLLSGLPPSHQWYTVLDLKDAFFCLRLHPTSQPLFAFEWRDPEMGISGQLTWTRLPQGFKNSPTLFNEALHRDLADFRIQHPDLILLQYVDDLLLAATSELDCQQGTRALLQTLGNLGYRASAKKAQICQKQVKYLGYLLKEGQRWLTEARKETVMGQPTPKTPRQLREFLGTAGFCRLWIPGFAEMAAPLYPLTKPGTLFNWGPDQQKAYQEIKQALLTAPALGLPDLTKPFELFVDEKQGYAKGVLTQKLGPWRRPVAYLSKKLDPVAAGWPPCLRMVAAIAVLTKDAGKLTMGQPLVILAPHAVEALVKQPPDRWLSNARMTHYQALLLDTDRVQFGPVVALNPATLLPLPEEGLQHNCLDILAEAHGTRPDLTDQPLPDADHTWYTDGSSLLQEGQRKAGAAVTTETEVIWAKALPAGTSAQRAELIALTQALKMAEGKKLNVYTDSRYAFATAHIHGEIYRRRGWLTSEGKEIKNKDEILALLKALFLPKRLSIIHCPGHQKGHSAEARGNRMADQAARKAAITETPDTSTLLAGKRTADGSEFEKRTADGSEFESPKKKAKVE

SEQ ID NO: 2762 - protein, 2094 aa, synthetic construct
MPAAKRVKLDGGDKKYSIGLDIGTNSVGWAVITDEYKVPSKKFKVLGNTDRHSIKKNLIGALLFDSGETAEATRLKRTARRRYTRRKNRICYLQEIFSNEMAKVDDSFFHRLEESFLVEEDKKHERHPIFGNIVDEVAYHEKYPTIYHLRKKLVDSTDKADLRLIYLALAHMIKFRGHFLIEGDLNPDNSDVDKLFIQLVQTYNQLFEENPINASGVDAKAILSARLSKSRRLENLIAQLPGEKKNGLFGNLIALSLGLTPNFKSNFDLAEDAKLQLSKDTYDDDLDNLLAQIGDQYADLFLAAKNLSDAILLSDILRVNTEITKAPLSASMIKRYDEHHQDLTLLKALVRQQLPEKYKEIFFDQSKNGYAGYIDGGASQEEFYKFIKPILEKMDGTEELLVKLNREDLLRKQRTFDNGSIPHQIHLGELHAILRRQEDFYPFLKDNREKIEKILTFRIPYYVGPLARGNSRFAWMTRKSEETITPWNFEEVVDKGASAQSFIERMTNFDKNLPNEKVLPKHSLLYEYFTVYNELTKVKYVTEGMRKPAFLSGEQKKAIVDLLFKTNRKVTVKQLKEDYFKKIECFDSVEISGVEDRFNASLGTYHDLLKIIKDKDFLDNEENEDILEDIVLTLTLFEDREMIEERLKTYAHLFDDKVMKQLKRRRYTGWGRLSRKLINGIRDKQSGKTILDFLKSDGFANRNFMQLIHDDSLTFKEDIQKAQVSGQGDSLHEHIANLAGSPAIKKGILQTVKVVDELVKVMGRHKPENIVIEMARENQTTQKGQKNSRERMKRIEEGIKELGSQILKEHPVENTQLQNEKLYLYYLQNGRDMYVDQELDINRLSDYDVDHIVPQSFLKDDSIDNKVLTRSDKARGKSDNVPSEEVVKKMKNYWRQLLNAKLITQRKFDNLTKAERGGLSELDKAGFIKRQLVETRQITKHVAQILDSRMNTKYDENDKLIREVKVITLKSKLVSDFRKDFQFYKVREINNYHHAHDAYLNAVVGTALIKKYPKLESEFVYGDYKVYDVRKMIAKSEQEIGKATAKYFFYSNIMNFFKTEITLANGEIRKRPLIETNGETGEIVWDKGRDFATVRKVLSMPQVNIVKKTEVQTGGFSKESILPKRNSDKLIARKKDWDPKKYGGFDSPTVAYSVLVVAKVEKGKSKKLKSVKELLGITIMERSSFEKNPIDFLEAKGYKEVKKDLIIKLPKYSLFELENGRKRMLASAGELQKGNELALPSKYVNFLYLASHYEKLKGSPEDNEQKQLFVEQHKHYLDEIIEQISEFSKRVILADANLDKVLSAYNKHRDKPIREQAENIIHLFTLTNLGAPAAFKYFDTTIDRKRYTSTKEVLDATLIHQSITGLYETRIDLSQLGGDGGGGSPAPGGGGGTLNIEDEHRLHETSKEPDVSLGSTWLSDFPQAWAETGGMGLAVRQAPLIIPLKATSTPVSIKQYPMSQEARLGIKPHIQRLLDQGILVPCQSPWNTPLLPVKKPGTNDYRPVQDLREVNKRVEDIHPTVPNPYNLLSGLPPSHQWYTVLDLKDAFFCLRLHPTSQPLFAFEWRDPEMGISGQLTWTRLPQGFKNSPTLFNEALHRDLADFRIQHPDLILLQYVDDLLLAATSELDCQQGTRALLQTLGNLGYRASAKKAQICQKQVKYLGYLLKEGQRWLTEARKETVMGQPTPKTPRQLREFLGTAGFCRLWIPGFAEMAAPLYPLTKPGTLFNWGPDQQKAYQEIKQALLTAPALGLPDLTKPFELFVDEKQGYAKGVLTQKLGPWRRPVAYLSKKLDPVAAGWPPCLRMVAAIAVLTKDAGKLTMGQPLVILAPHAVEALVKQPPDRWLSNARMTHYQALLLDTDRVQFGPVVALNPATLLPLPEEGLQHNCLDILAEAHGTRPDLTDQPLPDADHTWYTDGSSLLQEGQRKAGAAVTTETEVIWAKALPAGTSAQRAELIALTQALKMAEGKKLNVYTDSRYAFATAHIHGEIYRRRGWLTSEGKEIKNKDEILALLKALFLPKRLSIIHCPGHQKGHSAEARGNRMADQAARKAAITETPDTSTLLAGKRTADGSEFEKRTADGSEFESPKKKAKVE

SEQ ID NO: 2763 - protein, 2097 aa, synthetic construct
MPAAKRVKLDGGDKKYSIGLDIGTNSVGWAVITDEYKVPSKKFKVLGNTDRHSIKKNLIGALLFDSGETAEATRLKRTARRRYTRRKNRICYLQEIFSNEMAKVDDSFFHRLEESFLVEEDKKHERHPIFGNIVDEVAYHEKYPTIYHLRKKLVDSTDKADLRLIYLALAHMIKFRGHFLIEGDLNPDNSDVDKLFIQLVQTYNQLFEENPINASGVDAKAILSARLSKSRRLENLIAQLPGEKKNGLFGNLIALSLGLTPNFKSNFDLAEDAKLQLSKDTYDDDLDNLLAQIGDQYADLFLAAKNLSDAILLSDILRVNTEITKAPLSASMIKRYDEHHQDLTLLKALVRQQLPEKYKEIFFDQSKNGYAGYIDGGASQEEFYKFIKPILEKMDGTEELLVKLNREDLLRKQRTFDNGSIPHQIHLGELHAILRRQEDFYPFLKDNREKIEKILTFRIPYYVGPLARGNSRFAWMTRKSEETITPWNFEEVVDKGASAQSFIERMTNFDKNLPNEKVLPKHSLLYEYFTVYNELTKVKYVTEGMRKPAFLSGEQKKAIVDLLFKTNRKVTVKQLKEDYFKKIECFDSVEISGVEDRFNASLGTYHDLLKIIKDKDFLDNEENEDILEDIVLTLTLFEDREMIEERLKTYAHLFDDKVMKQLKRRRYTGWGRLSRKLINGIRDKQSGKTILDFLKSDGFANRNFMQLIHDDSLTFKEDIQKAQVSGQGDSLHEHIANLAGSPAIKKGILQTVKVVDELVKVMGRHKPENIVIEMARENQTTQKGQKNSRERMKRIEEGIKELGSQILKEHPVENTQLQNEKLYLYYLQNGRDMYVDQELDINRLSDYDVDHIVPQSFLKDDSIDNKVLTRSDKARGKSDNVPSEEVVKKMKNYWRQLLNAKLITQRKFDNLTKAERGGLSELDKAGFIKRQLVETRQITKHVAQILDSRMNTKYDENDKLIREVKVITLKSKLVSDFRKDFQFYKVREINNYHHAHDAYLNAVVGTALIKKYPKLESEFVYGDYKVYDVRKMIAKSEQEIGKATAKYFFYSNIMNFFKTEITLANGEIRKRPLIETNGETGEIVWDKGRDFATVRKVLSMPQVNIVKKTEVQTGGFSKESILPKRNSDKLIARKKDWDPKKYGGFDSPTVAYSVLVVAKVEKGKSKKLKSVKELLGITIMERSSFEKNPIDFLEAKGYKEVKKDLIIKLPKYSLFELENGRKRMLASAGELQKGNELALPSKYVNFLYLASHYEKLKGSPEDNEQKQLFVEQHKHYLDEIIEQISEFSKRVILADANLDKVLSAYNKHRDKPIREQAENIIHLFTLTNLGAPAAFKYFDTTIDRKRYTSTKEVLDATLIHQSITGLYETRIDLSQLGGDGGGGSGGSGGSGGSGGTLNIEDEHRLHETSKEPDVSLGSTWLSDFPQAWAETGGMGLAVRQAPLIIPLKATSTPVSIKQYPMSQEARLGIKPHIQRLLDQGILVPCQSPWNTPLLPVKKPGTNDYRPVQDLREVNKRVEDIHPTVPNPYNLLSGLPPSHQWYTVLDLKDAFFCLRLHPTSQPLFAFEWRDPEMGISGQLTWTRLPQGFKNSPTLFNEALHRDLADFRIQHPDLILLQYVDDLLLAATSELDCQQGTRALLQTLGNLGYRASAKKAQICQKQVKYLGYLLKEGQRWLTEARKETVMGQPTPKTPRQLREFLGTAGFCRLWIPGFAEMAAPLYPLTKPGTLFNWGPDQQKAYQEIKQALLTAPALGLPDLTKPFELFVDEKQGYAKGVLTQKLGPWRRPVAYLSKKLDPVAAGWPPCLRMVAAIAVLTKDAGKLTMGQPLVILAPHAVEALVKQPPDRWLSNARMTHYQALLLDTDRVQFGPVVALNPATLLPLPEEGLQHNCLDILAEAHGTRPDLTDQPLPDADHTWYTDGSSLLQEGQRKAGAAVTTETEVIWAKALPAGTSAQRAELIALTQALKMAEGKKLNVYTDSRYAFATAHIHGEIYRRRGWLTSEGKEIKNKDEILALLKALFLPKRLSIIHCPGHQKGHSAEARGNRMADQAARKAAITETPDTSTLLAGKRTADGSEFEKRTADGSEFESPKKKAKVE

SEQ ID NO: 2764 - protein, 2096 aa, synthetic construct
MPAAKRVKLDGGDKKYSIGLDIGTNSVGWAVITDEYKVPSKKFKVLGNTDRHSIKKNLIGALLFDSGETAEATRLKRTARRRYTRRKNRICYLQEIFSNEMAKVDDSFFHRLEESFLVEEDKKHERHPIFGNIVDEVAYHEKYPTIYHLRKKLVDSTDKADLRLIYLALAHMIKFRGHFLIEGDLNPDNSDVDKLFIQLVQTYNQLFEENPINASGVDAKAILSARLSKSRRLENLIAQLPGEKKNGLFGNLIALSLGLTPNFKSNFDLAEDAKLQLSKDTYDDDLDNLLAQIGDQYADLFLAAKNLSDAILLSDILRVNTEITKAPLSASMIKRYDEHHQDLTLLKALVRQQLPEKYKEIFFDQSKNGYAGYIDGGASQEEFYKFIKPILEKMDGTEELLVKLNREDLLRKQRTFDNGSIPHQIHLGELHAILRRQEDFYPFLKDNREKIEKILTFRIPYYVGPLARGNSRFAWMTRKSEETITPWNFEEVVDKGASAQSFIERMTNFDKNLPNEKVLPKHSLLYEYFTVYNELTKVKYVTEGMRKPAFLSGEQKKAIVDLLFKTNRKVTVKQLKEDYFKKIECFDSVEISGVEDRFNASLGTYHDLLKIIKDKDFLDNEENEDILEDIVLTLTLFEDREMIEERLKTYAHLFDDKVMKQLKRRRYTGWGRLSRKLINGIRDKQSGKTILDFLKSDGFANRNFMQLIHDDSLTFKEDIQKAQVSGQGDSLHEHIANLAGSPAIKKGILQTVKVVDELVKVMGRHKPENIVIEMARENQTTQKGQKNSRERMKRIEEGIKELGSQILKEHPVENTQLQNEKLYLYYLQNGRDMYVDQELDINRLSDYDVDHIVPQSFLKDDSIDNKVLTRSDKARGKSDNVPSEEVVKKMKNYWRQLLNAKLITQRKFDNLTKAERGGLSELDKAGFIKRQLVETRQITKHVAQILDSRMNTKYDENDKLIREVKVITLKSKLVSDFRKDFQFYKVREINNYHHAHDAYLNAVVGTALIKKYPKLESEFVYGDYKVYDVRKMIAKSEQEIGKATAKYFFYSNIMNFFKTEITLANGEIRKRPLIETNGETGEIVWDKGRDFATVRKVLSMPQVNIVKKTEVQTGGFSKESILPKRNSDKLIARKKDWDPKKYGGFDSPTVAYSVLVVAKVEKGKSKKLKSVKELLGITIMERSSFEKNPIDFLEAKGYKEVKKDLIIKLPKYSLFELENGRKRMLASAGELQKGNELALPSKYVNFLYLASHYEKLKGSPEDNEQKQLFVEQHKHYLDEIIEQISEFSKRVILADANLDKVLSAYNKHRDKPIREQAENIIHLFTLTNLGAPAAFKYFDTTIDRKRYTSTKEVLDATLIHQSITGLYETRIDLSQLGGDGGGGGGSSEAAAKGGTLNIEDEHRLHETSKEPDVSLGSTWLSDFPQAWAETGGMGLAVRQAPLIIPLKATSTPVSIKQYPMSQEARLGIKPHIQRLLDQGILVPCQSPWNTPLLPVKKPGTNDYRPVQDLREVNKRVEDIHPTVPNPYNLLSGLPPSHQWYTVLDLKDAFFCLRLHPTSQPLFAFEWRDPEMGISGQLTWTRLPQGFKNSPTLFNEALHRDLADFRIQHPDLILLQYVDDLLLAATSELDCQQGTRALLQTLGNLGYRASAKKAQICQKQVKYLGYLLKEGQRWLTEARKETVMGQPTPKTPRQLREFLGTAGFCRLWIPGFAEMAAPLYPLTKPGTLFNWGPDQQKAYQEIKQALLTAPALGLPDLTKPFELFVDEKQGYAKGVLTQKLGPWRRPVAYLSKKLDPVAAGWPPCLRMVAAIAVLTKDAGKLTMGQPLVILAPHAVEALVKQPPDRWLSNARMTHYQALLLDTDRVQFGPVVALNPATLLPLPEEGLQHNCLDILAEAHGTRPDLTDQPLPDADHTWYTDGSSLLQEGQRKAGAAVTTETEVIWAKALPAGTSAQRAELIALTQALKMAEGKKLNVYTDSRYAFATAHIHGEIYRRRGWLTSEGKEIKNKDEILALLKALFLPKRLSIIHCPGHQKGHSAEARGNRMADQAARKAAITETPDTSTLLAGKRTADGSEFEKRTADGSEFESPKKKAKVE

SEQ ID NO: 2765 - protein, 2096 aa, synthetic construct
MPAAKRVKLDGGDKKYSIGLDIGTNSVGWAVITDEYKVPSKKFKVLGNTDRHSIKKNLIGALLFDSGETAEATRLKRTARRRYTRRKNRICYLQEIFSNEMAKVDDSFFHRLEESFLVEEDKKHERHPIFGNIVDEVAYHEKYPTIYHLRKKLVDSTDKADLRLIYLALAHMIKFRGHFLIEGDLNPDNSDVDKLFIQLVQTYNQLFEENPINASGVDAKAILSARLSKSRRLENLIAQLPGEKKNGLFGNLIALSLGLTPNFKSNFDLAEDAKLQLSKDTYDDDLDNLLAQIGDQYADLFLAAKNLSDAILLSDILRVNTEITKAPLSASMIKRYDEHHQDLTLLKALVRQQLPEKYKEIFFDQSKNGYAGYIDGGASQEEFYKFIKPILEKMDGTEELLVKLNREDLLRKQRTFDNGSIPHQIHLGELHAILRRQEDFYPFLKDNREKIEKILTFRIPYYVGPLARGNSRFAWMTRKSEETITPWNFEEVVDKGASAQSFIERMTNFDKNLPNEKVLPKHSLLYEYFTVYNELTKVKYVTEGMRKPAFLSGEQKKAIVDLLFKTNRKVTVKQLKEDYFKKIECFDSVEISGVEDRFNASLGTYHDLLKIIKDKDFLDNEENEDILEDIVLTLTLFEDREMIEERLKTYAHLFDDKVMKQLKRRRYTGWGRLSRKLINGIRDKQSGKTILDFLKSDGFANRNFMQLIHDDSLTFKEDIQKAQVSGQGDSLHEHIANLAGSPAIKKGILQTVKVVDELVKVMGRHKPENIVIEMARENQTTQKGQKNSRERMKRIEEGIKELGSQILKEHPVENTQLQNEKLYLYYLQNGRDMYVDQELDINRLSDYDVDHIVPQSFLKDDSIDNKVLTRSDKARGKSDNVPSEEVVKKMKNYWRQLLNAKLITQRKFDNLTKAERGGLSELDKAGFIKRQLVETRQITKHVAQILDSRMNTKYDENDKLIREVKVITLKSKLVSDFRKDFQFYKVREINNYHHAHDAYLNAVVGTALIKKYPKLESEFVYGDYKVYDVRKMIAKSEQEIGKATAKYFFYSNIMNFFKTEITLANGEIRKRPLIETNGETGEIVWDKGRDFATVRKVLSMPQVNIVKKTEVQTGGFSKESILPKRNSDKLIARKKDWDPKKYGGFDSPTVAYSVLVVAKVEKGKSKKLKSVKELLGITIMERSSFEKNPIDFLEAKGYKEVKKDLIIKLPKYSLFELENGRKRMLASAGELQKGNELALPSKYVNFLYLASHYEKLKGSPEDNEQKQLFVEQHKHYLDEIIEQISEFSKRVILADANLDKVLSAYNKHRDKPIREQAENIIHLFTLTNLGAPAAFKYFDTTIDRKRYTSTKEVLDATLIHQSITGLYETRIDLSQLGGDGGEAAAKPAPGGGGGTLNIEDEHRLHETSKEPDVSLGSTWLSDFPQAWAETGGMGLAVRQAPLIIPLKATSTPVSIKQYPMSQEARLGIKPHIQRLLDQGILVPCQSPWNTPLLPVKKPGTNDYRPVQDLREVNKRVEDIHPTVPNPYNLLSGLPPSHQWYTVLDLKDAFFCLRLHPTSQPLFAFEWRDPEMGISGQLTWTRLPQGFKNSPTLFNEALHRDLADFRIQHPDLILLQYVDDLLLAATSELDCQQGTRALLQTLGNLGYRASAKKAQICQKQVKYLGYLLKEGQRWLTEARKETVMGQPTPKTPRQLREFLGTAGFCRLWIPGFAEMAAPLYPLTKPGTLFNWGPDQQKAYQEIKQALLTAPALGLPDLTKPFELFVDEKQGYAKGVLTQKLGPWRRPVAYLSKKLDPVAAGWPPCLRMVAAIAVLTKDAGKLTMGQPLVILAPHAVEALVKQPPDRWLSNARMTHYQALLLDTDRVQFGPVVALNPATLLPLPEEGLQHNCLDILAEAHGTRPDLTDQPLPDADHTWYTDGSSLLQEGQRKAGAAVTTETEVIWAKALPAGTSAQRAELIALTQALKMAEGKKLNVYTDSRYAFATAHIHGEIYRRRGWLTSEGKEIKNKDEILALLKALFLPKRLSIIHCPGHQKGHSAEARGNRMADQAARKAAITETPDTSTLLAGKRTADGSEFEKRTADGSEFESPKKKAKVE

SEQ ID NO: 2766 - protein, 2094 aa, synthetic construct
MPAAKRVKLDGGDKKYSIGLDIGTNSVGWAVITDEYKVPSKKFKVLGNTDRHSIKKNLIGALLFDSGETAEATRLKRTARRRYTRRKNRICYLQEIFSNEMAKVDDSFFHRLEESFLVEEDKKHERHPIFGNIVDEVAYHEKYPTIYHLRKKLVDSTDKADLRLIYLALAHMIKFRGHFLIEGDLNPDNSDVDKLFIQLVQTYNQLFEENPINASGVDAKAILSARLSKSRRLENLIAQLPGEKKNGLFGNLIALSLGLTPNFKSNFDLAEDAKLQLSKDTYDDDLDNLLAQIGDQYADLFLAAKNLSDAILLSDILRVNTEITKAPLSASMIKRYDEHHQDLTLLKALVRQQLPEKYKEIFFDQSKNGYAGYIDGGASQEEFYKFIKPILEKMDGTEELLVKLNREDLLRKQRTFDNGSIPHQIHLGELHAILRRQEDFYPFLKDNREKIEKILTFRIPYYVGPLARGNSRFAWMTRKSEETITPWNFEEVVDKGASAQSFIERMTNFDKNLPNEKVLPKHSLLYEYFTVYNELTKVKYVTEGMRKPAFLSGEQKKAIVDLLFKTNRKVTVKQLKEDYFKKIECFDSVEISGVEDRFNASLGTYHDLLKIIKDKDFLDNEENEDILEDIVLTLTLFEDREMIEERLKTYAHLFDDKVMKQLKRRRYTGWGRLSRKLINGIRDKQSGKTILDFLKSDGFANRNFMQLIHDDSLTFKEDIQKAQVSGQGDSLHEHIANLAGSPAIKKGILQTVKVVDELVKVMGRHKPENIVIEMARENQTTQKGQKNSRERMKRIEEGIKELGSQILKEHPVENTQLQNEKLYLYYLQNGRDMYVDQELDINRLSDYDVDHIVPQSFLKDDSIDNKVLTRSDKARGKSDNVPSEEVVKKMKNYWRQLLNAKLITQRKFDNLTKAERGGLSELDKAGFIKRQLVETRQITKHVAQILDSRMNTKYDENDKLIREVKVITLKSKLVSDFRKDFQFYKVREINNYHHAHDAYLNAVVGTALIKKYPKLESEFVYGDYKVYDVRKMIAKSEQEIGKATAKYFFYSNIMNFFKTEITLANGEIRKRPLIETNGETGEIVWDKGRDFATVRKVLSMPQVNIVKKTEVQTGGFSKESILPKRNSDKLIARKKDWDPKKYGGFDSPTVAYSVLVVAKVEKGKSKKLKSVKELLGITIMERSSFEKNPIDFLEAKGYKEVKKDLIIKLPKYSLFELENGRKRMLASAGELQKGNELALPSKYVNFLYLASHYEKLKGSPEDNEQKQLFVEQHKHYLDEIIEQISEFSKRVILADANLDKVLSAYNKHRDKPIREQAENIIHLFTLTNLGAPAAFKYFDTTIDRKRYTSTKEVLDATLIHQSITGLYETRIDLSQLGGDGGGGSGGGPAPGGTLNIEDEHRLHETSKEPDVSLGSTWLSDFPQAWAETGGMGLAVRQAPLIIPLKATSTPVSIKQYPMSQEARLGIKPHIQRLLDQGILVPCQSPWNTPLLPVKKPGTNDYRPVQDLREVNKRVEDIHPTVPNPYNLLSGLPPSHQWYTVLDLKDAFFCLRLHPTSQPLFAFEWRDPEMGISGQLTWTRLPQGFKNSPTLFNEALHRDLADFRIQHPDLILLQYVDDLLLAATSELDCQQGTRALLQTLGNLGYRASAKKAQICQKQVKYLGYLLKEGQRWLTEARKETVMGQPTPKTPRQLREFLGTAGFCRLWIPGFAEMAAPLYPLTKPGTLFNWGPDQQKAYQEIKQALLTAPALGLPDLTKPFELFVDEKQGYAKGVLTQKLGPWRRPVAYLSKKLDPVAAGWPPCLRMVAAIAVLTKDAGKLTMGQPLVILAPHAVEALVKQPPDRWLSNARMTHYQALLLDTDRVQFGPVVALNPATLLPLPEEGLQHNCLDILAEAHGTRPDLTDQPLPDADHTWYTDGSSLLQEGQRKAGAAVTTETEVIWAKALPAGTSAQRAELIALTQALKMAEGKKLNVYTDSRYAFATAHIHGEIYRRRGWLTSEGKEIKNKDEILALLKALFLPKRLSIIHCPGHQKGHSAEARGNRMADQAARKAAITETPDTSTLLAGKRTADGSEFEKRTADGSEFESPKKKAKVE

SEQ ID NO: 2767 - protein, 2096 aa, synthetic construct
MPAAKRVKLDGGDKKYSIGLDIGTNSVGWAVITDEYKVPSKKFKVLGNTDRHSIKKNLIGALLFDSGETAEATRLKRTARRRYTRRKNRICYLQEIFSNEMAKVDDSFFHRLEESFLVEEDKKHERHPIFGNIVDEVAYHEKYPTIYHLRKKLVDSTDKADLRLIYLALAHMIKFRGHFLIEGDLNPDNSDVDKLFIQLVQTYNQLFEENPINASGVDAKAILSARLSKSRRLENLIAQLPGEKKNGLFGNLIALSLGLTPNFKSNFDLAEDAKLQLSKDTYDDDLDNLLAQIGDQYADLFLAAKNLSDAILLSDILRVNTEITKAPLSASMIKRYDEHHQDLTLLKALVRQQLPEKYKEIFFDQSKNGYAGYIDGGASQEEFYKFIKPILEKMDGTEELLVKLNREDLLRKQRTFDNGSIPHQIHLGELHAILRRQEDFYPFLKDNREKIEKILTFRIPYYVGPLARGNSRFAWMTRKSEETITPWNFEEVVDKGASAQSFIERMTNFDKNLPNEKVLPKHSLLYEYFTVYNELTKVKYVTEGMRKPAFLSGEQKKAIVDLLFKTNRKVTVKQLKEDYFKKIECFDSVEISGVEDRFNASLGTYHDLLKIIKDKDFLDNEENEDILEDIVLTLTLFEDREMIEERLKTYAHLFDDKVMKQLKRRRYTGWGRLSRKLINGIRDKQSGKTILDFLKSDGFANRNFMQLIHDDSLTFKEDIQKAQVSGQGDSLHEHIANLAGSPAIKKGILQTVKVVDELVKVMGRHKPENIVIEMARENQTTQKGQKNSRERMKRIEEGIKELGSQILKEHPVENTQLQNEKLYLYYLQNGRDMYVDQELDINRLSDYDVDHIVPQSFLKDDSIDNKVLTRSDKARGKSDNVPSEEVVKKMKNYWRQLLNAKLITQRKFDNLTKAERGGLSELDKAGFIKRQLVETRQITKHVAQILDSRMNTKYDENDKLIREVKVITLKSKLVSDFRKDFQFYKVREINNYHHAHDAYLNAVVGTALIKKYPKLESEFVYGDYKVYDVRKMIAKSEQEIGKATAKYFFYSNIMNFFKTEITLANGEIRKRPLIETNGETGEIVWDKGRDFATVRKVLSMPQVNIVKKTEVQTGGFSKESILPKRNSDKLIARKKDWDPKKYGGFDSPTVAYSVLVVAKVEKGKSKKLKSVKELLGITIMERSSFEKNPIDFLEAKGYKEVKKDLIIKLPKYSLFELENGRKRMLASAGELQKGNELALPSKYVNFLYLASHYEKLKGSPEDNEQKQLFVEQHKHYLDEIIEQISEFSKRVILADANLDKVLSAYNKHRDKPIREQAENIIHLFTLTNLGAPAAFKYFDTTIDRKRYTSTKEVLDATLIHQSITGLYETRIDLSQLGGDGGEAAAKGGSGGGGGTLNIEDEHRLHETSKEPDVSLGSTWLSDFPQAWAETGGMGLAVRQAPLIIPLKATSTPVSIKQYPMSQEARLGIKPHIQRLLDQGILVPCQSPWNTPLLPVKKPGTNDYRPVQDLREVNKRVEDIHPTVPNPYNLLSGLPPSHQWYTVLDLKDAFFCLRLHPTSQPLFAFEWRDPEMGISGQLTWTRLPQGFKNSPTLFNEALHRDLADFRIQHPDLILLQYVDDLLLAATSELDCQQGTRALLQTLGNLGYRASAKKAQICQKQVKYLGYLLKEGQRWLTEARKETVMGQPTPKTPRQLREFLGTAGFCRLWIPGFAEMAAPLYPLTKPGTLFNWGPDQQKAYQEIKQALLTAPALGLPDLTKPFELFVDEKQGYAKGVLTQKLGPWRRPVAYLSKKLDPVAAGWPPCLRMVAAIAVLTKDAGKLTMGQPLVILAPHAVEALVKQPPDRWLSNARMTHYQALLLDTDRVQFGPVVALNPATLLPLPEEGLQHNCLDILAEAHGTRPDLTDQPLPDADHTWYTDGSSLLQEGQRKAGAAVTTETEVIWAKALPAGTSAQRAELIALTQALKMAEGKKLNVYTDSRYAFATAHIHGEIYRRRGWLTSEGKEIKNKDEILALLKALFLPKRLSIIHCPGHQKGHSAEARGNRMADQAARKAAITETPDTSTLLAGKRTADGSEFEKRTADGSEFESPKKKAKVE

SEQ ID NO: 2768 - protein, 2094 aa, synthetic construct
MPAAKRVKLDGGDKKYSIGLDIGTNSVGWAVITDEYKVPSKKFKVLGNTDRHSIKKNLIGALLFDSGETAEATRLKRTARRRYTRRKNRICYLQEIFSNEMAKVDDSFFHRLEESFLVEEDKKHERHPIFGNIVDEVAYHEKYPTIYHLRKKLVDSTDKADLRLIYLALAHMIKFRGHFLIEGDLNPDNSDVDKLFIQLVQTYNQLFEENPINASGVDAKAILSARLSKSRRLENLIAQLPGEKKNGLFGNLIALSLGLTPNFKSNFDLAEDAKLQLSKDTYDDDLDNLLAQIGDQYADLFLAAKNLSDAILLSDILRVNTEITKAPLSASMIKRYDEHHQDLTLLKALVRQQLPEKYKEIFFDQSKNGYAGYIDGGASQEEFYKFIKPILEKMDGTEELLVKLNREDLLRKQRTFDNGSIPHQIHLGELHAILRRQEDFYPFLKDNREKIEKILTFRIPYYVGPLARGNSRFAWMTRKSEETITPWNFEEVVDKGASAQSFIERMTNFDKNLPNEKVLPKHSLLYEYFTVYNELTKVKYVTEGMRKPAFLSGEQKKAIVDLLFKTNRKVTVKQLKEDYFKKIECFDSVEISGVEDRFNASLGTYHDLLKIIKDKDFLDNEENEDILEDIVLTLTLFEDREMIEERLKTYAHLFDDKVMKQLKRRRYTGWGRLSRKLINGIRDKQSGKTILDFLKSDGFANRNFMQLIHDDSLTFKEDIQKAQVSGQGDSLHEHIANLAGSPAIKKGILQTVKVVDELVKVMGRHKPENIVIEMARENQTTQKGQKNSRERMKRIEEGIKELGSQILKEHPVENTQLQNEKLYLYYLQNGRDMYVDQELDINRLSDYDVDHIVPQSFLKDDSIDNKVLTRSDKARGKSDNVPSEEVVKKMKNYWRQLLNAKLITQRKFDNLTKAERGGLSELDKAGFIKRQLVETRQITKHVAQILDSRMNTKYDENDKLIREVKVITLKSKLVSDFRKDFQFYKVREINNYHHAHDAYLNAVVGTALIKKYPKLESEFVYGDYKVYDVRKMIAKSEQEIGKATAKYFFYSNIMNFFKTEITLANGEIRKRPLIETNGETGEIVWDKGRDFATVRKVLSMPQVNIVKKTEVQTGGFSKESILPKRNSDKLIARKKDWDPKKYGGFDSPTVAYSVLVVAKVEKGKSKKLKSVKELLGITIMERSSFEKNPIDFLEAKGYKEVKKDLIIKLPKYSLFELENGRKRMLASAGELQKGNELALPSKYVNFLYLASHYEKLKGSPEDNEQKQLFVEQHKHYLDEIIEQISEFSKRVILADANLDKVLSAYNKHRDKPIREQAENIIHLFTLTNLGAPAAFKYFDTTIDRKRYTSTKEVLDATLIHQSITGLYETRIDLSQLGGDGGGSSGGSPAPGGTLNIEDEHRLHETSKEPDVSLGSTWLSDFPQAWAETGGMGLAVRQAPLIIPLKATSTPVSIKQYPMSQEARLGIKPHIQRLLDQGILVPCQSPWNTPLLPVKKPGTNDYRPVQDLREVNKRVEDIHPTVPNPYNLLSGLPPSHQWYTVLDLKDAFFCLRLHPTSQPLFAFEWRDPEMGISGQLTWTRLPQGFKNSPTLFNEALHRDLADFRIQHPDLILLQYVDDLLLAATSELDCQQGTRALLQTLGNLGYRASAKKAQICQKQVKYLGYLLKEGQRWLTEARKETVMGQPTPKTPRQLREFLGTAGFCRLWIPGFAEMAAPLYPLTKPGTLFNWGPDQQKAYQEIKQALLTAPALGLPDLTKPFELFVDEKQGYAKGVLTQKLGPWRRPVAYLSKKLDPVAAGWPPCLRMVAAIAVLTKDAGKLTMGQPLVILAPHAVEALVKQPPDRWLSNARMTHYQALLLDTDRVQFGPVVALNPATLLPLPEEGLQHNCLDILAEAHGTRPDLTDQPLPDADHTWYTDGSSLLQEGQRKAGAAVTTETEVIWAKALPAGTSAQRAELIALTQALKMAEGKKLNVYTDSRYAFATAHIHGEIYRRRGWLTSEGKEIKNKDEILALLKALFLPKRLSIIHCPGHQKGHSAEARGNRMADQAARKAAITETPDTSTLLAGKRTADGSEFEKRTADGSEFESPKKKAKVE

SEQ ID NO: 2769 - protein, 2094 aa, synthetic construct
MPAAKRVKLDGGDKKYSIGLDIGTNSVGWAVITDEYKVPSKKFKVLGNTDRHSIKKNLIGALLFDSGETAEATRLKRTARRRYTRRKNRICYLQEIFSNEMAKVDDSFFHRLEESFLVEEDKKHERHPIFGNIVDEVAYHEKYPTIYHLRKKLVDSTDKADLRLIYLALAHMIKFRGHFLIEGDLNPDNSDVDKLFIQLVQTYNQLFEENPINASGVDAKAILSARLSKSRRLENLIAQLPGEKKNGLFGNLIALSLGLTPNFKSNFDLAEDAKLQLSKDTYDDDLDNLLAQIGDQYADLFLAAKNLSDAILLSDILRVNTEITKAPLSASMIKRYDEHHQDLTLLKALVRQQLPEKYKEIFFDQSKNGYAGYIDGGASQEEFYKFIKPILEKMDGTEELLVKLNREDLLRKQRTFDNGSIPHQIHLGELHAILRRQEDFYPFLKDNREKIEKILTFRIPYYVGPLARGNSRFAWMTRKSEETITPWNFEEVVDKGASAQSFIERMTNFDKNLPNEKVLPKHSLLYEYFTVYNELTKVKYVTEGMRKPAFLSGEQKKAIVDLLFKTNRKVTVKQLKEDYFKKIECFDSVEISGVEDRFNASLGTYHDLLKIIKDKDFLDNEENEDILEDIVLTLTLFEDREMIEERLKTYAHLFDDKVMKQLKRRRYTGWGRLSRKLINGIRDKQSGKTILDFLKSDGFANRNFMQLIHDDSLTFKEDIQKAQVSGQGDSLHEHIANLAGSPAIKKGILQTVKVVDELVKVMGRHKPENIVIEMARENQTTQKGQKNSRERMKRIEEGIKELGSQILKEHPVENTQLQNEKLYLYYLQNGRDMYVDQELDINRLSDYDVDHIVPQSFLKDDSIDNKVLTRSDKARGKSDNVPSEEVVKKMKNYWRQLLNAKLITQRKFDNLTKAERGGLSELDKAGFIKRQLVETRQITKHVAQILDSRMNTKYDENDKLIREVKVITLKSKLVSDFRKDFQFYKVREINNYHHAHDAYLNAVVGTALIKKYPKLESEFVYGDYKVYDVRKMIAKSEQEIGKATAKYFFYSNIMNFFKTEITLANGEIRKRPLIETNGETGEIVWDKGRDFATVRKVLSMPQVNIVKKTEVQTGGFSKESILPKRNSDKLIARKKDWDPKKYGGFDSPTVAYSVLVVAKVEKGKSKKLKSVKELLGITIMERSSFEKNPIDFLEAKGYKEVKKDLIIKLPKYSLFELENGRKRMLASAGELQKGNELALPSKYVNFLYLASHYEKLKGSPEDNEQKQLFVEQHKHYLDEIIEQISEFSKRVILADANLDKVLSAYNKHRDKPIREQAENIIHLFTLTNLGAPAAFKYFDTTIDRKRYTSTKEVLDATLIHQSITGLYETRIDLSQLGGDGGGGGGGSPAPGGTLNIEDEHRLHETSKEPDVSLGSTWLSDFPQAWAETGGMGLAVRQAPLIIPLKATSTPVSIKQYPMSQEARLGIKPHIQRLLDQGILVPCQSPWNTPLLPVKKPGTNDYRPVQDLREVNKRVEDIHPTVPNPYNLLSGLPPSHQWYTVLDLKDAFFCLRLHPTSQPLFAFEWRDPEMGISGQLTWTRLPQGFKNSPTLFNEALHRDLADFRIQHPDLILLQYVDDLLLAATSELDCQQGTRALLQTLGNLGYRASAKKAQICQKQVKYLGYLLKEGQRWLTEARKETVMGQPTPKTPRQLREFLGTAGFCRLWIPGFAEMAAPLYPLTKPGTLFNWGPDQQKAYQEIKQALLTAPALGLPDLTKPFELFVDEKQGYAKGVLTQKLGPWRRPVAYLSKKLDPVAAGWPPCLRMVAAIAVLTKDAGKLTMGQPLVILAPHAVEALVKQPPDRWLSNARMTHYQALLLDTDRVQFGPVVALNPATLLPLPEEGLQHNCLDILAEAHGTRPDLTDQPLPDADHTWYTDGSSLLQEGQRKAGAAVTTETEVIWAKALPAGTSAQRAELIALTQALKMAEGKKLNVYTDSRYAFATAHIHGEIYRRRGWLTSEGKEIKNKDEILALLKALFLPKRLSIIHCPGHQKGHSAEARGNRMADQAARKAAITETPDTSTLLAGKRTADGSEFEKRTADGSEFESPKKKAKVE

SEQ ID NO: 2770 - protein, 2094 aa, synthetic construct
MPAAKRVKLDGGDKKYSIGLDIGTNSVGWAVITDEYKVPSKKFKVLGNTDRHSIKKNLIGALLFDSGETAEATRLKRTARRRYTRRKNRICYLQEIFSNEMAKVDDSFFHRLEESFLVEEDKKHERHPIFGNIVDEVAYHEKYPTIYHLRKKLVDSTDKADLRLIYLALAHMIKFRGHFLIEGDLNPDNSDVDKLFIQLVQTYNQLFEENPINASGVDAKAILSARLSKSRRLENLIAQLPGEKKNGLFGNLIALSLGLTPNFKSNFDLAEDAKLQLSKDTYDDDLDNLLAQIGDQYADLFLAAKNLSDAILLSDILRVNTEITKAPLSASMIKRYDEHHQDLTLLKALVRQQLPEKYKEIFFDQSKNGYAGYIDGGASQEEFYKFIKPILEKMDGTEELLVKLNREDLLRKQRTFDNGSIPHQIHLGELHAILRRQEDFYPFLKDNREKIEKILTFRIPYYVGPLARGNSRFAWMTRKSEETITPWNFEEVVDKGASAQSFIERMTNFDKNLPNEKVLPKHSLLYEYFTVYNELTKVKYVTEGMRKPAFLSGEQKKAIVDLLFKTNRKVTVKQLKEDYFKKIECFDSVEISGVEDRFNASLGTYHDLLKIIKDKDFLDNEENEDILEDIVLTLTLFEDREMIEERLKTYAHLFDDKVMKQLKRRRYTGWGRLSRKLINGIRDKQSGKTILDFLKSDGFANRNFMQLIHDDSLTFKEDIQKAQVSGQGDSLHEHIANLAGSPAIKKGILQTVKVVDELVKVMGRHKPENIVIEMARENQTTQKGQKNSRERMKRIEEGIKELGSQILKEHPVENTQLQNEKLYLYYLQNGRDMYVDQELDINRLSDYDVDHIVPQSFLKDDSIDNKVLTRSDKARGKSDNVPSEEVVKKMKNYWRQLLNAKLITQRKFDNLTKAERGGLSELDKAGFIKRQLVETRQITKHVAQILDSRMNTKYDENDKLIREVKVITLKSKLVSDFRKDFQFYKVREINNYHHAHDAYLNAVVGTALIKKYPKLESEFVYGDYKVYDVRKMIAKSEQEIGKATAKYFFYSNIMNFFKTEITLANGEIRKRPLIETNGETGEIVWDKGRDFATVRKVLSMPQVNIVKKTEVQTGGFSKESILPKRNSDKLIARKKDWDPKKYGGFDSPTVAYSVLVVAKVEKGKSKKLKSVKELLGITIMERSSFEKNPIDFLEAKGYKEVKKDLIIKLPKYSLFELENGRKRMLASAGELQKGNELALPSKYVNFLYLASHYEKLKGSPEDNEQKQLFVEQHKHYLDEIIEQISEFSKRVILADANLDKVLSAYNKHRDKPIREQAENIIHLFTLTNLGAPAAFKYFDTTIDRKRYTSTKEVLDATLIHQSITGLYETRIDLSQLGGDGGGGGGSSPAPGGTLNIEDEHRLHETSKEPDVSLGSTWLSDFPQAWAETGGMGLAVRQAPLIIPLKATSTPVSIKQYPMSQEARLGIKPHIQRLLDQGILVPCQSPWNTPLLPVKKPGTNDYRPVQDLREVNKRVEDIHPTVPNPYNLLSGLPPSHQWYTVLDLKDAFFCLRLHPTSQPLFAFEWRDPEMGISGQLTWTRLPQGFKNSPTLFNEALHRDLADFRIQHPDLILLQYVDDLLLAATSELDCQQGTRALLQTLGNLGYRASAKKAQICQKQVKYLGYLLKEGQRWLTEARKETVMGQPTPKTPRQLREFLGTAGFCRLWIPGFAEMAAPLYPLTKPGTLFNWGPDQQKAYQEIKQALLTAPALGLPDLTKPFELFVDEKQGYAKGVLTQKLGPWRRPVAYLSKKLDPVAAGWPPCLRMVAAIAVLTKDAGKLTMGQPLVILAPHAVEALVKQPPDRWLSNARMTHYQALLLDTDRVQFGPVVALNPATLLPLPEEGLQHNCLDILAEAHGTRPDLTDQPLPDADHTWYTDGSSLLQEGQRKAGAAVTTETEVIWAKALPAGTSAQRAELIALTQALKMAEGKKLNVYTDSRYAFATAHIHGEIYRRRGWLTSEGKEIKNKDEILALLKALFLPKRLSIIHCPGHQKGHSAEARGNRMADQAARKAAITETPDTSTLLAGKRTADGSEFEKRTADGSEFESPKKKAKVE

SEQ ID NO: 2771 - protein, 2105 aa, synthetic construct
MPAAKRVKLDGGDKKYSIGLDIGTNSVGWAVITDEYKVPSKKFKVLGNTDRHSIKKNLIGALLFDSGETAEATRLKRTARRRYTRRKNRICYLQEIFSNEMAKVDDSFFHRLEESFLVEEDKKHERHPIFGNIVDEVAYHEKYPTIYHLRKKLVDSTDKADLRLIYLALAHMIKFRGHFLIEGDLNPDNSDVDKLFIQLVQTYNQLFEENPINASGVDAKAILSARLSKSRRLENLIAQLPGEKKNGLFGNLIALSLGLTPNFKSNFDLAEDAKLQLSKDTYDDDLDNLLAQIGDQYADLFLAAKNLSDAILLSDILRVNTEITKAPLSASMIKRYDEHHQDLTLLKALVRQQLPEKYKEIFFDQSKNGYAGYIDGGASQEEFYKFIKPILEKMDGTEELLVKLNREDLLRKQRTFDNGSIPHQIHLGELHAILRRQEDFYPFLKDNREKIEKILTFRIPYYVGPLARGNSRFAWMTRKSEETITPWNFEEVVDKGASAQSFIERMTNFDKNLPNEKVLPKHSLLYEYFTVYNELTKVKYVTEGMRKPAFLSGEQKKAIVDLLFKTNRKVTVKQLKEDYFKKIECFDSVEISGVEDRFNASLGTYHDLLKIIKDKDFLDNEENEDILEDIVLTLTLFEDREMIEERLKTYAHLFDDKVMKQLKRRRYTGWGRLSRKLINGIRDKQSGKTILDFLKSDGFANRNFMQLIHDDSLTFKEDIQKAQVSGQGDSLHEHIANLAGSPAIKKGILQTVKVVDELVKVMGRHKPENIVIEMARENQTTQKGQKNSRERMKRIEEGIKELGSQILKEHPVENTQLQNEKLYLYYLQNGRDMYVDQELDINRLSDYDVDHIVPQSFLKDDSIDNKVLTRSDKARGKSDNVPSEEVVKKMKNYWRQLLNAKLITQRKFDNLTKAERGGLSELDKAGFIKRQLVETRQITKHVAQILDSRMNTKYDENDKLIREVKVITLKSKLVSDFRKDFQFYKVREINNYHHAHDAYLNAVVGTALIKKYPKLESEFVYGDYKVYDVRKMIAKSEQEIGKATAKYFFYSNIMNFFKTEITLANGEIRKRPLIETNGETGEIVWDKGRDFATVRKVLSMPQVNIVKKTEVQTGGFSKESILPKRNSDKLIARKKDWDPKKYGGFDSPTVAYSVLVVAKVEKGKSKKLKSVKELLGITIMERSSFEKNPIDFLEAKGYKEVKKDLIIKLPKYSLFELENGRKRMLASAGELQKGNELALPSKYVNFLYLASHYEKLKGSPEDNEQKQLFVEQHKHYLDEIIEQISEFSKRVILADANLDKVLSAYNKHRDKPIREQAENIIHLFTLTNLGAPAAFKYFDTTIDRKRYTSTKEVLDATLIHQSITGLYETRIDLSQLGGDGGGGGGSGGGGSGGGGSGGGGSGGTLNIEDEHRLHETSKEPDVSLGSTWLSDFPQAWAETGGMGLAVRQAPLIIPLKATSTPVSIKQYPMSQEARLGIKPHIQRLLDQGILVPCQSPWNTPLLPVKKPGTNDYRPVQDLREVNKRVEDIHPTVPNPYNLLSGLPPSHQWYTVLDLKDAFFCLRLHPTSQPLFAFEWRDPEMGISGQLTWTRLPQGFKNSPTLFNEALHRDLADFRIQHPDLILLQYVDDLLLAATSELDCQQGTRALLQTLGNLGYRASAKKAQICQKQVKYLGYLLKEGQRWLTEARKETVMGQPTPKTPRQLREFLGTAGFCRLWIPGFAEMAAPLYPLTKPGTLFNWGPDQQKAYQEIKQALLTAPALGLPDLTKPFELFVDEKQGYAKGVLTQKLGPWRRPVAYLSKKLDPVAAGWPPCLRMVAAIAVLTKDAGKLTMGQPLVILAPHAVEALVKQPPDRWLSNARMTHYQALLLDTDRVQFGPVVALNPATLLPLPEEGLQHNCLDILAEAHGTRPDLTDQPLPDADHTWYTDGSSLLQEGQRKAGAAVTTETEVIWAKALPAGTSAQRAELIALTQALKMAEGKKLNVYTDSRYAFATAHIHGEIYRRRGWLTSEGKEIKNKDEILALLKALFLPKRLSIIHCPGHQKGHSAEARGNRMADQAARKAAITETPDTSTLLAGKRTADGSEFEKRTADGSEFESPKKKAKVE

SEQ ID NO: 2772 - protein, 2100 aa, synthetic construct
MPAAKRVKLDGGDKKYSIGLDIGTNSVGWAVITDEYKVPSKKFKVLGNTDRHSIKKNLIGALLFDSGETAEATRLKRTARRRYTRRKNRICYLQEIFSNEMAKVDDSFFHRLEESFLVEEDKKHERHPIFGNIVDEVAYHEKYPTIYHLRKKLVDSTDKADLRLIYLALAHMIKFRGHFLIEGDLNPDNSDVDKLFIQLVQTYNQLFEENPINASGVDAKAILSARLSKSRRLENLIAQLPGEKKNGLFGNLIALSLGLTPNFKSNFDLAEDAKLQLSKDTYDDDLDNLLAQIGDQYADLFLAAKNLSDAILLSDILRVNTEITKAPLSASMIKRYDEHHQDLTLLKALVRQQLPEKYKEIFFDQSKNGYAGYIDGGASQEEFYKFIKPILEKMDGTEELLVKLNREDLLRKQRTFDNGSIPHQIHLGELHAILRRQEDFYPFLKDNREKIEKILTFRIPYYVGPLARGNSRFAWMTRKSEETITPWNFEEVVDKGASAQSFIERMTNFDKNLPNEKVLPKHSLLYEYFTVYNELTKVKYVTEGMRKPAFLSGEQKKAIVDLLFKTNRKVTVKQLKEDYFKKIECFDSVEISGVEDRFNASLGTYHDLLKIIKDKDFLDNEENEDILEDIVLTLTLFEDREMIEERLKTYAHLFDDKVMKQLKRRRYTGWGRLSRKLINGIRDKQSGKTILDFLKSDGFANRNFMQLIHDDSLTFKEDIQKAQVSGQGDSLHEHIANLAGSPAIKKGILQTVKVVDELVKVMGRHKPENIVIEMARENQTTQKGQKNSRERMKRIEEGIKELGSQILKEHPVENTQLQNEKLYLYYLQNGRDMYVDQELDINRLSDYDVDHIVPQSFLKDDSIDNKVLTRSDKARGKSDNVPSEEVVKKMKNYWRQLLNAKLITQRKFDNLTKAERGGLSELDKAGFIKRQLVETRQITKHVAQILDSRMNTKYDENDKLIREVKVITLKSKLVSDFRKDFQFYKVREINNYHHAHDAYLNAVVGTALIKKYPKLESEFVYGDYKVYDVRKMIAKSEQEIGKATAKYFFYSNIMNFFKTEITLANGEIRKRPLIETNGETGEIVWDKGRDFATVRKVLSMPQVNIVKKTEVQTGGFSKESILPKRNSDKLIARKKDWDPKKYGGFDSPTVAYSVLVVAKVEKGKSKKLKSVKELLGITIMERSSFEKNPIDFLEAKGYKEVKKDLIIKLPKYSLFELENGRKRMLASAGELQKGNELALPSKYVNFLYLASHYEKLKGSPEDNEQKQLFVEQHKHYLDEIIEQISEFSKRVILADANLDKVLSAYNKHRDKPIREQAENIIHLFTLTNLGAPAAFKYFDTTIDRKRYTSTKEVLDATLIHQSITGLYETRIDLSQLGGDGGEAAAKEAAAKEAAAKGGTLNIEDEHRLHETSKEPDVSLGSTWLSDFPQAWAETGGMGLAVRQAPLIIPLKATSTPVSIKQYPMSQEARLGIKPHIQRLLDQGILVPCQSPWNTPLLPVKKPGTNDYRPVQDLREVNKRVEDIHPTVPNPYNLLSGLPPSHQWYTVLDLKDAFFCLRLHPTSQPLFAFEWRDPEMGISGQLTWTRLPQGFKNSPTLFNEALHRDLADFRIQHPDLILLQYVDDLLLAATSELDCQQGTRALLQTLGNLGYRASAKKAQICQKQVKYLGYLLKEGQRWLTEARKETVMGQPTPKTPRQLREFLGTAGFCRLWIPGFAEMAAPLYPLTKPGTLFNWGPDQQKAYQEIKQALLTAPALGLPDLTKPFELFVDEKQGYAKGVLTQKLGPWRRPVAYLSKKLDPVAAGWPPCLRMVAAIAVLTKDAGKLTMGQPLVILAPHAVEALVKQPPDRWLSNARMTHYQALLLDTDRVQFGPVVALNPATLLPLPEEGLQHNCLDILAEAHGTRPDLTDQPLPDADHTWYTDGSSLLQEGQRKAGAAVTTETEVIWAKALPAGTSAQRAELIALTQALKMAEGKKLNVYTDSRYAFATAHIHGEIYRRRGWLTSEGKEIKNKDEILALLKALFLPKRLSIIHCPGHQKGHSAEARGNRMADQAARKAAITETPDTSTLLAGKRTADGSEFEKRTADGSEFESPKKKAKVE

SEQ ID NO: 2773 - protein, 2094 aa, synthetic construct
MPAAKRVKLDGGDKKYSIGLDIGTNSVGWAVITDEYKVPSKKFKVLGNTDRHSIKKNLIGALLFDSGETAEATRLKRTARRRYTRRKNRICYLQEIFSNEMAKVDDSFFHRLEESFLVEEDKKHERHPIFGNIVDEVAYHEKYPTIYHLRKKLVDSTDKADLRLIYLALAHMIKFRGHFLIEGDLNPDNSDVDKLFIQLVQTYNQLFEENPINASGVDAKAILSARLSKSRRLENLIAQLPGEKKNGLFGNLIALSLGLTPNFKSNFDLAEDAKLQLSKDTYDDDLDNLLAQIGDQYADLFLAAKNLSDAILLSDILRVNTEITKAPLSASMIKRYDEHHQDLTLLKALVRQQLPEKYKEIFFDQSKNGYAGYIDGGASQEEFYKFIKPILEKMDGTEELLVKLNREDLLRKQRTFDNGSIPHQIHLGELHAILRRQEDFYPFLKDNREKIEKILTFRIPYYVGPLARGNSRFAWMTRKSEETITPWNFEEVVDKGASAQSFIERMTNFDKNLPNEKVLPKHSLLYEYFTVYNELTKVKYVTEGMRKPAFLSGEQKKAIVDLLFKTNRKVTVKQLKEDYFKKIECFDSVEISGVEDRFNASLGTYHDLLKIIKDKDFLDNEENEDILEDIVLTLTLFEDREMIEERLKTYAHLFDDKVMKQLKRRRYTGWGRLSRKLINGIRDKQSGKTILDFLKSDGFANRNFMQLIHDDSLTFKEDIQKAQVSGQGDSLHEHIANLAGSPAIKKGILQTVKVVDELVKVMGRHKPENIVIEMARENQTTQKGQKNSRERMKRIEEGIKELGSQILKEHPVENTQLQNEKLYLYYLQNGRDMYVDQELDINRLSDYDVDHIVPQSFLKDDSIDNKVLTRSDKARGKSDNVPSEEVVKKMKNYWRQLLNAKLITQRKFDNLTKAERGGLSELDKAGFIKRQLVETRQITKHVAQILDSRMNTKYDENDKLIREVKVITLKSKLVSDFRKDFQFYKVREINNYHHAHDAYLNAVVGTALIKKYPKLESEFVYGDYKVYDVRKMIAKSEQEIGKATAKYFFYSNIMNFFKTEITLANGEIRKRPLIETNGETGEIVWDKGRDFATVRKVLSMPQVNIVKKTEVQTGGFSKESILPKRNSDKLIARKKDWDPKKYGGFDSPTVAYSVLVVAKVEKGKSKKLKSVKELLGITIMERSSFEKNPIDFLEAKGYKEVKKDLIIKLPKYSLFELENGRKRMLASAGELQKGNELALPSKYVNFLYLASHYEKLKGSPEDNEQKQLFVEQHKHYLDEIIEQISEFSKRVILADANLDKVLSAYNKHRDKPIREQAENIIHLFTLTNLGAPAAFKYFDTTIDRKRYTSTKEVLDATLIHQSITGLYETRIDLSQLGGDGGGGGPAPGSSGGTLNIEDEHRLHETSKEPDVSLGSTWLSDFPQAWAETGGMGLAVRQAPLIIPLKATSTPVSIKQYPMSQEARLGIKPHIQRLLDQGILVPCQSPWNTPLLPVKKPGTNDYRPVQDLREVNKRVEDIHPTVPNPYNLLSGLPPSHQWYTVLDLKDAFFCLRLHPTSQPLFAFEWRDPEMGISGQLTWTRLPQGFKNSPTLFNEALHRDLADFRIQHPDLILLQYVDDLLLAATSELDCQQGTRALLQTLGNLGYRASAKKAQICQKQVKYLGYLLKEGQRWLTEARKETVMGQPTPKTPRQLREFLGTAGFCRLWIPGFAEMAAPLYPLTKPGTLFNWGPDQQKAYQEIKQALLTAPALGLPDLTKPFELFVDEKQGYAKGVLTQKLGPWRRPVAYLSKKLDPVAAGWPPCLRMVAAIAVLTKDAGKLTMGQPLVILAPHAVEALVKQPPDRWLSNARMTHYQALLLDTDRVQFGPVVALNPATLLPLPEEGLQHNCLDILAEAHGTRPDLTDQPLPDADHTWYTDGSSLLQEGQRKAGAAVTTETEVIWAKALPAGTSAQRAELIALTQALKMAEGKKLNVYTDSRYAFATAHIHGEIYRRRGWLTSEGKEIKNKDEILALLKALFLPKRLSIIHCPGHQKGHSAEARGNRMADQAARKAAITETPDTSTLLAGKRTADGSEFEKRTADGSEFESPKKKAKVE

SEQ ID NO: 2774 - protein, 2093 aa, synthetic construct
MPAAKRVKLDGGDKKYSIGLDIGTNSVGWAVITDEYKVPSKKFKVLGNTDRHSIKKNLIGALLFDSGETAEATRLKRTARRRYTRRKNRICYLQEIFSNEMAKVDDSFFHRLEESFLVEEDKKHERHPIFGNIVDEVAYHEKYPTIYHLRKKLVDSTDKADLRLIYLALAHMIKFRGHFLIEGDLNPDNSDVDKLFIQLVQTYNQLFEENPINASGVDAKAILSARLSKSRRLENLIAQLPGEKKNGLFGNLIALSLGLTPNFKSNFDLAEDAKLQLSKDTYDDDLDNLLAQIGDQYADLFLAAKNLSDAILLSDILRVNTEITKAPLSASMIKRYDEHHQDLTLLKALVRQQLPEKYKEIFFDQSKNGYAGYIDGGASQEEFYKFIKPILEKMDGTEELLVKLNREDLLRKQRTFDNGSIPHQIHLGELHAILRRQEDFYPFLKDNREKIEKILTFRIPYYVGPLARGNSRFAWMTRKSEETITPWNFEEVVDKGASAQSFIERMTNFDKNLPNEKVLPKHSLLYEYFTVYNELTKVKYVTEGMRKPAFLSGEQKKAIVDLLFKTNRKVTVKQLKEDYFKKIECFDSVEISGVEDRFNASLGTYHDLLKIIKDKDFLDNEENEDILEDIVLTLTLFEDREMIEERLKTYAHLFDDKVMKQLKRRRYTGWGRLSRKLINGIRDKQSGKTILDFLKSDGFANRNFMQLIHDDSLTFKEDIQKAQVSGQGDSLHEHIANLAGSPAIKKGILQTVKVVDELVKVMGRHKPENIVIEMARENQTTQKGQKNSRERMKRIEEGIKELGSQILKEHPVENTQLQNEKLYLYYLQNGRDMYVDQELDINRLSDYDVDHIVPQSFLKDDSIDNKVLTRSDKARGKSDNVPSEEVVKKMKNYWRQLLNAKLITQRKFDNLTKAERGGLSELDKAGFIKRQLVETRQITKHVAQILDSRMNTKYDENDKLIREVKVITLKSKLVSDFRKDFQFYKVREINNYHHAHDAYLNAVVGTALIKKYPKLESEFVYGDYKVYDVRKMIAKSEQEIGKATAKYFFYSNIMNFFKTEITLANGEIRKRPLIETNGETGEIVWDKGRDFATVRKVLSMPQVNIVKKTEVQTGGFSKESILPKRNSDKLIARKKDWDPKKYGGFDSPTVAYSVLVVAKVEKGKSKKLKSVKELLGITIMERSSFEKNPIDFLEAKGYKEVKKDLIIKLPKYSLFELENGRKRMLASAGELQKGNELALPSKYVNFLYLASHYEKLKGSPEDNEQKQLFVEQHKHYLDEIIEQISEFSKRVILADANLDKVLSAYNKHRDKPIREQAENIIHLFTLTNLGAPAAFKYFDTTIDRKRYTSTKEVLDATLIHQSITGLYETRIDLSQLGGDGGGGSEAAAKGGTLNIEDEHRLHETSKEPDVSLGSTWLSDFPQAWAETGGMGLAVRQAPLIIPLKATSTPVSIKQYPMSQEARLGIKPHIQRLLDQGILVPCQSPWNTPLLPVKKPGTNDYRPVQDLREVNKRVEDIHPTVPNPYNLLSGLPPSHQWYTVLDLKDAFFCLRLHPTSQPLFAFEWRDPEMGISGQLTWTRLPQGFKNSPTLFNEALHRDLADFRIQHPDLILLQYVDDLLLAATSELDCQQGTRALLQTLGNLGYRASAKKAQICQKQVKYLGYLLKEGQRWLTEARKETVMGQPTPKTPRQLREFLGTAGFCRLWIPGFAEMAAPLYPLTKPGTLFNWGPDQQKAYQEIKQALLTAPALGLPDLTKPFELFVDEKQGYAKGVLTQKLGPWRRPVAYLSKKLDPVAAGWPPCLRMVAAIAVLTKDAGKLTMGQPLVILAPHAVEALVKQPPDRWLSNARMTHYQALLLDTDRVQFGPVVALNPATLLPLPEEGLQHNCLDILAEAHGTRPDLTDQPLPDADHTWYTDGSSLLQEGQRKAGAAVTTETEVIWAKALPAGTSAQRAELIALTQALKMAEGKKLNVYTDSRYAFATAHIHGEIYRRRGWLTSEGKEIKNKDEILALLKALFLPKRLSIIHCPGHQKGHSAEARGNRMADQAARKAAITETPDTSTLLAGKRTADGSEFEKRTADGSEFESPKKKAKVE

SEQ ID NO: 2775 - protein, 2096 aa, synthetic construct
MPAAKRVKLDGGDKKYSIGLDIGTNSVGWAVITDEYKVPSKKFKVLGNTDRHSIKKNLIGALLFDSGETAEATRLKRTARRRYTRRKNRICYLQEIFSNEMAKVDDSFFHRLEESFLVEEDKKHERHPIFGNIVDEVAYHEKYPTIYHLRKKLVDSTDKADLRLIYLALAHMIKFRGHFLIEGDLNPDNSDVDKLFIQLVQTYNQLFEENPINASGVDAKAILSARLSKSRRLENLIAQLPGEKKNGLFGNLIALSLGLTPNFKSNFDLAEDAKLQLSKDTYDDDLDNLLAQIGDQYADLFLAAKNLSDAILLSDILRVNTEITKAPLSASMIKRYDEHHQDLTLLKALVRQQLPEKYKEIFFDQSKNGYAGYIDGGASQEEFYKFIKPILEKMDGTEELLVKLNREDLLRKQRTFDNGSIPHQIHLGELHAILRRQEDFYPFLKDNREKIEKILTFRIPYYVGPLARGNSRFAWMTRKSEETITPWNFEEVVDKGASAQSFIERMTNFDKNLPNEKVLPKHSLLYEYFTVYNELTKVKYVTEGMRKPAFLSGEQKKAIVDLLFKTNRKVTVKQLKEDYFKKIECFDSVEISGVEDRFNASLGTYHDLLKIIKDKDFLDNEENEDILEDIVLTLTLFEDREMIEERLKTYAHLFDDKVMKQLKRRRYTGWGRLSRKLINGIRDKQSGKTILDFLKSDGFANRNFMQLIHDDSLTFKEDIQKAQVSGQGDSLHEHIANLAGSPAIKKGILQTVKVVDELVKVMGRHKPENIVIEMARENQTTQKGQKNSRERMKRIEEGIKELGSQILKEHPVENTQLQNEKLYLYYLQNGRDMYVDQELDINRLSDYDVDHIVPQSFLKDDSIDNKVLTRSDKARGKSDNVPSEEVVKKMKNYWRQLLNAKLITQRKFDNLTKAERGGLSELDKAGFIKRQLVETRQITKHVAQILDSRMNTKYDENDKLIREVKVITLKSKLVSDFRKDFQFYKVREINNYHHAHDAYLNAVVGTALIKKYPKLESEFVYGDYKVYDVRKMIAKSEQEIGKATAKYFFYSNIMNFFKTEITLANGEIRKRPLIETNGETGEIVWDKGRDFATVRKVLSMPQVNIVKKTEVQTGGFSKESILPKRNSDKLIARKKDWDPKKYGGFDSPTVAYSVLVVAKVEKGKSKKLKSVKELLGITIMERSSFEKNPIDFLEAKGYKEVKKDLIIKLPKYSLFELENGRKRMLASAGELQKGNELALPSKYVNFLYLASHYEKLKGSPEDNEQKQLFVEQHKHYLDEIIEQISEFSKRVILADANLDKVLSAYNKHRDKPIREQAENIIHLFTLTNLGAPAAFKYFDTTIDRKRYTSTKEVLDATLIHQSITGLYETRIDLSQLGGDGGGSSEAAAKPAPGGTLNIEDEHRLHETSKEPDVSLGSTWLSDFPQAWAETGGMGLAVRQAPLIIPLKATSTPVSIKQYPMSQEARLGIKPHIQRLLDQGILVPCQSPWNTPLLPVKKPGTNDYRPVQDLREVNKRVEDIHPTVPNPYNLLSGLPPSHQWYTVLDLKDAFFCLRLHPTSQPLFAFEWRDPEMGISGQLTWTRLPQGFKNSPTLFNEALHRDLADFRIQHPDLILLQYVDDLLLAATSELDCQQGTRALLQTLGNLGYRASAKKAQICQKQVKYLGYLLKEGQRWLTEARKETVMGQPTPKTPRQLREFLGTAGFCRLWIPGFAEMAAPLYPLTKPGTLFNWGPDQQKAYQEIKQALLTAPALGLPDLTKPFELFVDEKQGYAKGVLTQKLGPWRRPVAYLSKKLDPVAAGWPPCLRMVAAIAVLTKDAGKLTMGQPLVILAPHAVEALVKQPPDRWLSNARMTHYQALLLDTDRVQFGPVVALNPATLLPLPEEGLQHNCLDILAEAHGTRPDLTDQPLPDADHTWYTDGSSLLQEGQRKAGAAVTTETEVIWAKALPAGTSAQRAELIALTQALKMAEGKKLNVYTDSRYAFATAHIHGEIYRRRGWLTSEGKEIKNKDEILALLKALFLPKRLSIIHCPGHQKGHSAEARGNRMADQAARKAAITETPDTSTLLAGKRTADGSEFEKRTADGSEFESPKKKAKVE

SEQ ID NO: 2776 - protein, 2096 aa, synthetic construct
MPAAKRVKLDGGDKKYSIGLDIGTNSVGWAVITDEYKVPSKKFKVLGNTDRHSIKKNLIGALLFDSGETAEATRLKRTARRRYTRRKNRICYLQEIFSNEMAKVDDSFFHRLEESFLVEEDKKHERHPIFGNIVDEVAYHEKYPTIYHLRKKLVDSTDKADLRLIYLALAHMIKFRGHFLIEGDLNPDNSDVDKLFIQLVQTYNQLFEENPINASGVDAKAILSARLSKSRRLENLIAQLPGEKKNGLFGNLIALSLGLTPNFKSNFDLAEDAKLQLSKDTYDDDLDNLLAQIGDQYADLFLAAKNLSDAILLSDILRVNTEITKAPLSASMIKRYDEHHQDLTLLKALVRQQLPEKYKEIFFDQSKNGYAGYIDGGASQEEFYKFIKPILEKMDGTEELLVKLNREDLLRKQRTFDNGSIPHQIHLGELHAILRRQEDFYPFLKDNREKIEKILTFRIPYYVGPLARGNSRFAWMTRKSEETITPWNFEEVVDKGASAQSFIERMTNFDKNLPNEKVLPKHSLLYEYFTVYNELTKVKYVTEGMRKPAFLSGEQKKAIVDLLFKTNRKVTVKQLKEDYFKKIECFDSVEISGVEDRFNASLGTYHDLLKIIKDKDFLDNEENEDILEDIVLTLTLFEDREMIEERLKTYAHLFDDKVMKQLKRRRYTGWGRLSRKLINGIRDKQSGKTILDFLKSDGFANRNFMQLIHDDSLTFKEDIQKAQVSGQGDSLHEHIANLAGSPAIKKGILQTVKVVDELVKVMGRHKPENIVIEMARENQTTQKGQKNSRERMKRIEEGIKELGSQILKEHPVENTQLQNEKLYLYYLQNGRDMYVDQELDINRLSDYDVDHIVPQSFLKDDSIDNKVLTRSDKARGKSDNVPSEEVVKKMKNYWRQLLNAKLITQRKFDNLTKAERGGLSELDKAGFIKRQLVETRQITKHVAQILDSRMNTKYDENDKLIREVKVITLKSKLVSDFRKDFQFYKVREINNYHHAHDAYLNAVVGTALIKKYPKLESEFVYGDYKVYDVRKMIAKSEQEIGKATAKYFFYSNIMNFFKTEITLANGEIRKRPLIETNGETGEIVWDKGRDFATVRKVLSMPQVNIVKKTEVQTGGFSKESILPKRNSDKLIARKKDWDPKKYGGFDSPTVAYSVLVVAKVEKGKSKKLKSVKELLGITIMERSSFEKNPIDFLEAKGYKEVKKDLIIKLPKYSLFELENGRKRMLASAGELQKGNELALPSKYVNFLYLASHYEKLKGSPEDNEQKQLFVEQHKHYLDEIIEQISEFSKRVILADANLDKVLSAYNKHRDKPIREQAENIIHLFTLTNLGAPAAFKYFDTTIDRKRYTSTKEVLDATLIHQSITGLYETRIDLSQLGGDGGGGSPAPEAAAKGGTLNIEDEHRLHETSKEPDVSLGSTWLSDFPQAWAETGGMGLAVRQAPLIIPLKATSTPVSIKQYPMSQEARLGIKPHIQRLLDQGILVPCQSPWNTPLLPVKKPGTNDYRPVQDLREVNKRVEDIHPTVPNPYNLLSGLPPSHQWYTVLDLKDAFFCLRLHPTSQPLFAFEWRDPEMGISGQLTWTRLPQGFKNSPTLFNEALHRDLADFRIQHPDLILLQYVDDLLLAATSELDCQQGTRALLQTLGNLGYRASAKKAQICQKQVKYLGYLLKEGQRWLTEARKETVMGQPTPKTPRQLREFLGTAGFCRLWIPGFAEMAAPLYPLTKPGTLFNWGPDQQKAYQEIKQALLTAPALGLPDLTKPFELFVDEKQGYAKGVLTQKLGPWRRPVAYLSKKLDPVAAGWPPCLRMVAAIAVLTKDAGKLTMGQPLVILAPHAVEALVKQPPDRWLSNARMTHYQALLLDTDRVQFGPVVALNPATLLPLPEEGLQHNCLDILAEAHGTRPDLTDQPLPDADHTWYTDGSSLLQEGQRKAGAAVTTETEVIWAKALPAGTSAQRAELIALTQALKMAEGKKLNVYTDSRYAFATAHIHGEIYRRRGWLTSEGKEIKNKDEILALLKALFLPKRLSIIHCPGHQKGHSAEARGNRMADQAARKAAITETPDTSTLLAGKRTADGSEFEKRTADGSEFESPKKKAKVE

SEQ ID NO: 2777 - protein, 2096 aa, synthetic construct
MPAAKRVKLDGGDKKYSIGLDIGTNSVGWAVITDEYKVPSKKFKVLGNTDRHSIKKNLIGALLFDSGETAEATRLKRTARRRYTRRKNRICYLQEIFSNEMAKVDDSFFHRLEESFLVEEDKKHERHPIFGNIVDEVAYHEKYPTIYHLRKKLVDSTDKADLRLIYLALAHMIKFRGHFLIEGDLNPDNSDVDKLFIQLVQTYNQLFEENPINASGVDAKAILSARLSKSRRLENLIAQLPGEKKNGLFGNLIALSLGLTPNFKSNFDLAEDAKLQLSKDTYDDDLDNLLAQIGDQYADLFLAAKNLSDAILLSDILRVNTEITKAPLSASMIKRYDEHHQDLTLLKALVRQQLPEKYKEIFFDQSKNGYAGYIDGGASQEEFYKFIKPILEKMDGTEELLVKLNREDLLRKQRTFDNGSIPHQIHLGELHAILRRQEDFYPFLKDNREKIEKILTFRIPYYVGPLARGNSRFAWMTRKSEETITPWNFEEVVDKGASAQSFIERMTNFDKNLPNEKVLPKHSLLYEYFTVYNELTKVKYVTEGMRKPAFLSGEQKKAIVDLLFKTNRKVTVKQLKEDYFKKIECFDSVEISGVEDRFNASLGTYHDLLKIIKDKDFLDNEENEDILEDIVLTLTLFEDREMIEERLKTYAHLFDDKVMKQLKRRRYTGWGRLSRKLINGIRDKQSGKTILDFLKSDGFANRNFMQLIHDDSLTFKEDIQKAQVSGQGDSLHEHIANLAGSPAIKKGILQTVKVVDELVKVMGRHKPENIVIEMARENQTTQKGQKNSRERMKRIEEGIKELGSQILKEHPVENTQLQNEKLYLYYLQNGRDMYVDQELDINRLSDYDVDHIVPQSFLKDDSIDNKVLTRSDKARGKSDNVPSEEVVKKMKNYWRQLLNAKLITQRKFDNLTKAERGGLSELDKAGFIKRQLVETRQITKHVAQILDSRMNTKYDENDKLIREVKVITLKSKLVSDFRKDFQFYKVREINNYHHAHDAYLNAVVGTALIKKYPKLESEFVYGDYKVYDVRKMIAKSEQEIGKATAKYFFYSNIMNFFKTEITLANGEIRKRPLIETNGETGEIVWDKGRDFATVRKVLSMPQVNIVKKTEVQTGGFSKESILPKRNSDKLIARKKDWDPKKYGGFDSPTVAYSVLVVAKVEKGKSKKLKSVKELLGITIMERSSFEKNPIDFLEAKGYKEVKKDLIIKLPKYSLFELENGRKRMLASAGELQKGNELALPSKYVNFLYLASHYEKLKGSPEDNEQKQLFVEQHKHYLDEIIEQISEFSKRVILADANLDKVLSAYNKHRDKPIREQAENIIHLFTLTNLGAPAAFKYFDTTIDRKRYTSTKEVLDATLIHQSITGLYETRIDLSQLGGDGGGSSGGGEAAAKGGTLNIEDEHRLHETSKEPDVSLGSTWLSDFPQAWAETGGMGLAVRQAPLIIPLKATSTPVSIKQYPMSQEARLGIKPHIQRLLDQGILVPCQSPWNTPLLPVKKPGTNDYRPVQDLREVNKRVEDIHPTVPNPYNLLSGLPPSHQWYTVLDLKDAFFCLRLHPTSQPLFAFEWRDPEMGISGQLTWTRLPQGFKNSPTLFNEALHRDLADFRIQHPDLILLQYVDDLLLAATSELDCQQGTRALLQTLGNLGYRASAKKAQICQKQVKYLGYLLKEGQRWLTEARKETVMGQPTPKTPRQLREFLGTAGFCRLWIPGFAEMAAPLYPLTKPGTLFNWGPDQQKAYQEIKQALLTAPALGLPDLTKPFELFVDEKQGYAKGVLTQKLGPWRRPVAYLSKKLDPVAAGWPPCLRMVAAIAVLTKDAGKLTMGQPLVILAPHAVEALVKQPPDRWLSNARMTHYQALLLDTDRVQFGPVVALNPATLLPLPEEGLQHNCLDILAEAHGTRPDLTDQPLPDADHTWYTDGSSLLQEGQRKAGAAVTTETEVIWAKALPAGTSAQRAELIALTQALKMAEGKKLNVYTDSRYAFATAHIHGEIYRRRGWLTSEGKEIKNKDEILALLKALFLPKRLSIIHCPGHQKGHSAEARGNRMADQAARKAAITETPDTSTLLAGKRTADGSEFEKRTADGSEFESPKKKAKVE

SEQ ID NO: 2778 - protein, 2091 aa, synthetic construct
MPAAKRVKLDGGDKKYSIGLDIGTNSVGWAVITDEYKVPSKKFKVLGNTDRHSIKKNLIGALLFDSGETAEATRLKRTARRRYTRRKNRICYLQEIFSNEMAKVDDSFFHRLEESFLVEEDKKHERHPIFGNIVDEVAYHEKYPTIYHLRKKLVDSTDKADLRLIYLALAHMIKFRGHFLIEGDLNPDNSDVDKLFIQLVQTYNQLFEENPINASGVDAKAILSARLSKSRRLENLIAQLPGEKKNGLFGNLIALSLGLTPNFKSNFDLAEDAKLQLSKDTYDDDLDNLLAQIGDQYADLFLAAKNLSDAILLSDILRVNTEITKAPLSASMIKRYDEHHQDLTLLKALVRQQLPEKYKEIFFDQSKNGYAGYIDGGASQEEFYKFIKPILEKMDGTEELLVKLNREDLLRKQRTFDNGSIPHQIHLGELHAILRRQEDFYPFLKDNREKIEKILTFRIPYYVGPLARGNSRFAWMTRKSEETITPWNFEEVVDKGASAQSFIERMTNFDKNLPNEKVLPKHSLLYEYFTVYNELTKVKYVTEGMRKPAFLSGEQKKAIVDLLFKTNRKVTVKQLKEDYFKKIECFDSVEISGVEDRFNASLGTYHDLLKIIKDKDFLDNEENEDILEDIVLTLTLFEDREMIEERLKTYAHLFDDKVMKQLKRRRYTGWGRLSRKLINGIRDKQSGKTILDFLKSDGFANRNFMQLIHDDSLTFKEDIQKAQVSGQGDSLHEHIANLAGSPAIKKGILQTVKVVDELVKVMGRHKPENIVIEMARENQTTQKGQKNSRERMKRIEEGIKELGSQILKEHPVENTQLQNEKLYLYYLQNGRDMYVDQELDINRLSDYDVDHIVPQSFLKDDSIDNKVLTRSDKARGKSDNVPSEEVVKKMKNYWRQLLNAKLITQRKFDNLTKAERGGLSELDKAGFIKRQLVETRQITKHVAQILDSRMNTKYDENDKLIREVKVITLKSKLVSDFRKDFQFYKVREINNYHHAHDAYLNAVVGTALIKKYPKLESEFVYGDYKVYDVRKMIAKSEQEIGKATAKYFFYSNIMNFFKTEITLANGEIRKRPLIETNGETGEIVWDKGRDFATVRKVLSMPQVNIVKKTEVQTGGFSKESILPKRNSDKLIARKKDWDPKKYGGFDSPTVAYSVLVVAKVEKGKSKKLKSVKELLGITIMERSSFEKNPIDFLEAKGYKEVKKDLIIKLPKYSLFELENGRKRMLASAGELQKGNELALPSKYVNFLYLASHYEKLKGSPEDNEQKQLFVEQHKHYLDEIIEQISEFSKRVILADANLDKVLSAYNKHRDKPIREQAENIIHLFTLTNLGAPAAFKYFDTTIDRKRYTSTKEVLDATLIHQSITGLYETRIDLSQLGGDGGGSSGGSGGTLNIEDEHRLHETSKEPDVSLGSTWLSDFPQAWAETGGMGLAVRQAPLIIPLKATSTPVSIKQYPMSQEARLGIKPHIQRLLDQGILVPCQSPWNTPLLPVKKPGTNDYRPVQDLREVNKRVEDIHPTVPNPYNLLSGLPPSHQWYTVLDLKDAFFCLRLHPTSQPLFAFEWRDPEMGISGQLTWTRLPQGFKNSPTLFNEALHRDLADFRIQHPDLILLQYVDDLLLAATSELDCQQGTRALLQTLGNLGYRASAKKAQICQKQVKYLGYLLKEGQRWLTEARKETVMGQPTPKTPRQLREFLGTAGFCRLWIPGFAEMAAPLYPLTKPGTLFNWGPDQQKAYQEIKQALLTAPALGLPDLTKPFELFVDEKQGYAKGVLTQKLGPWRRPVAYLSKKLDPVAAGWPPCLRMVAAIAVLTKDAGKLTMGQPLVILAPHAVEALVKQPPDRWLSNARMTHYQALLLDTDRVQFGPVVALNPATLLPLPEEGLQHNCLDILAEAHGTRPDLTDQPLPDADHTWYTDGSSLLQEGQRKAGAAVTTETEVIWAKALPAGTSAQRAELIALTQALKMAEGKKLNVYTDSRYAFATAHIHGEIYRRRGWLTSEGKEIKNKDEILALLKALFLPKRLSIIHCPGHQKGHSAEARGNRMADQAARKAAITETPDTSTLLAGKRTADGSEFEKRTADGSEFESPKKKAKVE

SEQ ID NO: 2779 - protein, 2091 aa, synthetic construct
MPAAKRVKLDGGDKKYSIGLDIGTNSVGWAVITDEYKVPSKKFKVLGNTDRHSIKKNLIGALLFDSGETAEATRLKRTARRRYTRRKNRICYLQEIFSNEMAKVDDSFFHRLEESFLVEEDKKHERHPIFGNIVDEVAYHEKYPTIYHLRKKLVDSTDKADLRLIYLALAHMIKFRGHFLIEGDLNPDNSDVDKLFIQLVQTYNQLFEENPINASGVDAKAILSARLSKSRRLENLIAQLPGEKKNGLFGNLIALSLGLTPNFKSNFDLAEDAKLQLSKDTYDDDLDNLLAQIGDQYADLFLAAKNLSDAILLSDILRVNTEITKAPLSASMIKRYDEHHQDLTLLKALVRQQLPEKYKEIFFDQSKNGYAGYIDGGASQEEFYKFIKPILEKMDGTEELLVKLNREDLLRKQRTFDNGSIPHQIHLGELHAILRRQEDFYPFLKDNREKIEKILTFRIPYYVGPLARGNSRFAWMTRKSEETITPWNFEEVVDKGASAQSFIERMTNFDKNLPNEKVLPKHSLLYEYFTVYNELTKVKYVTEGMRKPAFLSGEQKKAIVDLLFKTNRKVTVKQLKEDYFKKIECFDSVEISGVEDRFNASLGTYHDLLKIIKDKDFLDNEENEDILEDIVLTLTLFEDREMIEERLKTYAHLFDDKVMKQLKRRRYTGWGRLSRKLINGIRDKQSGKTILDFLKSDGFANRNFMQLIHDDSLTFKEDIQKAQVSGQGDSLHEHIANLAGSPAIKKGILQTVKVVDELVKVMGRHKPENIVIEMARENQTTQKGQKNSRERMKRIEEGIKELGSQILKEHPVENTQLQNEKLYLYYLQNGRDMYVDQELDINRLSDYDVDHIVPQSFLKDDSIDNKVLTRSDKARGKSDNVPSEEVVKKMKNYWRQLLNAKLITQRKFDNLTKAERGGLSELDKAGFIKRQLVETRQITKHVAQILDSRMNTKYDENDKLIREVKVITLKSKLVSDFRKDFQFYKVREINNYHHAHDAYLNAVVGTALIKKYPKLESEFVYGDYKVYDVRKMIAKSEQEIGKATAKYFFYSNIMNFFKTEITLANGEIRKRPLIETNGETGEIVWDKGRDFATVRKVLSMPQVNIVKKTEVQTGGFSKESILPKRNSDKLIARKKDWDPKKYGGFDSPTVAYSVLVVAKVEKGKSKKLKSVKELLGITIMERSSFEKNPIDFLEAKGYKEVKKDLIIKLPKYSLFELENGRKRMLASAGELQKGNELALPSKYVNFLYLASHYEKLKGSPEDNEQKQLFVEQHKHYLDEIIEQISEFSKRVILADANLDKVLSAYNKHRDKPIREQAENIIHLFTLTNLGAPAAFKYFDTTIDRKRYTSTKEVLDATLIHQSITGLYETRIDLSQLGGDGGGSSGSSGGTLNIEDEHRLHETSKEPDVSLGSTWLSDFPQAWAETGGMGLAVRQAPLIIPLKATSTPVSIKQYPMSQEARLGIKPHIQRLLDQGILVPCQSPWNTPLLPVKKPGTNDYRPVQDLREVNKRVEDIHPTVPNPYNLLSGLPPSHQWYTVLDLKDAFFCLRLHPTSQPLFAFEWRDPEMGISGQLTWTRLPQGFKNSPTLFNEALHRDLADFRIQHPDLILLQYVDDLLLAATSELDCQQGTRALLQTLGNLGYRASAKKAQICQKQVKYLGYLLKEGQRWLTEARKETVMGQPTPKTPRQLREFLGTAGFCRLWIPGFAEMAAPLYPLTKPGTLFNWGPDQQKAYQEIKQALLTAPALGLPDLTKPFELFVDEKQGYAKGVLTQKLGPWRRPVAYLSKKLDPVAAGWPPCLRMVAAIAVLTKDAGKLTMGQPLVILAPHAVEALVKQPPDRWLSNARMTHYQALLLDTDRVQFGPVVALNPATLLPLPEEGLQHNCLDILAEAHGTRPDLTDQPLPDADHTWYTDGSSLLQEGQRKAGAAVTTETEVIWAKALPAGTSAQRAELIALTQALKMAEGKKLNVYTDSRYAFATAHIHGEIYRRRGWLTSEGKEIKNKDEILALLKALFLPKRLSIIHCPGHQKGHSAEARGNRMADQAARKAAITETPDTSTLLAGKRTADGSEFEKRTADGSEFESPKKKAKVE

SEQ ID NO: 2780 - protein, 2091 aa, synthetic construct
MPAAKRVKLDGGDKKYSIGLDIGTNSVGWAVITDEYKVPSKKFKVLGNTDRHSIKKNLIGALLFDSGETAEATRLKRTARRRYTRRKNRICYLQEIFSNEMAKVDDSFFHRLEESFLVEEDKKHERHPIFGNIVDEVAYHEKYPTIYHLRKKLVDSTDKADLRLIYLALAHMIKFRGHFLIEGDLNPDNSDVDKLFIQLVQTYNQLFEENPINASGVDAKAILSARLSKSRRLENLIAQLPGEKKNGLFGNLIALSLGLTPNFKSNFDLAEDAKLQLSKDTYDDDLDNLLAQIGDQYADLFLAAKNLSDAILLSDILRVNTEITKAPLSASMIKRYDEHHQDLTLLKALVRQQLPEKYKEIFFDQSKNGYAGYIDGGASQEEFYKFIKPILEKMDGTEELLVKLNREDLLRKQRTFDNGSIPHQIHLGELHAILRRQEDFYPFLKDNREKIEKILTFRIPYYVGPLARGNSRFAWMTRKSEETITPWNFEEVVDKGASAQSFIERMTNFDKNLPNEKVLPKHSLLYEYFTVYNELTKVKYVTEGMRKPAFLSGEQKKAIVDLLFKTNRKVTVKQLKEDYFKKIECFDSVEISGVEDRFNASLGTYHDLLKIIKDKDFLDNEENEDILEDIVLTLTLFEDREMIEERLKTYAHLFDDKVMKQLKRRRYTGWGRLSRKLINGIRDKQSGKTILDFLKSDGFANRNFMQLIHDDSLTFKEDIQKAQVSGQGDSLHEHIANLAGSPAIKKGILQTVKVVDELVKVMGRHKPENIVIEMARENQTTQKGQKNSRERMKRIEEGIKELGSQILKEHPVENTQLQNEKLYLYYLQNGRDMYVDQELDINRLSDYDVDHIVPQSFLKDDSIDNKVLTRSDKARGKSDNVPSEEVVKKMKNYWRQLLNAKLITQRKFDNLTKAERGGLSELDKAGFIKRQLVETRQITKHVAQILDSRMNTKYDENDKLIREVKVITLKSKLVSDFRKDFQFYKVREINNYHHAHDAYLNAVVGTALIKKYPKLESEFVYGDYKVYDVRKMIAKSEQEIGKATAKYFFYSNIMNFFKTEITLANGEIRKRPLIETNGETGEIVWDKGRDFATVRKVLSMPQVNIVKKTEVQTGGFSKESILPKRNSDKLIARKKDWDPKKYGGFDSPTVAYSVLVVAKVEKGKSKKLKSVKELLGITIMERSSFEKNPIDFLEAKGYKEVKKDLIIKLPKYSLFELENGRKRMLASAGELQKGNELALPSKYVNFLYLASHYEKLKGSPEDNEQKQLFVEQHKHYLDEIIEQISEFSKRVILADANLDKVLSAYNKHRDKPIREQAENIIHLFTLTNLGAPAAFKYFDTTIDRKRYTSTKEVLDATLIHQSITGLYETRIDLSQLGGDGGGGGGGSGGTLNIEDEHRLHETSKEPDVSLGSTWLSDFPQAWAETGGMGLAVRQAPLIIPLKATSTPVSIKQYPMSQEARLGIKPHIQRLLDQGILVPCQSPWNTPLLPVKKPGTNDYRPVQDLREVNKRVEDIHPTVPNPYNLLSGLPPSHQWYTVLDLKDAFFCLRLHPTSQPLFAFEWRDPEMGISGQLTWTRLPQGFKNSPTLFNEALHRDLADFRIQHPDLILLQYVDDLLLAATSELDCQQGTRALLQTLGNLGYRASAKKAQICQKQVKYLGYLLKEGQRWLTEARKETVMGQPTPKTPRQLREFLGKAGFCRLFIPGFAEMAAPLYPLTKPGTLFNWGPDQQKAYQEIKQALLTAPALGLPDLTKPFELFVDEKQGYAKGVLTQKLGPWRRPVAYLSKKLDPVAAGWPPCLRMVAAIAVLTKDAGKLTMGQPLVILAPHAVEALVKQPPDRWLSNARMTHYQALLLDTDRVQFGPVVALNPATLLPLPEEGLQHNCLDILAEAHGTRPDLTDQPLPDADHTWYTDGSSLLQEGQRKAGAAVTTETEVIWAKALPAGTSAQRAELIALTQALKMAEGKKLNVYTDSRYAFATAHIHGEIYRRRGWLTSEGKEIKNKDEILALLKALFLPKRLSIIHCPGHQKGHSAEARGNRMADQAARKAAITETPDTSTLLAGKRTADGSEFEKRTADGSEFESPKKKAKVE

SEQ ID NO: 2781 - protein, 2096 aa, synthetic construct
MPAAKRVKLDGGDKKYSIGLDIGTNSVGWAVITDEYKVPSKKFKVLGNTDRHSIKKNLIGALLFDSGETAEATRLKRTARRRYTRRKNRICYLQEIFSNEMAKVDDSFFHRLEESFLVEEDKKHERHPIFGNIVDEVAYHEKYPTIYHLRKKLVDSTDKADLRLIYLALAHMIKFRGHFLIEGDLNPDNSDVDKLFIQLVQTYNQLFEENPINASGVDAKAILSARLSKSRRLENLIAQLPGEKKNGLFGNLIALSLGLTPNFKSNFDLAEDAKLQLSKDTYDDDLDNLLAQIGDQYADLFLAAKNLSDAILLSDILRVNTEITKAPLSASMIKRYDEHHQDLTLLKALVRQQLPEKYKEIFFDQSKNGYAGYIDGGASQEEFYKFIKPILEKMDGTEELLVKLNREDLLRKQRTFDNGSIPHQIHLGELHAILRRQEDFYPFLKDNREKIEKILTFRIPYYVGPLARGNSRFAWMTRKSEETITPWNFEEVVDKGASAQSFIERMTNFDKNLPNEKVLPKHSLLYEYFTVYNELTKVKYVTEGMRKPAFLSGEQKKAIVDLLFKTNRKVTVKQLKEDYFKKIECFDSVEISGVEDRFNASLGTYHDLLKIIKDKDFLDNEENEDILEDIVLTLTLFEDREMIEERLKTYAHLFDDKVMKQLKRRRYTGWGRLSRKLINGIRDKQSGKTILDFLKSDGFANRNFMQLIHDDSLTFKEDIQKAQVSGQGDSLHEHIANLAGSPAIKKGILQTVKVVDELVKVMGRHKPENIVIEMARENQTTQKGQKNSRERMKRIEEGIKELGSQILKEHPVENTQLQNEKLYLYYLQNGRDMYVDQELDINRLSDYDVDHIVPQSFLKDDSIDNKVLTRSDKARGKSDNVPSEEVVKKMKNYWRQLLNAKLITQRKFDNLTKAERGGLSELDKAGFIKRQLVETRQITKHVAQILDSRMNTKYDENDKLIREVKVITLKSKLVSDFRKDFQFYKVREINNYHHAHDAYLNAVVGTALIKKYPKLESEFVYGDYKVYDVRKMIAKSEQEIGKATAKYFFYSNIMNFFKTEITLANGEIRKRPLIETNGETGEIVWDKGRDFATVRKVLSMPQVNIVKKTEVQTGGFSKESILPKRNSDKLIARKKDWDPKKYGGFDSPTVAYSVLVVAKVEKGKSKKLKSVKELLGITIMERSSFEKNPIDFLEAKGYKEVKKDLIIKLPKYSLFELENGRKRMLASAGELQKGNELALPSKYVNFLYLASHYEKLKGSPEDNEQKQLFVEQHKHYLDEIIEQISEFSKRVILADANLDKVLSAYNKHRDKPIREQAENIIHLFTLTNLGAPAAFKYFDTTIDRKRYTSTKEVLDATLIHQSITGLYETRIDLSQLGGDGGEAAAKPAPGSSGGTLNIEDEHRLHETSKEPDVSLGSTWLSDFPQAWAETGGMGLAVRQAPLIIPLKATSTPVSIKQYPMSQEARLGIKPHIQRLLDQGILVPCQSPWNTPLLPVKKPGTNDYRPVQDLREVNKRVEDIHPTVPNPYNLLSGLPPSHQWYTVLDLKDAFFCLRLHPTSQPLFAFEWRDPEMGISGQLTWTRLPQGFKNSPTLFNEALHRDLADFRIQHPDLILLQYVDDLLLAATSELDCQQGTRALLQTLGNLGYRASAKKAQICQKQVKYLGYLLKEGQRWLTEARKETVMGQPTPKTPRQLREFLGKAGFCRLFIPGFAEMAAPLYPLTKPGTLFNWGPDQQKAYQEIKQALLTAPALGLPDLTKPFELFVDEKQGYAKGVLTQKLGPWRRPVAYLSKKLDPVAAGWPPCLRMVAAIAVLTKDAGKLTMGQPLVILAPHAVEALVKQPPDRWLSNARMTHYQALLLDTDRVQFGPVVALNPATLLPLPEEGLQHNCLDILAEAHGTRPDLTDQPLPDADHTWYTDGSSLLQEGQRKAGAAVTTETEVIWAKALPAGTSAQRAELIALTQALKMAEGKKLNVYTDSRYAFATAHIHGEIYRRRGWLTSEGKEIKNKDEILALLKALFLPKRLSIIHCPGHQKGHSAEARGNRMADQAARKAAITETPDTSTLLAGKRTADGSEFEKRTADGSEFESPKKKAKVE

SEQ ID NO: 2782 - protein, 2096 aa, synthetic construct
MPAAKRVKLDGGDKKYSIGLDIGTNSVGWAVITDEYKVPSKKFKVLGNTDRHSIKKNLIGALLFDSGETAEATRLKRTARRRYTRRKNRICYLQEIFSNEMAKVDDSFFHRLEESFLVEEDKKHERHPIFGNIVDEVAYHEKYPTIYHLRKKLVDSTDKADLRLIYLALAHMIKFRGHFLIEGDLNPDNSDVDKLFIQLVQTYNQLFEENPINASGVDAKAILSARLSKSRRLENLIAQLPGEKKNGLFGNLIALSLGLTPNFKSNFDLAEDAKLQLSKDTYDDDLDNLLAQIGDQYADLFLAAKNLSDAILLSDILRVNTEITKAPLSASMIKRYDEHHQDLTLLKALVRQQLPEKYKEIFFDQSKNGYAGYIDGGASQEEFYKFIKPILEKMDGTEELLVKLNREDLLRKQRTFDNGSIPHQIHLGELHAILRRQEDFYPFLKDNREKIEKILTFRIPYYVGPLARGNSRFAWMTRKSEETITPWNFEEVVDKGASAQSFIERMTNFDKNLPNEKVLPKHSLLYEYFTVYNELTKVKYVTEGMRKPAFLSGEQKKAIVDLLFKTNRKVTVKQLKEDYFKKIECFDSVEISGVEDRFNASLGTYHDLLKIIKDKDFLDNEENEDILEDIVLTLTLFEDREMIEERLKTYAHLFDDKVMKQLKRRRYTGWGRLSRKLINGIRDKQSGKTILDFLKSDGFANRNFMQLIHDDSLTFKEDIQKAQVSGQGDSLHEHIANLAGSPAIKKGILQTVKVVDELVKVMGRHKPENIVIEMARENQTTQKGQKNSRERMKRIEEGIKELGSQILKEHPVENTQLQNEKLYLYYLQNGRDMYVDQELDINRLSDYDVDHIVPQSFLKDDSIDNKVLTRSDKARGKSDNVPSEEVVKKMKNYWRQLLNAKLITQRKFDNLTKAERGGLSELDKAGFIKRQLVETRQITKHVAQILDSRMNTKYDENDKLIREVKVITLKSKLVSDFRKDFQFYKVREINNYHHAHDAYLNAVVGTALIKKYPKLESEFVYGDYKVYDVRKMIAKSEQEIGKATAKYFFYSNIMNFFKTEITLANGEIRKRPLIETNGETGEIVWDKGRDFATVRKVLSMPQVNIVKKTEVQTGGFSKESILPKRNSDKLIARKKDWDPKKYGGFDSPTVAYSVLVVAKVEKGKSKKLKSVKELLGITIMERSSFEKNPIDFLEAKGYKEVKKDLIIKLPKYSLFELENGRKRMLASAGELQKGNELALPSKYVNFLYLASHYEKLKGSPEDNEQKQLFVEQHKHYLDEIIEQISEFSKRVILADANLDKVLSAYNKHRDKPIREQAENIIHLFTLTNLGAPAAFKYFDTTIDRKRYTSTKEVLDATLIHQSITGLYETRIDLSQLGGDGGEAAAKGGSPAPGGTLNIEDEHRLHETSKEPDVSLGSTWLSDFPQAWAETGGMGLAVRQAPLIIPLKATSTPVSIKQYPMSQEARLGIKPHIQRLLDQGILVPCQSPWNTPLLPVKKPGTNDYRPVQDLREVNKRVEDIHPTVPNPYNLLSGLPPSHQWYTVLDLKDAFFCLRLHPTSQPLFAFEWRDPEMGISGQLTWTRLPQGFKNSPTLFNEALHRDLADFRIQHPDLILLQYVDDLLLAATSELDCQQGTRALLQTLGNLGYRASAKKAQICQKQVKYLGYLLKEGQRWLTEARKETVMGQPTPKTPRQLREFLGKAGFCRLFIPGFAEMAAPLYPLTKPGTLFNWGPDQQKAYQEIKQALLTAPALGLPDLTKPFELFVDEKQGYAKGVLTQKLGPWRRPVAYLSKKLDPVAAGWPPCLRMVAAIAVLTKDAGKLTMGQPLVILAPHAVEALVKQPPDRWLSNARMTHYQALLLDTDRVQFGPVVALNPATLLPLPEEGLQHNCLDILAEAHGTRPDLTDQPLPDADHTWYTDGSSLLQEGQRKAGAAVTTETEVIWAKALPAGTSAQRAELIALTQALKMAEGKKLNVYTDSRYAFATAHIHGEIYRRRGWLTSEGKEIKNKDEILALLKALFLPKRLSIIHCPGHQKGHSAEARGNRMADQAARKAAITETPDTSTLLAGKRTADGSEFEKRTADGSEFESPKKKAKVE

SEQ ID NO: 2783 - protein, 2093 aa, synthetic construct
MPAAKRVKLDGGDKKYSIGLDIGTNSVGWAVITDEYKVPSKKFKVLGNTDRHSIKKNLIGALLFDSGETAEATRLKRTARRRYTRRKNRICYLQEIFSNEMAKVDDSFFHRLEESFLVEEDKKHERHPIFGNIVDEVAYHEKYPTIYHLRKKLVDSTDKADLRLIYLALAHMIKFRGHFLIEGDLNPDNSDVDKLFIQLVQTYNQLFEENPINASGVDAKAILSARLSKSRRLENLIAQLPGEKKNGLFGNLIALSLGLTPNFKSNFDLAEDAKLQLSKDTYDDDLDNLLAQIGDQYADLFLAAKNLSDAILLSDILRVNTEITKAPLSASMIKRYDEHHQDLTLLKALVRQQLPEKYKEIFFDQSKNGYAGYIDGGASQEEFYKFIKPILEKMDGTEELLVKLNREDLLRKQRTFDNGSIPHQIHLGELHAILRRQEDFYPFLKDNREKIEKILTFRIPYYVGPLARGNSRFAWMTRKSEETITPWNFEEVVDKGASAQSFIERMTNFDKNLPNEKVLPKHSLLYEYFTVYNELTKVKYVTEGMRKPAFLSGEQKKAIVDLLFKTNRKVTVKQLKEDYFKKIECFDSVEISGVEDRFNASLGTYHDLLKIIKDKDFLDNEENEDILEDIVLTLTLFEDREMIEERLKTYAHLFDDKVMKQLKRRRYTGWGRLSRKLINGIRDKQSGKTILDFLKSDGFANRNFMQLIHDDSLTFKEDIQKAQVSGQGDSLHEHIANLAGSPAIKKGILQTVKVVDELVKVMGRHKPENIVIEMARENQTTQKGQKNSRERMKRIEEGIKELGSQILKEHPVENTQLQNEKLYLYYLQNGRDMYVDQELDINRLSDYDVDHIVPQSFLKDDSIDNKVLTRSDKARGKSDNVPSEEVVKKMKNYWRQLLNAKLITQRKFDNLTKAERGGLSELDKAGFIKRQLVETRQITKHVAQILDSRMNTKYDENDKLIREVKVITLKSKLVSDFRKDFQFYKVREINNYHHAHDAYLNAVVGTALIKKYPKLESEFVYGDYKVYDVRKMIAKSEQEIGKATAKYFFYSNIMNFFKTEITLANGEIRKRPLIETNGETGEIVWDKGRDFATVRKVLSMPQVNIVKKTEVQTGGFSKESILPKRNSDKLIARKKDWDPKKYGGFDSPTVAYSVLVVAKVEKGKSKKLKSVKELLGITIMERSSFEKNPIDFLEAKGYKEVKKDLIIKLPKYSLFELENGRKRMLASAGELQKGNELALPSKYVNFLYLASHYEKLKGSPEDNEQKQLFVEQHKHYLDEIIEQISEFSKRVILADANLDKVLSAYNKHRDKPIREQAENIIHLFTLTNLGAPAAFKYFDTTIDRKRYTSTKEVLDATLIHQSITGLYETRIDLSQLGGDGGEAAAKGGSGGTLNIEDEHRLHETSKEPDVSLGSTWLSDFPQAWAETGGMGLAVRQAPLIIPLKATSTPVSIKQYPMSQEARLGIKPHIQRLLDQGILVPCQSPWNTPLLPVKKPGTNDYRPVQDLREVNKRVEDIHPTVPNPYNLLSGLPPSHQWYTVLDLKDAFFCLRLHPTSQPLFAFEWRDPEMGISGQLTWTRLPQGFKNSPTLFNEALHRDLADFRIQHPDLILLQYVDDLLLAATSELDCQQGTRALLQTLGNLGYRASAKKAQICQKQVKYLGYLLKEGQRWLTEARKETVMGQPTPKTPRQLREFLGKAGFCRLFIPGFAEMAAPLYPLTKPGTLFNWGPDQQKAYQEIKQALLTAPALGLPDLTKPFELFVDEKQGYAKGVLTQKLGPWRRPVAYLSKKLDPVAAGWPPCLRMVAAIAVLTKDAGKLTMGQPLVILAPHAVEALVKQPPDRWLSNARMTHYQALLLDTDRVQFGPVVALNPATLLPLPEEGLQHNCLDILAEAHGTRPDLTDQPLPDADHTWYTDGSSLLQEGQRKAGAAVTTETEVIWAKALPAGTSAQRAELIALTQALKMAEGKKLNVYTDSRYAFATAHIHGEIYRRRGWLTSEGKEIKNKDEILALLKALFLPKRLSIIHCPGHQKGHSAEARGNRMADQAARKAAITETPDTSTLLAGKRTADGSEFEKRTADGSEFESPKKKAKVE

SEQ ID NO: 2784 - protein, 2131 aa, synthetic construct
MPAAKRVKLDGGDKKYSIGLDIGTNSVGWAVITDEYKVPSKKFKVLGNTDRHSIKKNLIGALLFDSGETAEATRLKRTARRRYTRRKNRICYLQEIFSNEMAKVDDSFFHRLEESFLVEEDKKHERHPIFGNIVDEVAYHEKYPTIYHLRKKLVDSTDKADLRLIYLALAHMIKFRGHFLIEGDLNPDNSDVDKLFIQLVQTYNQLFEENPINASGVDAKAILSARLSKSRRLENLIAQLPGEKKNGLFGNLIALSLGLTPNFKSNFDLAEDAKLQLSKDTYDDDLDNLLAQIGDQYADLFLAAKNLSDAILLSDILRVNTEITKAPLSASMIKRYDEHHQDLTLLKALVRQQLPEKYKEIFFDQSKNGYAGYIDGGASQEEFYKFIKPILEKMDGTEELLVKLNREDLLRKQRTFDNGSIPHQIHLGELHAILRRQEDFYPFLKDNREKIEKILTFRIPYYVGPLARGNSRFAWMTRKSEETITPWNFEEVVDKGASAQSFIERMTNFDKNLPNEKVLPKHSLLYEYFTVYNELTKVKYVTEGMRKPAFLSGEQKKAIVDLLFKTNRKVTVKQLKEDYFKKIECFDSVEISGVEDRFNASLGTYHDLLKIIKDKDFLDNEENEDILEDIVLTLTLFEDREMIEERLKTYAHLFDDKVMKQLKRRRYTGWGRLSRKLINGIRDKQSGKTILDFLKSDGFANRNFMQLIHDDSLTFKEDIQKAQVSGQGDSLHEHIANLAGSPAIKKGILQTVKVVDELVKVMGRHKPENIVIEMARENQTTQKGQKNSRERMKRIEEGIKELGSQILKEHPVENTQLQNEKLYLYYLQNGRDMYVDQELDINRLSDYDVDHIVPQSFLKDDSIDNKVLTRSDKARGKSDNVPSEEVVKKMKNYWRQLLNAKLITQRKFDNLTKAERGGLSELDKAGFIKRQLVETRQITKHVAQILDSRMNTKYDENDKLIREVKVITLKSKLVSDFRKDFQFYKVREINNYHHAHDAYLNAVVGTALIKKYPKLESEFVYGDYKVYDVRKMIAKSEQEIGKATAKYFFYSNIMNFFKTEITLANGEIRKRPLIETNGETGEIVWDKGRDFATVRKVLSMPQVNIVKKTEVQTGGFSKESILPKRNSDKLIARKKDWDPKKYGGFDSPTVAYSVLVVAKVEKGKSKKLKSVKELLGITIMERSSFEKNPIDFLEAKGYKEVKKDLIIKLPKYSLFELENGRKRMLASAGELQKGNELALPSKYVNFLYLASHYEKLKGSPEDNEQKQLFVEQHKHYLDEIIEQISEFSKRVILADANLDKVLSAYNKHRDKPIREQAENIIHLFTLTNLGAPAAFKYFDTTIDRKRYTSTKEVLDATLIHQSITGLYETRIDLSQLGGDGGAEAAAKEAAAKEAAAKEAAAKALEAEAAAKEAAAKEAAAKEAAAKAGGTLNIEDEHRLHETSKEPDVSLGSTWLSDFPQAWAETGGMGLAVRQAPLIIPLKATSTPVSIKQYPMSQEARLGIKPHIQRLLDQGILVPCQSPWNTPLLPVKKPGTNDYRPVQDLREVNKRVEDIHPTVPNPYNLLSGLPPSHQWYTVLDLKDAFFCLRLHPTSQPLFAFEWRDPEMGISGQLTWTRLPQGFKNSPTLFNEALHRDLADFRIQHPDLILLQYVDDLLLAATSELDCQQGTRALLQTLGNLGYRASAKKAQICQKQVKYLGYLLKEGQRWLTEARKETVMGQPTPKTPRQLREFLGKAGFCRLFIPGFAEMAAPLYPLTKPGTLFNWGPDQQKAYQEIKQALLTAPALGLPDLTKPFELFVDEKQGYAKGVLTQKLGPWRRPVAYLSKKLDPVAAGWPPCLRMVAAIAVLTKDAGKLTMGQPLVILAPHAVEALVKQPPDRWLSNARMTHYQALLLDTDRVQFGPVVALNPATLLPLPEEGLQHNCLDILAEAHGTRPDLTDQPLPDADHTWYTDGSSLLQEGQRKAGAAVTTETEVIWAKALPAGTSAQRAELIALTQALKMAEGKKLNVYTDSRYAFATAHIHGEIYRRRGWLTSEGKEIKNKDEILALLKALFLPKRLSIIHCPGHQKGHSAEARGNRMADQAARKAAITETPDTSTLLAGKRTADGSEFEKRTADGSEFESPKKKAKVE

SEQ ID NO: 2785 - protein, 2096 aa, synthetic construct
MPAAKRVKLDGGDKKYSIGLDIGTNSVGWAVITDEYKVPSKKFKVLGNTDRHSIKKNLIGALLFDSGETAEATRLKRTARRRYTRRKNRICYLQEIFSNEMAKVDDSFFHRLEESFLVEEDKKHERHPIFGNIVDEVAYHEKYPTIYHLRKKLVDSTDKADLRLIYLALAHMIKFRGHFLIEGDLNPDNSDVDKLFIQLVQTYNQLFEENPINASGVDAKAILSARLSKSRRLENLIAQLPGEKKNGLFGNLIALSLGLTPNFKSNFDLAEDAKLQLSKDTYDDDLDNLLAQIGDQYADLFLAAKNLSDAILLSDILRVNTEITKAPLSASMIKRYDEHHQDLTLLKALVRQQLPEKYKEIFFDQSKNGYAGYIDGGASQEEFYKFIKPILEKMDGTEELLVKLNREDLLRKQRTFDNGSIPHQIHLGELHAILRRQEDFYPFLKDNREKIEKILTFRIPYYVGPLARGNSRFAWMTRKSEETITPWNFEEVVDKGASAQSFIERMTNFDKNLPNEKVLPKHSLLYEYFTVYNELTKVKYVTEGMRKPAFLSGEQKKAIVDLLFKTNRKVTVKQLKEDYFKKIECFDSVEISGVEDRFNASLGTYHDLLKIIKDKDFLDNEENEDILEDIVLTLTLFEDREMIEERLKTYAHLFDDKVMKQLKRRRYTGWGRLSRKLINGIRDKQSGKTILDFLKSDGFANRNFMQLIHDDSLTFKEDIQKAQVSGQGDSLHEHIANLAGSPAIKKGILQTVKVVDELVKVMGRHKPENIVIEMARENQTTQKGQKNSRERMKRIEEGIKELGSQILKEHPVENTQLQNEKLYLYYLQNGRDMYVDQELDINRLSDYDVDHIVPQSFLKDDSIDNKVLTRSDKARGKSDNVPSEEVVKKMKNYWRQLLNAKLITQRKFDNLTKAERGGLSELDKAGFIKRQLVETRQITKHVAQILDSRMNTKYDENDKLIREVKVITLKSKLVSDFRKDFQFYKVREINNYHHAHDAYLNAVVGTALIKKYPKLESEFVYGDYKVYDVRKMIAKSEQEIGKATAKYFFYSNIMNFFKTEITLANGEIRKRPLIETNGETGEIVWDKGRDFATVRKVLSMPQVNIVKKTEVQTGGFSKESILPKRNSDKLIARKKDWDPKKYGGFDSPTVAYSVLVVAKVEKGKSKKLKSVKELLGITIMERSSFEKNPIDFLEAKGYKEVKKDLIIKLPKYSLFELENGRKRMLASAGELQKGNELALPSKYVNFLYLASHYEKLKGSPEDNEQKQLFVEQHKHYLDEIIEQISEFSKRVILADANLDKVLSAYNKHRDKPIREQAENIIHLFTLTNLGAPAAFKYFDTTIDRKRYTSTKEVLDATLIHQSITGLYETRIDLSQLGGDGGEAAAKGSSGGGGGTLNIEDEHRLHETSKEPDVSLGSTWLSDFPQAWAETGGMGLAVRQAPLIIPLKATSTPVSIKQYPMSQEARLGIKPHIQRLLDQGILVPCQSPWNTPLLPVKKPGTNDYRPVQDLREVNKRVEDIHPTVPNPYNLLSGLPPSHQWYTVLDLKDAFFCLRLHPTSQPLFAFEWRDPEMGISGQLTWTRLPQGFKNSPTLFNEALHRDLADFRIQHPDLILLQYVDDLLLAATSELDCQQGTRALLQTLGNLGYRASAKKAQICQKQVKYLGYLLKEGQRWLTEARKETVMGQPTPKTPRQLREFLGKAGFCRLFIPGFAEMAAPLYPLTKPGTLFNWGPDQQKAYQEIKQALLTAPALGLPDLTKPFELFVDEKQGYAKGVLTQKLGPWRRPVAYLSKKLDPVAAGWPPCLRMVAAIAVLTKDAGKLTMGQPLVILAPHAVEALVKQPPDRWLSNARMTHYQALLLDTDRVQFGPVVALNPATLLPLPEEGLQHNCLDILAEAHGTRPDLTDQPLPDADHTWYTDGSSLLQEGQRKAGAAVTTETEVIWAKALPAGTSAQRAELIALTQALKMAEGKKLNVYTDSRYAFATAHIHGEIYRRRGWLTSEGKEIKNKDEILALLKALFLPKRLSIIHCPGHQKGHSAEARGNRMADQAARKAAITETPDTSTLLAGKRTADGSEFEKRTADGSEFESPKKKAKVE

SEQ ID NO: 2786 - protein, 2096 aa, synthetic construct
MPAAKRVKLDGGDKKYSIGLDIGTNSVGWAVITDEYKVPSKKFKVLGNTDRHSIKKNLIGALLFDSGETAEATRLKRTARRRYTRRKNRICYLQEIFSNEMAKVDDSFFHRLEESFLVEEDKKHERHPIFGNIVDEVAYHEKYPTIYHLRKKLVDSTDKADLRLIYLALAHMIKFRGHFLIEGDLNPDNSDVDKLFIQLVQTYNQLFEENPINASGVDAKAILSARLSKSRRLENLIAQLPGEKKNGLFGNLIALSLGLTPNFKSNFDLAEDAKLQLSKDTYDDDLDNLLAQIGDQYADLFLAAKNLSDAILLSDILRVNTEITKAPLSASMIKRYDEHHQDLTLLKALVRQQLPEKYKEIFFDQSKNGYAGYIDGGASQEEFYKFIKPILEKMDGTEELLVKLNREDLLRKQRTFDNGSIPHQIHLGELHAILRRQEDFYPFLKDNREKIEKILTFRIPYYVGPLARGNSRFAWMTRKSEETITPWNFEEVVDKGASAQSFIERMTNFDKNLPNEKVLPKHSLLYEYFTVYNELTKVKYVTEGMRKPAFLSGEQKKAIVDLLFKTNRKVTVKQLKEDYFKKIECFDSVEISGVEDRFNASLGTYHDLLKIIKDKDFLDNEENEDILEDIVLTLTLFEDREMIEERLKTYAHLFDDKVMKQLKRRRYTGWGRLSRKLINGIRDKQSGKTILDFLKSDGFANRNFMQLIHDDSLTFKEDIQKAQVSGQGDSLHEHIANLAGSPAIKKGILQTVKVVDELVKVMGRHKPENIVIEMARENQTTQKGQKNSRERMKRIEEGIKELGSQILKEHPVENTQLQNEKLYLYYLQNGRDMYVDQELDINRLSDYDVDHIVPQSFLKDDSIDNKVLTRSDKARGKSDNVPSEEVVKKMKNYWRQLLNAKLITQRKFDNLTKAERGGLSELDKAGFIKRQLVETRQITKHVAQILDSRMNTKYDENDKLIREVKVITLKSKLVSDFRKDFQFYKVREINNYHHAHDAYLNAVVGTALIKKYPKLESEFVYGDYKVYDVRKMIAKSEQEIGKATAKYFFYSNIMNFFKTEITLANGEIRKRPLIETNGETGEIVWDKGRDFATVRKVLSMPQVNIVKKTEVQTGGFSKESILPKRNSDKLIARKKDWDPKKYGGFDSPTVAYSVLVVAKVEKGKSKKLKSVKELLGITIMERSSFEKNPIDFLEAKGYKEVKKDLIIKLPKYSLFELENGRKRMLASAGELQKGNELALPSKYVNFLYLASHYEKLKGSPEDNEQKQLFVEQHKHYLDEIIEQISEFSKRVILADANLDKVLSAYNKHRDKPIREQAENIIHLFTLTNLGAPAAFKYFDTTIDRKRYTSTKEVLDATLIHQSITGLYETRIDLSQLGGDGGPAPGGSEAAAKGGTLNIEDEHRLHETSKEPDVSLGSTWLSDFPQAWAETGGMGLAVRQAPLIIPLKATSTPVSIKQYPMSQEARLGIKPHIQRLLDQGILVPCQSPWNTPLLPVKKPGTNDYRPVQDLREVNKRVEDIHPTVPNPYNLLSGLPPSHQWYTVLDLKDAFFCLRLHPTSQPLFAFEWRDPEMGISGQLTWTRLPQGFKNSPTLFNEALHRDLADFRIQHPDLILLQYVDDLLLAATSELDCQQGTRALLQTLGNLGYRASAKKAQICQKQVKYLGYLLKEGQRWLTEARKETVMGQPTPKTPRQLREFLGKAGFCRLFIPGFAEMAAPLYPLTKPGTLFNWGPDQQKAYQEIKQALLTAPALGLPDLTKPFELFVDEKQGYAKGVLTQKLGPWRRPVAYLSKKLDPVAAGWPPCLRMVAAIAVLTKDAGKLTMGQPLVILAPHAVEALVKQPPDRWLSNARMTHYQALLLDTDRVQFGPVVALNPATLLPLPEEGLQHNCLDILAEAHGTRPDLTDQPLPDADHTWYTDGSSLLQEGQRKAGAAVTTETEVIWAKALPAGTSAQRAELIALTQALKMAEGKKLNVYTDSRYAFATAHIHGEIYRRRGWLTSEGKEIKNKDEILALLKALFLPKRLSIIHCPGHQKGHSAEARGNRMADQAARKAAITETPDTSTLLAGKRTADGSEFEKRTADGSEFESPKKKAKVE

SEQ ID NO: 2787 - protein, 2096 aa, synthetic construct
MPAAKRVKLDGGDKKYSIGLDIGTNSVGWAVITDEYKVPSKKFKVLGNTDRHSIKKNLIGALLFDSGETAEATRLKRTARRRYTRRKNRICYLQEIFSNEMAKVDDSFFHRLEESFLVEEDKKHERHPIFGNIVDEVAYHEKYPTIYHLRKKLVDSTDKADLRLIYLALAHMIKFRGHFLIEGDLNPDNSDVDKLFIQLVQTYNQLFEENPINASGVDAKAILSARLSKSRRLENLIAQLPGEKKNGLFGNLIALSLGLTPNFKSNFDLAEDAKLQLSKDTYDDDLDNLLAQIGDQYADLFLAAKNLSDAILLSDILRVNTEITKAPLSASMIKRYDEHHQDLTLLKALVRQQLPEKYKEIFFDQSKNGYAGYIDGGASQEEFYKFIKPILEKMDGTEELLVKLNREDLLRKQRTFDNGSIPHQIHLGELHAILRRQEDFYPFLKDNREKIEKILTFRIPYYVGPLARGNSRFAWMTRKSEETITPWNFEEVVDKGASAQSFIERMTNFDKNLPNEKVLPKHSLLYEYFTVYNELTKVKYVTEGMRKPAFLSGEQKKAIVDLLFKTNRKVTVKQLKEDYFKKIECFDSVEISGVEDRFNASLGTYHDLLKIIKDKDFLDNEENEDILEDIVLTLTLFEDREMIEERLKTYAHLFDDKVMKQLKRRRYTGWGRLSRKLINGIRDKQSGKTILDFLKSDGFANRNFMQLIHDDSLTFKEDIQKAQVSGQGDSLHEHIANLAGSPAIKKGILQTVKVVDELVKVMGRHKPENIVIEMARENQTTQKGQKNSRERMKRIEEGIKELGSQILKEHPVENTQLQNEKLYLYYLQNGRDMYVDQELDINRLSDYDVDHIVPQSFLKDDSIDNKVLTRSDKARGKSDNVPSEEVVKKMKNYWRQLLNAKLITQRKFDNLTKAERGGLSELDKAGFIKRQLVETRQITKHVAQILDSRMNTKYDENDKLIREVKVITLKSKLVSDFRKDFQFYKVREINNYHHAHDAYLNAVVGTALIKKYPKLESEFVYGDYKVYDVRKMIAKSEQEIGKATAKYFFYSNIMNFFKTEITLANGEIRKRPLIETNGETGEIVWDKGRDFATVRKVLSMPQVNIVKKTEVQTGGFSKESILPKRNSDKLIARKKDWDPKKYGGFDSPTVAYSVLVVAKVEKGKSKKLKSVKELLGITIMERSSFEKNPIDFLEAKGYKEVKKDLIIKLPKYSLFELENGRKRMLASAGELQKGNELALPSKYVNFLYLASHYEKLKGSPEDNEQKQLFVEQHKHYLDEIIEQISEFSKRVILADANLDKVLSAYNKHRDKPIREQAENIIHLFTLTNLGAPAAFKYFDTTIDRKRYTSTKEVLDATLIHQSITGLYETRIDLSQLGGDGGGGSEAAAKGGGGGTLNIEDEHRLHETSKEPDVSLGSTWLSDFPQAWAETGGMGLAVRQAPLIIPLKATSTPVSIKQYPMSQEARLGIKPHIQRLLDQGILVPCQSPWNTPLLPVKKPGTNDYRPVQDLREVNKRVEDIHPTVPNPYNLLSGLPPSHQWYTVLDLKDAFFCLRLHPTSQPLFAFEWRDPEMGISGQLTWTRLPQGFKNSPTLFNEALHRDLADFRIQHPDLILLQYVDDLLLAATSELDCQQGTRALLQTLGNLGYRASAKKAQICQKQVKYLGYLLKEGQRWLTEARKETVMGQPTPKTPRQLREFLGKAGFCRLFIPGFAEMAAPLYPLTKPGTLFNWGPDQQKAYQEIKQALLTAPALGLPDLTKPFELFVDEKQGYAKGVLTQKLGPWRRPVAYLSKKLDPVAAGWPPCLRMVAAIAVLTKDAGKLTMGQPLVILAPHAVEALVKQPPDRWLSNARMTHYQALLLDTDRVQFGPVVALNPATLLPLPEEGLQHNCLDILAEAHGTRPDLTDQPLPDADHTWYTDGSSLLQEGQRKAGAAVTTETEVIWAKALPAGTSAQRAELIALTQALKMAEGKKLNVYTDSRYAFATAHIHGEIYRRRGWLTSEGKEIKNKDEILALLKALFLPKRLSIIHCPGHQKGHSAEARGNRMADQAARKAAITETPDTSTLLAGKRTADGSEFEKRTADGSEFESPKKKAKVE

SEQ ID NO: 2788 - protein, 2100 aa, synthetic construct
MPAAKRVKLDGGDKKYSIGLDIGTNSVGWAVITDEYKVPSKKFKVLGNTDRHSIKKNLIGALLFDSGETAEATRLKRTARRRYTRRKNRICYLQEIFSNEMAKVDDSFFHRLEESFLVEEDKKHERHPIFGNIVDEVAYHEKYPTIYHLRKKLVDSTDKADLRLIYLALAHMIKFRGHFLIEGDLNPDNSDVDKLFIQLVQTYNQLFEENPINASGVDAKAILSARLSKSRRLENLIAQLPGEKKNGLFGNLIALSLGLTPNFKSNFDLAEDAKLQLSKDTYDDDLDNLLAQIGDQYADLFLAAKNLSDAILLSDILRVNTEITKAPLSASMIKRYDEHHQDLTLLKALVRQQLPEKYKEIFFDQSKNGYAGYIDGGASQEEFYKFIKPILEKMDGTEELLVKLNREDLLRKQRTFDNGSIPHQIHLGELHAILRRQEDFYPFLKDNREKIEKILTFRIPYYVGPLARGNSRFAWMTRKSEETITPWNFEEVVDKGASAQSFIERMTNFDKNLPNEKVLPKHSLLYEYFTVYNELTKVKYVTEGMRKPAFLSGEQKKAIVDLLFKTNRKVTVKQLKEDYFKKIECFDSVEISGVEDRFNASLGTYHDLLKIIKDKDFLDNEENEDILEDIVLTLTLFEDREMIEERLKTYAHLFDDKVMKQLKRRRYTGWGRLSRKLINGIRDKQSGKTILDFLKSDGFANRNFMQLIHDDSLTFKEDIQKAQVSGQGDSLHEHIANLAGSPAIKKGILQTVKVVDELVKVMGRHKPENIVIEMARENQTTQKGQKNSRERMKRIEEGIKELGSQILKEHPVENTQLQNEKLYLYYLQNGRDMYVDQELDINRLSDYDVDHIVPQSFLKDDSIDNKVLTRSDKARGKSDNVPSEEVVKKMKNYWRQLLNAKLITQRKFDNLTKAERGGLSELDKAGFIKRQLVETRQITKHVAQILDSRMNTKYDENDKLIREVKVITLKSKLVSDFRKDFQFYKVREINNYHHAHDAYLNAVVGTALIKKYPKLESEFVYGDYKVYDVRKMIAKSEQEIGKATAKYFFYSNIMNFFKTEITLANGEIRKRPLIETNGETGEIVWDKGRDFATVRKVLSMPQVNIVKKTEVQTGGFSKESILPKRNSDKLIARKKDWDPKKYGGFDSPTVAYSVLVVAKVEKGKSKKLKSVKELLGITIMERSSFEKNPIDFLEAKGYKEVKKDLIIKLPKYSLFELENGRKRMLASAGELQKGNELALPSKYVNFLYLASHYEKLKGSPEDNEQKQLFVEQHKHYLDEIIEQISEFSKRVILADANLDKVLSAYNKHRDKPIREQAENIIHLFTLTNLGAPAAFKYFDTTIDRKRYTSTKEVLDATLIHQSITGLYETRIDLSQLGGDGGEAAAKGGGGSEAAAKGGTLNIEDEHRLHETSKEPDVSLGSTWLSDFPQAWAETGGMGLAVRQAPLIIPLKATSTPVSIKQYPMSQEARLGIKPHIQRLLDQGILVPCQSPWNTPLLPVKKPGTNDYRPVQDLREVNKRVEDIHPTVPNPYNLLSGLPPSHQWYTVLDLKDAFFCLRLHPTSQPLFAFEWRDPEMGISGQLTWTRLPQGFKNSPTLFNEALHRDLADFRIQHPDLILLQYVDDLLLAATSELDCQQGTRALLQTLGNLGYRASAKKAQICQKQVKYLGYLLKEGQRWLTEARKETVMGQPTPKTPRQLREFLGKAGFCRLFIPGFAEMAAPLYPLTKPGTLFNWGPDQQKAYQEIKQALLTAPALGLPDLTKPFELFVDEKQGYAKGVLTQKLGPWRRPVAYLSKKLDPVAAGWPPCLRMVAAIAVLTKDAGKLTMGQPLVILAPHAVEALVKQPPDRWLSNARMTHYQALLLDTDRVQFGPVVALNPATLLPLPEEGLQHNCLDILAEAHGTRPDLTDQPLPDADHTWYTDGSSLLQEGQRKAGAAVTTETEVIWAKALPAGTSAQRAELIALTQALKMAEGKKLNVYTDSRYAFATAHIHGEIYRRRGWLTSEGKEIKNKDEILALLKALFLPKRLSIIHCPGHQKGHSAEARGNRMADQAARKAAITETPDTSTLLAGKRTADGSEFEKRTADGSEFESPKKKAKVE

SEQ ID NO: 2789 - protein, 2096 aa, synthetic construct
MPAAKRVKLDGGDKKYSIGLDIGTNSVGWAVITDEYKVPSKKFKVLGNTDRHSIKKNLIGALLFDSGETAEATRLKRTARRRYTRRKNRICYLQEIFSNEMAKVDDSFFHRLEESFLVEEDKKHERHPIFGNIVDEVAYHEKYPTIYHLRKKLVDSTDKADLRLIYLALAHMIKFRGHFLIEGDLNPDNSDVDKLFIQLVQTYNQLFEENPINASGVDAKAILSARLSKSRRLENLIAQLPGEKKNGLFGNLIALSLGLTPNFKSNFDLAEDAKLQLSKDTYDDDLDNLLAQIGDQYADLFLAAKNLSDAILLSDILRVNTEITKAPLSASMIKRYDEHHQDLTLLKALVRQQLPEKYKEIFFDQSKNGYAGYIDGGASQEEFYKFIKPILEKMDGTEELLVKLNREDLLRKQRTFDNGSIPHQIHLGELHAILRRQEDFYPFLKDNREKIEKILTFRIPYYVGPLARGNSRFAWMTRKSEETITPWNFEEVVDKGASAQSFIERMTNFDKNLPNEKVLPKHSLLYEYFTVYNELTKVKYVTEGMRKPAFLSGEQKKAIVDLLFKTNRKVTVKQLKEDYFKKIECFDSVEISGVEDRFNASLGTYHDLLKIIKDKDFLDNEENEDILEDIVLTLTLFEDREMIEERLKTYAHLFDDKVMKQLKRRRYTGWGRLSRKLINGIRDKQSGKTILDFLKSDGFANRNFMQLIHDDSLTFKEDIQKAQVSGQGDSLHEHIANLAGSPAIKKGILQTVKVVDELVKVMGRHKPENIVIEMARENQTTQKGQKNSRERMKRIEEGIKELGSQILKEHPVENTQLQNEKLYLYYLQNGRDMYVDQELDINRLSDYDVDHIVPQSFLKDDSIDNKVLTRSDKARGKSDNVPSEEVVKKMKNYWRQLLNAKLITQRKFDNLTKAERGGLSELDKAGFIKRQLVETRQITKHVAQILDSRMNTKYDENDKLIREVKVITLKSKLVSDFRKDFQFYKVREINNYHHAHDAYLNAVVGTALIKKYPKLESEFVYGDYKVYDVRKMIAKSEQEIGKATAKYFFYSNIMNFFKTEITLANGEIRKRPLIETNGETGEIVWDKGRDFATVRKVLSMPQVNIVKKTEVQTGGFSKESILPKRNSDKLIARKKDWDPKKYGGFDSPTVAYSVLVVAKVEKGKSKKLKSVKELLGITIMERSSFEKNPIDFLEAKGYKEVKKDLIIKLPKYSLFELENGRKRMLASAGELQKGNELALPSKYVNFLYLASHYEKLKGSPEDNEQKQLFVEQHKHYLDEIIEQISEFSKRVILADANLDKVLSAYNKHRDKPIREQAENIIHLFTLTNLGAPAAFKYFDTTIDRKRYTSTKEVLDATLIHQSITGLYETRIDLSQLGGDGGEAAAKGGGGSSGGTLNIEDEHRLHETSKEPDVSLGSTWLSDFPQAWAETGGMGLAVRQAPLIIPLKATSTPVSIKQYPMSQEARLGIKPHIQRLLDQGILVPCQSPWNTPLLPVKKPGTNDYRPVQDLREVNKRVEDIHPTVPNPYNLLSGLPPSHQWYTVLDLKDAFFCLRLHPTSQPLFAFEWRDPEMGISGQLTWTRLPQGFKNSPTLFNEALHRDLADFRIQHPDLILLQYVDDLLLAATSELDCQQGTRALLQTLGNLGYRASAKKAQICQKQVKYLGYLLKEGQRWLTEARKETVMGQPTPKTPRQLREFLGKAGFCRLFIPGFAEMAAPLYPLTKPGTLFNWGPDQQKAYQEIKQALLTAPALGLPDLTKPFELFVDEKQGYAKGVLTQKLGPWRRPVAYLSKKLDPVAAGWPPCLRMVAAIAVLTKDAGKLTMGQPLVILAPHAVEALVKQPPDRWLSNARMTHYQALLLDTDRVQFGPVVALNPATLLPLPEEGLQHNCLDILAEAHGTRPDLTDQPLPDADHTWYTDGSSLLQEGQRKAGAAVTTETEVIWAKALPAGTSAQRAELIALTQALKMAEGKKLNVYTDSRYAFATAHIHGEIYRRRGWLTSEGKEIKNKDEILALLKALFLPKRLSIIHCPGHQKGHSAEARGNRMADQAARKAAITETPDTSTLLAGKRTADGSEFEKRTADGSEFESPKKKAKVE

SEQ ID NO: 2790 - protein, 2092 aa, synthetic construct
MPAAKRVKLDGGDKKYSIGLDIGTNSVGWAVITDEYKVPSKKFKVLGNTDRHSIKKNLIGALLFDSGETAEATRLKRTARRRYTRRKNRICYLQEIFSNEMAKVDDSFFHRLEESFLVEEDKKHERHPIFGNIVDEVAYHEKYPTIYHLRKKLVDSTDKADLRLIYLALAHMIKFRGHFLIEGDLNPDNSDVDKLFIQLVQTYNQLFEENPINASGVDAKAILSARLSKSRRLENLIAQLPGEKKNGLFGNLIALSLGLTPNFKSNFDLAEDAKLQLSKDTYDDDLDNLLAQIGDQYADLFLAAKNLSDAILLSDILRVNTEITKAPLSASMIKRYDEHHQDLTLLKALVRQQLPEKYKEIFFDQSKNGYAGYIDGGASQEEFYKFIKPILEKMDGTEELLVKLNREDLLRKQRTFDNGSIPHQIHLGELHAILRRQEDFYPFLKDNREKIEKILTFRIPYYVGPLARGNSRFAWMTRKSEETITPWNFEEVVDKGASAQSFIERMTNFDKNLPNEKVLPKHSLLYEYFTVYNELTKVKYVTEGMRKPAFLSGEQKKAIVDLLFKTNRKVTVKQLKEDYFKKIECFDSVEISGVEDRFNASLGTYHDLLKIIKDKDFLDNEENEDILEDIVLTLTLFEDREMIEERLKTYAHLFDDKVMKQLKRRRYTGWGRLSRKLINGIRDKQSGKTILDFLKSDGFANRNFMQLIHDDSLTFKEDIQKAQVSGQGDSLHEHIANLAGSPAIKKGILQTVKVVDELVKVMGRHKPENIVIEMARENQTTQKGQKNSRERMKRIEEGIKELGSQILKEHPVENTQLQNEKLYLYYLQNGRDMYVDQELDINRLSDYDVDHIVPQSFLKDDSIDNKVLTRSDKARGKSDNVPSEEVVKKMKNYWRQLLNAKLITQRKFDNLTKAERGGLSELDKAGFIKRQLVETRQITKHVAQILDSRMNTKYDENDKLIREVKVITLKSKLVSDFRKDFQFYKVREINNYHHAHDAYLNAVVGTALIKKYPKLESEFVYGDYKVYDVRKMIAKSEQEIGKATAKYFFYSNIMNFFKTEITLANGEIRKRPLIETNGETGEIVWDKGRDFATVRKVLSMPQVNIVKKTEVQTGGFSKESILPKRNSDKLIARKKDWDPKKYGGFDSPTVAYSVLVVAKVEKGKSKKLKSVKELLGITIMERSSFEKNPIDFLEAKGYKEVKKDLIIKLPKYSLFELENGRKRMLASAGELQKGNELALPSKYVNFLYLASHYEKLKGSPEDNEQKQLFVEQHKHYLDEIIEQISEFSKRVILADANLDKVLSAYNKHRDKPIREQAENIIHLFTLTNLGAPAAFKYFDTTIDRKRYTSTKEVLDATLIHQSITGLYETRIDLSQLGGDGGGGGGGGGGGTLNIEDEHRLHETSKEPDVSLGSTWLSDFPQAWAETGGMGLAVRQAPLIIPLKATSTPVSIKQYPMSQEARLGIKPHIQRLLDQGILVPCQSPWNTPLLPVKKPGTNDYRPVQDLREVNKRVEDIHPTVPNPYNLLSGLPPSHQWYTVLDLKDAFFCLRLHPTSQPLFAFEWRDPEMGISGQLTWTRLPQGFKNSPTLFNEALHRDLADFRIQHPDLILLQYVDDLLLAATSELDCQQGTRALLQTLGNLGYRASAKKAQICQKQVKYLGYLLKEGQRWLTEARKETVMGQPTPKTPRQLREFLGKAGFCRLFIPGFAEMAAPLYPLTKPGTLFNWGPDQQKAYQEIKQALLTAPALGLPDLTKPFELFVDEKQGYAKGVLTQKLGPWRRPVAYLSKKLDPVAAGWPPCLRMVAAIAVLTKDAGKLTMGQPLVILAPHAVEALVKQPPDRWLSNARMTHYQALLLDTDRVQFGPVVALNPATLLPLPEEGLQHNCLDILAEAHGTRPDLTDQPLPDADHTWYTDGSSLLQEGQRKAGAAVTTETEVIWAKALPAGTSAQRAELIALTQALKMAEGKKLNVYTDSRYAFATAHIHGEIYRRRGWLTSEGKEIKNKDEILALLKALFLPKRLSIIHCPGHQKGHSAEARGNRMADQAARKAAITETPDTSTLLAGKRTADGSEFEKRTADGSEFESPKKKAKVE

SEQ ID NO: 2791 - protein, 2100 aa, synthetic construct
MPAAKRVKLDGGDKKYSIGLDIGTNSVGWAVITDEYKVPSKKFKVLGNTDRHSIKKNLIGALLFDSGETAEATRLKRTARRRYTRRKNRICYLQEIFSNEMAKVDDSFFHRLEESFLVEEDKKHERHPIFGNIVDEVAYHEKYPTIYHLRKKLVDSTDKADLRLIYLALAHMIKFRGHFLIEGDLNPDNSDVDKLFIQLVQTYNQLFEENPINASGVDAKAILSARLSKSRRLENLIAQLPGEKKNGLFGNLIALSLGLTPNFKSNFDLAEDAKLQLSKDTYDDDLDNLLAQIGDQYADLFLAAKNLSDAILLSDILRVNTEITKAPLSASMIKRYDEHHQDLTLLKALVRQQLPEKYKEIFFDQSKNGYAGYIDGGASQEEFYKFIKPILEKMDGTEELLVKLNREDLLRKQRTFDNGSIPHQIHLGELHAILRRQEDFYPFLKDNREKIEKILTFRIPYYVGPLARGNSRFAWMTRKSEETITPWNFEEVVDKGASAQSFIERMTNFDKNLPNEKVLPKHSLLYEYFTVYNELTKVKYVTEGMRKPAFLSGEQKKAIVDLLFKTNRKVTVKQLKEDYFKKIECFDSVEISGVEDRFNASLGTYHDLLKIIKDKDFLDNEENEDILEDIVLTLTLFEDREMIEERLKTYAHLFDDKVMKQLKRRRYTGWGRLSRKLINGIRDKQSGKTILDFLKSDGFANRNFMQLIHDDSLTFKEDIQKAQVSGQGDSLHEHIANLAGSPAIKKGILQTVKVVDELVKVMGRHKPENIVIEMARENQTTQKGQKNSRERMKRIEEGIKELGSQILKEHPVENTQLQNEKLYLYYLQNGRDMYVDQELDINRLSDYDVDHIVPQSFLKDDSIDNKVLTRSDKARGKSDNVPSEEVVKKMKNYWRQLLNAKLITQRKFDNLTKAERGGLSELDKAGFIKRQLVETRQITKHVAQILDSRMNTKYDENDKLIREVKVITLKSKLVSDFRKDFQFYKVREINNYHHAHDAYLNAVVGTALIKKYPKLESEFVYGDYKVYDVRKMIAKSEQEIGKATAKYFFYSNIMNFFKTEITLANGEIRKRPLIETNGETGEIVWDKGRDFATVRKVLSMPQVNIVKKTEVQTGGFSKESILPKRNSDKLIARKKDWDPKKYGGFDSPTVAYSVLVVAKVEKGKSKKLKSVKELLGITIMERSSFEKNPIDFLEAKGYKEVKKDLIIKLPKYSLFELENGRKRMLASAGELQKGNELALPSKYVNFLYLASHYEKLKGSPEDNEQKQLFVEQHKHYLDEIIEQISEFSKRVILADANLDKVLSAYNKHRDKPIREQAENIIHLFTLTNLGAPAAFKYFDTTIDRKRYTSTKEVLDATLIHQSITGLYETRIDLSQLGGDGGEAAAKEAAAKEAAAKGGTLNIEDEHRLHETSKEPDVSLGSTWLSDFPQAWAETGGMGLAVRQAPLIIPLKATSTPVSIKQYPMSQEARLGIKPHIQRLLDQGILVPCQSPWNTPLLPVKKPGTNDYRPVQDLREVNKRVEDIHPTVPNPYNLLSGLPPSHQWYTVLDLKDAFFCLRLHPTSQPLFAFEWRDPEMGISGQLTWTRLPQGFKNSPTLFNEALHRDLADFRIQHPDLILLQYVDDLLLAATSELDCQQGTRALLQTLGNLGYRASAKKAQICQKQVKYLGYLLKEGQRWLTEARKETVMGQPTPKTPRQLREFLGKAGFCRLFIPGFAEMAAPLYPLTKPGTLFNWGPDQQKAYQEIKQALLTAPALGLPDLTKPFELFVDEKQGYAKGVLTQKLGPWRRPVAYLSKKLDPVAAGWPPCLRMVAAIAVLTKDAGKLTMGQPLVILAPHAVEALVKQPPDRWLSNARMTHYQALLLDTDRVQFGPVVALNPATLLPLPEEGLQHNCLDILAEAHGTRPDLTDQPLPDADHTWYTDGSSLLQEGQRKAGAAVTTETEVIWAKALPAGTSAQRAELIALTQALKMAEGKKLNVYTDSRYAFATAHIHGEIYRRRGWLTSEGKEIKNKDEILALLKALFLPKRLSIIHCPGHQKGHSAEARGNRMADQAARKAAITETPDTSTLLAGKRTADGSEFEKRTADGSEFESPKKKAKVE

SEQ ID NO: 2792 - protein, 2096 aa, synthetic construct
MPAAKRVKLDGGDKKYSIGLDIGTNSVGWAVITDEYKVPSKKFKVLGNTDRHSIKKNLIGALLFDSGETAEATRLKRTARRRYTRRKNRICYLQEIFSNEMAKVDDSFFHRLEESFLVEEDKKHERHPIFGNIVDEVAYHEKYPTIYHLRKKLVDSTDKADLRLIYLALAHMIKFRGHFLIEGDLNPDNSDVDKLFIQLVQTYNQLFEENPINASGVDAKAILSARLSKSRRLENLIAQLPGEKKNGLFGNLIALSLGLTPNFKSNFDLAEDAKLQLSKDTYDDDLDNLLAQIGDQYADLFLAAKNLSDAILLSDILRVNTEITKAPLSASMIKRYDEHHQDLTLLKALVRQQLPEKYKEIFFDQSKNGYAGYIDGGASQEEFYKFIKPILEKMDGTEELLVKLNREDLLRKQRTFDNGSIPHQIHLGELHAILRRQEDFYPFLKDNREKIEKILTFRIPYYVGPLARGNSRFAWMTRKSEETITPWNFEEVVDKGASAQSFIERMTNFDKNLPNEKVLPKHSLLYEYFTVYNELTKVKYVTEGMRKPAFLSGEQKKAIVDLLFKTNRKVTVKQLKEDYFKKIECFDSVEISGVEDRFNASLGTYHDLLKIIKDKDFLDNEENEDILEDIVLTLTLFEDREMIEERLKTYAHLFDDKVMKQLKRRRYTGWGRLSRKLINGIRDKQSGKTILDFLKSDGFANRNFMQLIHDDSLTFKEDIQKAQVSGQGDSLHEHIANLAGSPAIKKGILQTVKVVDELVKVMGRHKPENIVIEMARENQTTQKGQKNSRERMKRIEEGIKELGSQILKEHPVENTQLQNEKLYLYYLQNGRDMYVDQELDINRLSDYDVDHIVPQSFLKDDSIDNKVLTRSDKARGKSDNVPSEEVVKKMKNYWRQLLNAKLITQRKFDNLTKAERGGLSELDKAGFIKRQLVETRQITKHVAQILDSRMNTKYDENDKLIREVKVITLKSKLVSDFRKDFQFYKVREINNYHHAHDAYLNAVVGTALIKKYPKLESEFVYGDYKVYDVRKMIAKSEQEIGKATAKYFFYSNIMNFFKTEITLANGEIRKRPLIETNGETGEIVWDKGRDFATVRKVLSMPQVNIVKKTEVQTGGFSKESILPKRNSDKLIARKKDWDPKKYGGFDSPTVAYSVLVVAKVEKGKSKKLKSVKELLGITIMERSSFEKNPIDFLEAKGYKEVKKDLIIKLPKYSLFELENGRKRMLASAGELQKGNELALPSKYVNFLYLASHYEKLKGSPEDNEQKQLFVEQHKHYLDEIIEQISEFSKRVILADANLDKVLSAYNKHRDKPIREQAENIIHLFTLTNLGAPAAFKYFDTTIDRKRYTSTKEVLDATLIHQSITGLYETRIDLSQLGGDGGEAAAKGSSPAPGGTLNIEDEHRLHETSKEPDVSLGSTWLSDFPQAWAETGGMGLAVRQAPLIIPLKATSTPVSIKQYPMSQEARLGIKPHIQRLLDQGILVPCQSPWNTPLLPVKKPGTNDYRPVQDLREVNKRVEDIHPTVPNPYNLLSGLPPSHQWYTVLDLKDAFFCLRLHPTSQPLFAFEWRDPEMGISGQLTWTRLPQGFKNSPTLFNEALHRDLADFRIQHPDLILLQYVDDLLLAATSELDCQQGTRALLQTLGNLGYRASAKKAQICQKQVKYLGYLLKEGQRWLTEARKETVMGQPTPKTPRQLREFLGKAGFCRLFIPGFAEMAAPLYPLTKPGTLFNWGPDQQKAYQEIKQALLTAPALGLPDLTKPFELFVDEKQGYAKGVLTQKLGPWRRPVAYLSKKLDPVAAGWPPCLRMVAAIAVLTKDAGKLTMGQPLVILAPHAVEALVKQPPDRWLSNARMTHYQALLLDTDRVQFGPVVALNPATLLPLPEEGLQHNCLDILAEAHGTRPDLTDQPLPDADHTWYTDGSSLLQEGQRKAGAAVTTETEVIWAKALPAGTSAQRAELIALTQALKMAEGKKLNVYTDSRYAFATAHIHGEIYRRRGWLTSEGKEIKNKDEILALLKALFLPKRLSIIHCPGHQKGHSAEARGNRMADQAARKAAITETPDTSTLLAGKRTADGSEFEKRTADGSEFESPKKKAKVE

SEQ ID NO: 2793 - protein, 2094 aa, synthetic construct
MPAAKRVKLDGGDKKYSIGLDIGTNSVGWAVITDEYKVPSKKFKVLGNTDRHSIKKNLIGALLFDSGETAEATRLKRTARRRYTRRKNRICYLQEIFSNEMAKVDDSFFHRLEESFLVEEDKKHERHPIFGNIVDEVAYHEKYPTIYHLRKKLVDSTDKADLRLIYLALAHMIKFRGHFLIEGDLNPDNSDVDKLFIQLVQTYNQLFEENPINASGVDAKAILSARLSKSRRLENLIAQLPGEKKNGLFGNLIALSLGLTPNFKSNFDLAEDAKLQLSKDTYDDDLDNLLAQIGDQYADLFLAAKNLSDAILLSDILRVNTEITKAPLSASMIKRYDEHHQDLTLLKALVRQQLPEKYKEIFFDQSKNGYAGYIDGGASQEEFYKFIKPILEKMDGTEELLVKLNREDLLRKQRTFDNGSIPHQIHLGELHAILRRQEDFYPFLKDNREKIEKILTFRIPYYVGPLARGNSRFAWMTRKSEETITPWNFEEVVDKGASAQSFIERMTNFDKNLPNEKVLPKHSLLYEYFTVYNELTKVKYVTEGMRKPAFLSGEQKKAIVDLLFKTNRKVTVKQLKEDYFKKIECFDSVEISGVEDRFNASLGTYHDLLKIIKDKDFLDNEENEDILEDIVLTLTLFEDREMIEERLKTYAHLFDDKVMKQLKRRRYTGWGRLSRKLINGIRDKQSGKTILDFLKSDGFANRNFMQLIHDDSLTFKEDIQKAQVSGQGDSLHEHIANLAGSPAIKKGILQTVKVVDELVKVMGRHKPENIVIEMARENQTTQKGQKNSRERMKRIEEGIKELGSQILKEHPVENTQLQNEKLYLYYLQNGRDMYVDQELDINRLSDYDVDHIVPQSFLKDDSIDNKVLTRSDKARGKSDNVPSEEVVKKMKNYWRQLLNAKLITQRKFDNLTKAERGGLSELDKAGFIKRQLVETRQITKHVAQILDSRMNTKYDENDKLIREVKVITLKSKLVSDFRKDFQFYKVREINNYHHAHDAYLNAVVGTALIKKYPKLESEFVYGDYKVYDVRKMIAKSEQEIGKATAKYFFYSNIMNFFKTEITLANGEIRKRPLIETNGETGEIVWDKGRDFATVRKVLSMPQVNIVKKTEVQTGGFSKESILPKRNSDKLIARKKDWDPKKYGGFDSPTVAYSVLVVAKVEKGKSKKLKSVKELLGITIMERSSFEKNPIDFLEAKGYKEVKKDLIIKLPKYSLFELENGRKRMLASAGELQKGNELALPSKYVNFLYLASHYEKLKGSPEDNEQKQLFVEQHKHYLDEIIEQISEFSKRVILADANLDKVLSAYNKHRDKPIREQAENIIHLFTLTNLGAPAAFKYFDTTIDRKRYTSTKEVLDATLIHQSITGLYETRIDLSQLGGDGGPAPGGGGSSGGTLNIEDEHRLHETSKEPDVSLGSTWLSDFPQAWAETGGMGLAVRQAPLIIPLKATSTPVSIKQYPMSQEARLGIKPHIQRLLDQGILVPCQSPWNTPLLPVKKPGTNDYRPVQDLREVNKRVEDIHPTVPNPYNLLSGLPPSHQWYTVLDLKDAFFCLRLHPTSQPLFAFEWRDPEMGISGQLTWTRLPQGFKNSPTLFNEALHRDLADFRIQHPDLILLQYVDDLLLAATSELDCQQGTRALLQTLGNLGYRASAKKAQICQKQVKYLGYLLKEGQRWLTEARKETVMGQPTPKTPRQLREFLGKAGFCRLFIPGFAEMAAPLYPLTKPGTLFNWGPDQQKAYQEIKQALLTAPALGLPDLTKPFELFVDEKQGYAKGVLTQKLGPWRRPVAYLSKKLDPVAAGWPPCLRMVAAIAVLTKDAGKLTMGQPLVILAPHAVEALVKQPPDRWLSNARMTHYQALLLDTDRVQFGPVVALNPATLLPLPEEGLQHNCLDILAEAHGTRPDLTDQPLPDADHTWYTDGSSLLQEGQRKAGAAVTTETEVIWAKALPAGTSAQRAELIALTQALKMAEGKKLNVYTDSRYAFATAHIHGEIYRRRGWLTSEGKEIKNKDEILALLKALFLPKRLSIIHCPGHQKGHSAEARGNRMADQAARKAAITETPDTSTLLAGKRTADGSEFEKRTADGSEFESPKKKAKVE

SEQ ID NO: 2794 - protein, 2096 aa, synthetic construct
MPAAKRVKLDGGDKKYSIGLDIGTNSVGWAVITDEYKVPSKKFKVLGNTDRHSIKKNLIGALLFDSGETAEATRLKRTARRRYTRRKNRICYLQEIFSNEMAKVDDSFFHRLEESFLVEEDKKHERHPIFGNIVDEVAYHEKYPTIYHLRKKLVDSTDKADLRLIYLALAHMIKFRGHFLIEGDLNPDNSDVDKLFIQLVQTYNQLFEENPINASGVDAKAILSARLSKSRRLENLIAQLPGEKKNGLFGNLIALSLGLTPNFKSNFDLAEDAKLQLSKDTYDDDLDNLLAQIGDQYADLFLAAKNLSDAILLSDILRVNTEITKAPLSASMIKRYDEHHQDLTLLKALVRQQLPEKYKEIFFDQSKNGYAGYIDGGASQEEFYKFIKPILEKMDGTEELLVKLNREDLLRKQRTFDNGSIPHQIHLGELHAILRRQEDFYPFLKDNREKIEKILTFRIPYYVGPLARGNSRFAWMTRKSEETITPWNFEEVVDKGASAQSFIERMTNFDKNLPNEKVLPKHSLLYEYFTVYNELTKVKYVTEGMRKPAFLSGEQKKAIVDLLFKTNRKVTVKQLKEDYFKKIECFDSVEISGVEDRFNASLGTYHDLLKIIKDKDFLDNEENEDILEDIVLTLTLFEDREMIEERLKTYAHLFDDKVMKQLKRRRYTGWGRLSRKLINGIRDKQSGKTILDFLKSDGFANRNFMQLIHDDSLTFKEDIQKAQVSGQGDSLHEHIANLAGSPAIKKGILQTVKVVDELVKVMGRHKPENIVIEMARENQTTQKGQKNSRERMKRIEEGIKELGSQILKEHPVENTQLQNEKLYLYYLQNGRDMYVDQELDINRLSDYDVDHIVPQSFLKDDSIDNKVLTRSDKARGKSDNVPSEEVVKKMKNYWRQLLNAKLITQRKFDNLTKAERGGLSELDKAGFIKRQLVETRQITKHVAQILDSRMNTKYDENDKLIREVKVITLKSKLVSDFRKDFQFYKVREINNYHHAHDAYLNAVVGTALIKKYPKLESEFVYGDYKVYDVRKMIAKSEQEIGKATAKYFFYSNIMNFFKTEITLANGEIRKRPLIETNGETGEIVWDKGRDFATVRKVLSMPQVNIVKKTEVQTGGFSKESILPKRNSDKLIARKKDWDPKKYGGFDSPTVAYSVLVVAKVEKGKSKKLKSVKELLGITIMERSSFEKNPIDFLEAKGYKEVKKDLIIKLPKYSLFELENGRKRMLASAGELQKGNELALPSKYVNFLYLASHYEKLKGSPEDNEQKQLFVEQHKHYLDEIIEQISEFSKRVILADANLDKVLSAYNKHRDKPIREQAENIIHLFTLTNLGAPAAFKYFDTTIDRKRYTSTKEVLDATLIHQSITGLYETRIDLSQLGGDGGEAAAKGGSGGGGGTLNIEDEHRLHETSKEPDVSLGSTWLSDFPQAWAETGGMGLAVRQAPLIIPLKATSTPVSIKQYPMSQEARLGIKPHIQRLLDQGILVPCQSPWNTPLLPVKKPGTNDYRPVQDLREVNKRVEDIHPTVPNPYNLLSGLPPSHQWYTVLDLKDAFFCLRLHPTSQPLFAFEWRDPEMGISGQLTWTRLPQGFKNSPTLFNEALHRDLADFRIQHPDLILLQYVDDLLLAATSELDCQQGTRALLQTLGNLGYRASAKKAQICQKQVKYLGYLLKEGQRWLTEARKETVMGQPTPKTPRQLREFLGKAGFCRLFIPGFAEMAAPLYPLTKPGTLFNWGPDQQKAYQEIKQALLTAPALGLPDLTKPFELFVDEKQGYAKGVLTQKLGPWRRPVAYLSKKLDPVAAGWPPCLRMVAAIAVLTKDAGKLTMGQPLVILAPHAVEALVKQPPDRWLSNARMTHYQALLLDTDRVQFGPVVALNPATLLPLPEEGLQHNCLDILAEAHGTRPDLTDQPLPDADHTWYTDGSSLLQEGQRKAGAAVTTETEVIWAKALPAGTSAQRAELIALTQALKMAEGKKLNVYTDSRYAFATAHIHGEIYRRRGWLTSEGKEIKNKDEILALLKALFLPKRLSIIHCPGHQKGHSAEARGNRMADQAARKAAITETPDTSTLLAGKRTADGSEFEKRTADGSEFESPKKKAKVE

SEQ ID NO: 2795 - protein, 2097 aa, synthetic construct
MPAAKRVKLDGGDKKYSIGLDIGTNSVGWAVITDEYKVPSKKFKVLGNTDRHSIKKNLIGALLFDSGETAEATRLKRTARRRYTRRKNRICYLQEIFSNEMAKVDDSFFHRLEESFLVEEDKKHERHPIFGNIVDEVAYHEKYPTIYHLRKKLVDSTDKADLRLIYLALAHMIKFRGHFLIEGDLNPDNSDVDKLFIQLVQTYNQLFEENPINASGVDAKAILSARLSKSRRLENLIAQLPGEKKNGLFGNLIALSLGLTPNFKSNFDLAEDAKLQLSKDTYDDDLDNLLAQIGDQYADLFLAAKNLSDAILLSDILRVNTEITKAPLSASMIKRYDEHHQDLTLLKALVRQQLPEKYKEIFFDQSKNGYAGYIDGGASQEEFYKFIKPILEKMDGTEELLVKLNREDLLRKQRTFDNGSIPHQIHLGELHAILRRQEDFYPFLKDNREKIEKILTFRIPYYVGPLARGNSRFAWMTRKSEETITPWNFEEVVDKGASAQSFIERMTNFDKNLPNEKVLPKHSLLYEYFTVYNELTKVKYVTEGMRKPAFLSGEQKKAIVDLLFKTNRKVTVKQLKEDYFKKIECFDSVEISGVEDRFNASLGTYHDLLKIIKDKDFLDNEENEDILEDIVLTLTLFEDREMIEERLKTYAHLFDDKVMKQLKRRRYTGWGRLSRKLINGIRDKQSGKTILDFLKSDGFANRNFMQLIHDDSLTFKEDIQKAQVSGQGDSLHEHIANLAGSPAIKKGILQTVKVVDELVKVMGRHKPENIVIEMARENQTTQKGQKNSRERMKRIEEGIKELGSQILKEHPVENTQLQNEKLYLYYLQNGRDMYVDQELDINRLSDYDVDHIVPQSFLKDDSIDNKVLTRSDKARGKSDNVPSEEVVKKMKNYWRQLLNAKLITQRKFDNLTKAERGGLSELDKAGFIKRQLVETRQITKHVAQILDSRMNTKYDENDKLIREVKVITLKSKLVSDFRKDFQFYKVREINNYHHAHDAYLNAVVGTALIKKYPKLESEFVYGDYKVYDVRKMIAKSEQEIGKATAKYFFYSNIMNFFKTEITLANGEIRKRPLIETNGETGEIVWDKGRDFATVRKVLSMPQVNIVKKTEVQTGGFSKESILPKRNSDKLIARKKDWDPKKYGGFDSPTVAYSVLVVAKVEKGKSKKLKSVKELLGITIMERSSFEKNPIDFLEAKGYKEVKKDLIIKLPKYSLFELENGRKRMLASAGELQKGNELALPSKYVNFLYLASHYEKLKGSPEDNEQKQLFVEQHKHYLDEIIEQISEFSKRVILADANLDKVLSAYNKHRDKPIREQAENIIHLFTLTNLGAPAAFKYFDTTIDRKRYTSTKEVLDATLIHQSITGLYETRIDLSQLGGDGGGGSGGSGGSGGSGGTLNIEDEHRLHETSKEPDVSLGSTWLSDFPQAWAETGGMGLAVRQAPLIIPLKATSTPVSIKQYPMSQEARLGIKPHIQRLLDQGILVPCQSPWNTPLLPVKKPGTNDYRPVQDLREVNKRVEDIHPTVPNPYNLLSGLPPSHQWYTVLDLKDAFFCLRLHPTSQPLFAFEWRDPEMGISGQLTWTRLPQGFKNSPTLFNEALHRDLADFRIQHPDLILLQYVDDLLLAATSELDCQQGTRALLQTLGNLGYRASAKKAQICQKQVKYLGYLLKEGQRWLTEARKETVMGQPTPKTPRQLREFLGKAGFCRLFIPGFAEMAAPLYPLTKPGTLFNWGPDQQKAYQEIKQALLTAPALGLPDLTKPFELFVDEKQGYAKGVLTQKLGPWRRPVAYLSKKLDPVAAGWPPCLRMVAAIAVLTKDAGKLTMGQPLVILAPHAVEALVKQPPDRWLSNARMTHYQALLLDTDRVQFGPVVALNPATLLPLPEEGLQHNCLDILAEAHGTRPDLTDQPLPDADHTWYTDGSSLLQEGQRKAGAAVTTETEVIWAKALPAGTSAQRAELIALTQALKMAEGKKLNVYTDSRYAFATAHIHGEIYRRRGWLTSEGKEIKNKDEILALLKALFLPKRLSIIHCPGHQKGHSAEARGNRMADQAARKAAITETPDTSTLLAGKRTADGSEFEKRTADGSEFESPKKKAKVE

SEQ ID NO: 2796 - protein, 2093 aa, synthetic construct
MPAAKRVKLDGGDKKYSIGLDIGTNSVGWAVITDEYKVPSKKFKVLGNTDRHSIKKNLIGALLFDSGETAEATRLKRTARRRYTRRKNRICYLQEIFSNEMAKVDDSFFHRLEESFLVEEDKKHERHPIFGNIVDEVAYHEKYPTIYHLRKKLVDSTDKADLRLIYLALAHMIKFRGHFLIEGDLNPDNSDVDKLFIQLVQTYNQLFEENPINASGVDAKAILSARLSKSRRLENLIAQLPGEKKNGLFGNLIALSLGLTPNFKSNFDLAEDAKLQLSKDTYDDDLDNLLAQIGDQYADLFLAAKNLSDAILLSDILRVNTEITKAPLSASMIKRYDEHHQDLTLLKALVRQQLPEKYKEIFFDQSKNGYAGYIDGGASQEEFYKFIKPILEKMDGTEELLVKLNREDLLRKQRTFDNGSIPHQIHLGELHAILRRQEDFYPFLKDNREKIEKILTFRIPYYVGPLARGNSRFAWMTRKSEETITPWNFEEVVDKGASAQSFIERMTNFDKNLPNEKVLPKHSLLYEYFTVYNELTKVKYVTEGMRKPAFLSGEQKKAIVDLLFKTNRKVTVKQLKEDYFKKIECFDSVEISGVEDRFNASLGTYHDLLKIIKDKDFLDNEENEDILEDIVLTLTLFEDREMIEERLKTYAHLFDDKVMKQLKRRRYTGWGRLSRKLINGIRDKQSGKTILDFLKSDGFANRNFMQLIHDDSLTFKEDIQKAQVSGQGDSLHEHIANLAGSPAIKKGILQTVKVVDELVKVMGRHKPENIVIEMARENQTTQKGQKNSRERMKRIEEGIKELGSQILKEHPVENTQLQNEKLYLYYLQNGRDMYVDQELDINRLSDYDVDHIVPQSFLKDDSIDNKVLTRSDKARGKSDNVPSEEVVKKMKNYWRQLLNAKLITQRKFDNLTKAERGGLSELDKAGFIKRQLVETRQITKHVAQILDSRMNTKYDENDKLIREVKVITLKSKLVSDFRKDFQFYKVREINNYHHAHDAYLNAVVGTALIKKYPKLESEFVYGDYKVYDVRKMIAKSEQEIGKATAKYFFYSNIMNFFKTEITLANGEIRKRPLIETNGETGEIVWDKGRDFATVRKVLSMPQVNIVKKTEVQTGGFSKESILPKRNSDKLIARKKDWDPKKYGGFDSPTVAYSVLVVAKVEKGKSKKLKSVKELLGITIMERSSFEKNPIDFLEAKGYKEVKKDLIIKLPKYSLFELENGRKRMLASAGELQKGNELALPSKYVNFLYLASHYEKLKGSPEDNEQKQLFVEQHKHYLDEIIEQISEFSKRVILADANLDKVLSAYNKHRDKPIREQAENIIHLFTLTNLGAPAAFKYFDTTIDRKRYTSTKEVLDATLIHQSITGLYETRIDLSQLGGDGGEAAAKGGGGGTLNIEDEHRLHETSKEPDVSLGSTWLSDFPQAWAETGGMGLAVRQAPLIIPLKATSTPVSIKQYPMSQEARLGIKPHIQRLLDQGILVPCQSPWNTPLLPVKKPGTNDYRPVQDLREVNKRVEDIHPTVPNPYNLLSGLPPSHQWYTVLDLKDAFFCLRLHPTSQPLFAFEWRDPEMGISGQLTWTRLPQGFKNSPTLFNEALHRDLADFRIQHPDLILLQYVDDLLLAATSELDCQQGTRALLQTLGNLGYRASAKKAQICQKQVKYLGYLLKEGQRWLTEARKETVMGQPTPKTPRQLREFLGKAGFCRLFIPGFAEMAAPLYPLTKPGTLFNWGPDQQKAYQEIKQALLTAPALGLPDLTKPFELFVDEKQGYAKGVLTQKLGPWRRPVAYLSKKLDPVAAGWPPCLRMVAAIAVLTKDAGKLTMGQPLVILAPHAVEALVKQPPDRWLSNARMTHYQALLLDTDRVQFGPVVALNPATLLPLPEEGLQHNCLDILAEAHGTRPDLTDQPLPDADHTWYTDGSSLLQEGQRKAGAAVTTETEVIWAKALPAGTSAQRAELIALTQALKMAEGKKLNVYTDSRYAFATAHIHGEIYRRRGWLTSEGKEIKNKDEILALLKALFLPKRLSIIHCPGHQKGHSAEARGNRMADQAARKAAITETPDTSTLLAGKRTADGSEFEKRTADGSEFESPKKKAKVE

SEQ ID NO: 2797 - protein, 2098 aa, synthetic construct
MPAAKRVKLDGGDKKYSIGLDIGTNSVGWAVITDEYKVPSKKFKVLGNTDRHSIKKNLIGALLFDSGETAEATRLKRTARRRYTRRKNRICYLQEIFSNEMAKVDDSFFHRLEESFLVEEDKKHERHPIFGNIVDEVAYHEKYPTIYHLRKKLVDSTDKADLRLIYLALAHMIKFRGHFLIEGDLNPDNSDVDKLFIQLVQTYNQLFEENPINASGVDAKAILSARLSKSRRLENLIAQLPGEKKNGLFGNLIALSLGLTPNFKSNFDLAEDAKLQLSKDTYDDDLDNLLAQIGDQYADLFLAAKNLSDAILLSDILRVNTEITKAPLSASMIKRYDEHHQDLTLLKALVRQQLPEKYKEIFFDQSKNGYAGYIDGGASQEEFYKFIKPILEKMDGTEELLVKLNREDLLRKQRTFDNGSIPHQIHLGELHAILRRQEDFYPFLKDNREKIEKILTFRIPYYVGPLARGNSRFAWMTRKSEETITPWNFEEVVDKGASAQSFIERMTNFDKNLPNEKVLPKHSLLYEYFTVYNELTKVKYVTEGMRKPAFLSGEQKKAIVDLLFKTNRKVTVKQLKEDYFKKIECFDSVEISGVEDRFNASLGTYHDLLKIIKDKDFLDNEENEDILEDIVLTLTLFEDREMIEERLKTYAHLFDDKVMKQLKRRRYTGWGRLSRKLINGIRDKQSGKTILDFLKSDGFANRNFMQLIHDDSLTFKEDIQKAQVSGQGDSLHEHIANLAGSPAIKKGILQTVKVVDELVKVMGRHKPENIVIEMARENQTTQKGQKNSRERMKRIEEGIKELGSQILKEHPVENTQLQNEKLYLYYLQNGRDMYVDQELDINRLSDYDVDHIVPQSFLKDDSIDNKVLTRSDKARGKSDNVPSEEVVKKMKNYWRQLLNAKLITQRKFDNLTKAERGGLSELDKAGFIKRQLVETRQITKHVAQILDSRMNTKYDENDKLIREVKVITLKSKLVSDFRKDFQFYKVREINNYHHAHDAYLNAVVGTALIKKYPKLESEFVYGDYKVYDVRKMIAKSEQEIGKATAKYFFYSNIMNFFKTEITLANGEIRKRPLIETNGETGEIVWDKGRDFATVRKVLSMPQVNIVKKTEVQTGGFSKESILPKRNSDKLIARKKDWDPKKYGGFDSPTVAYSVLVVAKVEKGKSKKLKSVKELLGITIMERSSFEKNPIDFLEAKGYKEVKKDLIIKLPKYSLFELENGRKRMLASAGELQKGNELALPSKYVNFLYLASHYEKLKGSPEDNEQKQLFVEQHKHYLDEIIEQISEFSKRVILADANLDKVLSAYNKHRDKPIREQAENIIHLFTLTNLGAPAAFKYFDTTIDRKRYTSTKEVLDATLIHQSITGLYETRIDLSQLGGDGGPAPAPAPAPAPAPGGTLNIEDEHRLHETSKEPDVSLGSTWLSDFPQAWAETGGMGLAVRQAPLIIPLKATSTPVSIKQYPMSQEARLGIKPHIQRLLDQGILVPCQSPWNTPLLPVKKPGTNDYRPVQDLREVNKRVEDIHPTVPNPYNLLSGLPPSHQWYTVLDLKDAFFCLRLHPTSQPLFAFEWRDPEMGISGQLTWTRLPQGFKNSPTLFNEALHRDLADFRIQHPDLILLQYVDDLLLAATSELDCQQGTRALLQTLGNLGYRASAKKAQICQKQVKYLGYLLKEGQRWLTEARKETVMGQPTPKTPRQLREFLGKAGFCRLFIPGFAEMAAPLYPLTKPGTLFNWGPDQQKAYQEIKQALLTAPALGLPDLTKPFELFVDEKQGYAKGVLTQKLGPWRRPVAYLSKKLDPVAAGWPPCLRMVAAIAVLTKDAGKLTMGQPLVILAPHAVEALVKQPPDRWLSNARMTHYQALLLDTDRVQFGPVVALNPATLLPLPEEGLQHNCLDILAEAHGTRPDLTDQPLPDADHTWYTDGSSLLQEGQRKAGAAVTTETEVIWAKALPAGTSAQRAELIALTQALKMAEGKKLNVYTDSRYAFATAHIHGEIYRRRGWLTSEGKEIKNKDEILALLKALFLPKRLSIIHCPGHQKGHSAEARGNRMADQAARKAAITETPDTSTLLAGKRTADGSEFEKRTADGSEFESPKKKAKVE

SEQ ID NO: 2798 - protein, 2096 aa, synthetic construct
MPAAKRVKLDGGDKKYSIGLDIGTNSVGWAVITDEYKVPSKKFKVLGNTDRHSIKKNLIGALLFDSGETAEATRLKRTARRRYTRRKNRICYLQEIFSNEMAKVDDSFFHRLEESFLVEEDKKHERHPIFGNIVDEVAYHEKYPTIYHLRKKLVDSTDKADLRLIYLALAHMIKFRGHFLIEGDLNPDNSDVDKLFIQLVQTYNQLFEENPINASGVDAKAILSARLSKSRRLENLIAQLPGEKKNGLFGNLIALSLGLTPNFKSNFDLAEDAKLQLSKDTYDDDLDNLLAQIGDQYADLFLAAKNLSDAILLSDILRVNTEITKAPLSASMIKRYDEHHQDLTLLKALVRQQLPEKYKEIFFDQSKNGYAGYIDGGASQEEFYKFIKPILEKMDGTEELLVKLNREDLLRKQRTFDNGSIPHQIHLGELHAILRRQEDFYPFLKDNREKIEKILTFRIPYYVGPLARGNSRFAWMTRKSEETITPWNFEEVVDKGASAQSFIERMTNFDKNLPNEKVLPKHSLLYEYFTVYNELTKVKYVTEGMRKPAFLSGEQKKAIVDLLFKTNRKVTVKQLKEDYFKKIECFDSVEISGVEDRFNASLGTYHDLLKIIKDKDFLDNEENEDILEDIVLTLTLFEDREMIEERLKTYAHLFDDKVMKQLKRRRYTGWGRLSRKLINGIRDKQSGKTILDFLKSDGFANRNFMQLIHDDSLTFKEDIQKAQVSGQGDSLHEHIANLAGSPAIKKGILQTVKVVDELVKVMGRHKPENIVIEMARENQTTQKGQKNSRERMKRIEEGIKELGSQILKEHPVENTQLQNEKLYLYYLQNGRDMYVDQELDINRLSDYDVDHIVPQSFLKDDSIDNKVLTRSDKARGKSDNVPSEEVVKKMKNYWRQLLNAKLITQRKFDNLTKAERGGLSELDKAGFIKRQLVETRQITKHVAQILDSRMNTKYDENDKLIREVKVITLKSKLVSDFRKDFQFYKVREINNYHHAHDAYLNAVVGTALIKKYPKLESEFVYGDYKVYDVRKMIAKSEQEIGKATAKYFFYSNIMNFFKTEITLANGEIRKRPLIETNGETGEIVWDKGRDFATVRKVLSMPQVNIVKKTEVQTGGFSKESILPKRNSDKLIARKKDWDPKKYGGFDSPTVAYSVLVVAKVEKGKSKKLKSVKELLGITIMERSSFEKNPIDFLEAKGYKEVKKDLIIKLPKYSLFELENGRKRMLASAGELQKGNELALPSKYVNFLYLASHYEKLKGSPEDNEQKQLFVEQHKHYLDEIIEQISEFSKRVILADANLDKVLSAYNKHRDKPIREQAENIIHLFTLTNLGAPAAFKYFDTTIDRKRYTSTKEVLDATLIHQSITGLYETRIDLSQLGGDGGPAPGSSEAAAKGGTLNIEDEHRLHETSKEPDVSLGSTWLSDFPQAWAETGGMGLAVRQAPLIIPLKATSTPVSIKQYPMSQEARLGIKPHIQRLLDQGILVPCQSPWNTPLLPVKKPGTNDYRPVQDLREVNKRVEDIHPTVPNPYNLLSGLPPSHQWYTVLDLKDAFFCLRLHPTSQPLFAFEWRDPEMGISGQLTWTRLPQGFKNSPTLFNEALHRDLADFRIQHPDLILLQYVDDLLLAATSELDCQQGTRALLQTLGNLGYRASAKKAQICQKQVKYLGYLLKEGQRWLTEARKETVMGQPTPKTPRQLREFLGKAGFCRLFIPGFAEMAAPLYPLTKPGTLFNWGPDQQKAYQEIKQALLTAPALGLPDLTKPFELFVDEKQGYAKGVLTQKLGPWRRPVAYLSKKLDPVAAGWPPCLRMVAAIAVLTKDAGKLTMGQPLVILAPHAVEALVKQPPDRWLSNARMTHYQALLLDTDRVQFGPVVALNPATLLPLPEEGLQHNCLDILAEAHGTRPDLTDQPLPDADHTWYTDGSSLLQEGQRKAGAAVTTETEVIWAKALPAGTSAQRAELIALTQALKMAEGKKLNVYTDSRYAFATAHIHGEIYRRRGWLTSEGKEIKNKDEILALLKALFLPKRLSIIHCPGHQKGHSAEARGNRMADQAARKAAITETPDTSTLLAGKRTADGSEFEKRTADGSEFESPKKKAKVE

SEQ ID NO: 2799 - protein, 2096 aa, synthetic construct
MPAAKRVKLDGGDKKYSIGLDIGTNSVGWAVITDEYKVPSKKFKVLGNTDRHSIKKNLIGALLFDSGETAEATRLKRTARRRYTRRKNRICYLQEIFSNEMAKVDDSFFHRLEESFLVEEDKKHERHPIFGNIVDEVAYHEKYPTIYHLRKKLVDSTDKADLRLIYLALAHMIKFRGHFLIEGDLNPDNSDVDKLFIQLVQTYNQLFEENPINASGVDAKAILSARLSKSRRLENLIAQLPGEKKNGLFGNLIALSLGLTPNFKSNFDLAEDAKLQLSKDTYDDDLDNLLAQIGDQYADLFLAAKNLSDAILLSDILRVNTEITKAPLSASMIKRYDEHHQDLTLLKALVRQQLPEKYKEIFFDQSKNGYAGYIDGGASQEEFYKFIKPILEKMDGTEELLVKLNREDLLRKQRTFDNGSIPHQIHLGELHAILRRQEDFYPFLKDNREKIEKILTFRIPYYVGPLARGNSRFAWMTRKSEETITPWNFEEVVDKGASAQSFIERMTNFDKNLPNEKVLPKHSLLYEYFTVYNELTKVKYVTEGMRKPAFLSGEQKKAIVDLLFKTNRKVTVKQLKEDYFKKIECFDSVEISGVEDRFNASLGTYHDLLKIIKDKDFLDNEENEDILEDIVLTLTLFEDREMIEERLKTYAHLFDDKVMKQLKRRRYTGWGRLSRKLINGIRDKQSGKTILDFLKSDGFANRNFMQLIHDDSLTFKEDIQKAQVSGQGDSLHEHIANLAGSPAIKKGILQTVKVVDELVKVMGRHKPENIVIEMARENQTTQKGQKNSRERMKRIEEGIKELGSQILKEHPVENTQLQNEKLYLYYLQNGRDMYVDQELDINRLSDYDVDHIVPQSFLKDDSIDNKVLTRSDKARGKSDNVPSEEVVKKMKNYWRQLLNAKLITQRKFDNLTKAERGGLSELDKAGFIKRQLVETRQITKHVAQILDSRMNTKYDENDKLIREVKVITLKSKLVSDFRKDFQFYKVREINNYHHAHDAYLNAVVGTALIKKYPKLESEFVYGDYKVYDVRKMIAKSEQEIGKATAKYFFYSNIMNFFKTEITLANGEIRKRPLIETNGETGEIVWDKGRDFATVRKVLSMPQVNIVKKTEVQTGGFSKESILPKRNSDKLIARKKDWDPKKYGGFDSPTVAYSVLVVAKVEKGKSKKLKSVKELLGITIMERSSFEKNPIDFLEAKGYKEVKKDLIIKLPKYSLFELENGRKRMLASAGELQKGNELALPSKYVNFLYLASHYEKLKGSPEDNEQKQLFVEQHKHYLDEIIEQISEFSKRVILADANLDKVLSAYNKHRDKPIREQAENIIHLFTLTNLGAPAAFKYFDTTIDRKRYTSTKEVLDATLIHQSITGLYETRIDLSQLGGDGGEAAAKGSSGGSGGTLNIEDEHRLHETSKEPDVSLGSTWLSDFPQAWAETGGMGLAVRQAPLIIPLKATSTPVSIKQYPMSQEARLGIKPHIQRLLDQGILVPCQSPWNTPLLPVKKPGTNDYRPVQDLREVNKRVEDIHPTVPNPYNLLSGLPPSHQWYTVLDLKDAFFCLRLHPTSQPLFAFEWRDPEMGISGQLTWTRLPQGFKNSPTLFNEALHRDLADFRIQHPDLILLQYVDDLLLAATSELDCQQGTRALLQTLGNLGYRASAKKAQICQKQVKYLGYLLKEGQRWLTEARKETVMGQPTPKTPRQLREFLGKAGFCRLFIPGFAEMAAPLYPLTKPGTLFNWGPDQQKAYQEIKQALLTAPALGLPDLTKPFELFVDEKQGYAKGVLTQKLGPWRRPVAYLSKKLDPVAAGWPPCLRMVAAIAVLTKDAGKLTMGQPLVILAPHAVEALVKQPPDRWLSNARMTHYQALLLDTDRVQFGPVVALNPATLLPLPEEGLQHNCLDILAEAHGTRPDLTDQPLPDADHTWYTDGSSLLQEGQRKAGAAVTTETEVIWAKALPAGTSAQRAELIALTQALKMAEGKKLNVYTDSRYAFATAHIHGEIYRRRGWLTSEGKEIKNKDEILALLKALFLPKRLSIIHCPGHQKGHSAEARGNRMADQAARKAAITETPDTSTLLAGKRTADGSEFEKRTADGSEFESPKKKAKVE

SEQ ID NO: 2800 - protein, 2094 aa, synthetic construct
MPAAKRVKLDGGDKKYSIGLDIGTNSVGWAVITDEYKVPSKKFKVLGNTDRHSIKKNLIGALLFDSGETAEATRLKRTARRRYTRRKNRICYLQEIFSNEMAKVDDSFFHRLEESFLVEEDKKHERHPIFGNIVDEVAYHEKYPTIYHLRKKLVDSTDKADLRLIYLALAHMIKFRGHFLIEGDLNPDNSDVDKLFIQLVQTYNQLFEENPINASGVDAKAILSARLSKSRRLENLIAQLPGEKKNGLFGNLIALSLGLTPNFKSNFDLAEDAKLQLSKDTYDDDLDNLLAQIGDQYADLFLAAKNLSDAILLSDILRVNTEITKAPLSASMIKRYDEHHQDLTLLKALVRQQLPEKYKEIFFDQSKNGYAGYIDGGASQEEFYKFIKPILEKMDGTEELLVKLNREDLLRKQRTFDNGSIPHQIHLGELHAILRRQEDFYPFLKDNREKIEKILTFRIPYYVGPLARGNSRFAWMTRKSEETITPWNFEEVVDKGASAQSFIERMTNFDKNLPNEKVLPKHSLLYEYFTVYNELTKVKYVTEGMRKPAFLSGEQKKAIVDLLFKTNRKVTVKQLKEDYFKKIECFDSVEISGVEDRFNASLGTYHDLLKIIKDKDFLDNEENEDILEDIVLTLTLFEDREMIEERLKTYAHLFDDKVMKQLKRRRYTGWGRLSRKLINGIRDKQSGKTILDFLKSDGFANRNFMQLIHDDSLTFKEDIQKAQVSGQGDSLHEHIANLAGSPAIKKGILQTVKVVDELVKVMGRHKPENIVIEMARENQTTQKGQKNSRERMKRIEEGIKELGSQILKEHPVENTQLQNEKLYLYYLQNGRDMYVDQELDINRLSDYDVDHIVPQSFLKDDSIDNKVLTRSDKARGKSDNVPSEEVVKKMKNYWRQLLNAKLITQRKFDNLTKAERGGLSELDKAGFIKRQLVETRQITKHVAQILDSRMNTKYDENDKLIREVKVITLKSKLVSDFRKDFQFYKVREINNYHHAHDAYLNAVVGTALIKKYPKLESEFVYGDYKVYDVRKMIAKSEQEIGKATAKYFFYSNIMNFFKTEITLANGEIRKRPLIETNGETGEIVWDKGRDFATVRKVLSMPQVNIVKKTEVQTGGFSKESILPKRNSDKLIARKKDWDPKKYGGFDSPTVAYSVLVVAKVEKGKSKKLKSVKELLGITIMERSSFEKNPIDFLEAKGYKEVKKDLIIKLPKYSLFELENGRKRMLASAGELQKGNELALPSKYVNFLYLASHYEKLKGSPEDNEQKQLFVEQHKHYLDEIIEQISEFSKRVILADANLDKVLSAYNKHRDKPIREQAENIIHLFTLTNLGAPAAFKYFDTTIDRKRYTSTKEVLDATLIHQSITGLYETRIDLSQLGGDGGGGGPAPGGSGGTLNIEDEHRLHETSKEPDVSLGSTWLSDFPQAWAETGGMGLAVRQAPLIIPLKATSTPVSIKQYPMSQEARLGIKPHIQRLLDQGILVPCQSPWNTPLLPVKKPGTNDYRPVQDLREVNKRVEDIHPTVPNPYNLLSGLPPSHQWYTVLDLKDAFFCLRLHPTSQPLFAFEWRDPEMGISGQLTWTRLPQGFKNSPTLFNEALHRDLADFRIQHPDLILLQYVDDLLLAATSELDCQQGTRALLQTLGNLGYRASAKKAQICQKQVKYLGYLLKEGQRWLTEARKETVMGQPTPKTPRQLREFLGKAGFCRLFIPGFAEMAAPLYPLTKPGTLFNWGPDQQKAYQEIKQALLTAPALGLPDLTKPFELFVDEKQGYAKGVLTQKLGPWRRPVAYLSKKLDPVAAGWPPCLRMVAAIAVLTKDAGKLTMGQPLVILAPHAVEALVKQPPDRWLSNARMTHYQALLLDTDRVQFGPVVALNPATLLPLPEEGLQHNCLDILAEAHGTRPDLTDQPLPDADHTWYTDGSSLLQEGQRKAGAAVTTETEVIWAKALPAGTSAQRAELIALTQALKMAEGKKLNVYTDSRYAFATAHIHGEIYRRRGWLTSEGKEIKNKDEILALLKALFLPKRLSIIHCPGHQKGHSAEARGNRMADQAARKAAITETPDTSTLLAGKRTADGSEFEKRTADGSEFESPKKKAKVE

SEQ ID NO: 2801 - protein, 2094 aa, synthetic construct
MPAAKRVKLDGGDKKYSIGLDIGTNSVGWAVITDEYKVPSKKFKVLGNTDRHSIKKNLIGALLFDSGETAEATRLKRTARRRYTRRKNRICYLQEIFSNEMAKVDDSFFHRLEESFLVEEDKKHERHPIFGNIVDEVAYHEKYPTIYHLRKKLVDSTDKADLRLIYLALAHMIKFRGHFLIEGDLNPDNSDVDKLFIQLVQTYNQLFEENPINASGVDAKAILSARLSKSRRLENLIAQLPGEKKNGLFGNLIALSLGLTPNFKSNFDLAEDAKLQLSKDTYDDDLDNLLAQIGDQYADLFLAAKNLSDAILLSDILRVNTEITKAPLSASMIKRYDEHHQDLTLLKALVRQQLPEKYKEIFFDQSKNGYAGYIDGGASQEEFYKFIKPILEKMDGTEELLVKLNREDLLRKQRTFDNGSIPHQIHLGELHAILRRQEDFYPFLKDNREKIEKILTFRIPYYVGPLARGNSRFAWMTRKSEETITPWNFEEVVDKGASAQSFIERMTNFDKNLPNEKVLPKHSLLYEYFTVYNELTKVKYVTEGMRKPAFLSGEQKKAIVDLLFKTNRKVTVKQLKEDYFKKIECFDSVEISGVEDRFNASLGTYHDLLKIIKDKDFLDNEENEDILEDIVLTLTLFEDREMIEERLKTYAHLFDDKVMKQLKRRRYTGWGRLSRKLINGIRDKQSGKTILDFLKSDGFANRNFMQLIHDDSLTFKEDIQKAQVSGQGDSLHEHIANLAGSPAIKKGILQTVKVVDELVKVMGRHKPENIVIEMARENQTTQKGQKNSRERMKRIEEGIKELGSQILKEHPVENTQLQNEKLYLYYLQNGRDMYVDQELDINRLSDYDVDHIVPQSFLKDDSIDNKVLTRSDKARGKSDNVPSEEVVKKMKNYWRQLLNAKLITQRKFDNLTKAERGGLSELDKAGFIKRQLVETRQITKHVAQILDSRMNTKYDENDKLIREVKVITLKSKLVSDFRKDFQFYKVREINNYHHAHDAYLNAVVGTALIKKYPKLESEFVYGDYKVYDVRKMIAKSEQEIGKATAKYFFYSNIMNFFKTEITLANGEIRKRPLIETNGETGEIVWDKGRDFATVRKVLSMPQVNIVKKTEVQTGGFSKESILPKRNSDKLIARKKDWDPKKYGGFDSPTVAYSVLVVAKVEKGKSKKLKSVKELLGITIMERSSFEKNPIDFLEAKGYKEVKKDLIIKLPKYSLFELENGRKRMLASAGELQKGNELALPSKYVNFLYLASHYEKLKGSPEDNEQKQLFVEQHKHYLDEIIEQISEFSKRVILADANLDKVLSAYNKHRDKPIREQAENIIHLFTLTNLGAPAAFKYFDTTIDRKRYTSTKEVLDATLIHQSITGLYETRIDLSQLGGDGGGGSPAPGGGGGTLNIEDEHRLHETSKEPDVSLGSTWLSDFPQAWAETGGMGLAVRQAPLIIPLKATSTPVSIKQYPMSQEARLGIKPHIQRLLDQGILVPCQSPWNTPLLPVKKPGTNDYRPVQDLREVNKRVEDIHPTVPNPYNLLSGLPPSHQWYTVLDLKDAFFCLRLHPTSQPLFAFEWRDPEMGISGQLTWTRLPQGFKNSPTLFNEALHRDLADFRIQHPDLILLQYVDDLLLAATSELDCQQGTRALLQTLGNLGYRASAKKAQICQKQVKYLGYLLKEGQRWLTEARKETVMGQPTPKTPRQLREFLGKAGFCRLFIPGFAEMAAPLYPLTKPGTLFNWGPDQQKAYQEIKQALLTAPALGLPDLTKPFELFVDEKQGYAKGVLTQKLGPWRRPVAYLSKKLDPVAAGWPPCLRMVAAIAVLTKDAGKLTMGQPLVILAPHAVEALVKQPPDRWLSNARMTHYQALLLDTDRVQFGPVVALNPATLLPLPEEGLQHNCLDILAEAHGTRPDLTDQPLPDADHTWYTDGSSLLQEGQRKAGAAVTTETEVIWAKALPAGTSAQRAELIALTQALKMAEGKKLNVYTDSRYAFATAHIHGEIYRRRGWLTSEGKEIKNKDEILALLKALFLPKRLSIIHCPGHQKGHSAEARGNRMADQAARKAAITETPDTSTLLAGKRTADGSEFEKRTADGSEFESPKKKAKVE

SEQ ID NO: 2802 - protein, 2100 aa, synthetic construct
MPAAKRVKLDGGDKKYSIGLDIGTNSVGWAVITDEYKVPSKKFKVLGNTDRHSIKKNLIGALLFDSGETAEATRLKRTARRRYTRRKNRICYLQEIFSNEMAKVDDSFFHRLEESFLVEEDKKHERHPIFGNIVDEVAYHEKYPTIYHLRKKLVDSTDKADLRLIYLALAHMIKFRGHFLIEGDLNPDNSDVDKLFIQLVQTYNQLFEENPINASGVDAKAILSARLSKSRRLENLIAQLPGEKKNGLFGNLIALSLGLTPNFKSNFDLAEDAKLQLSKDTYDDDLDNLLAQIGDQYADLFLAAKNLSDAILLSDILRVNTEITKAPLSASMIKRYDEHHQDLTLLKALVRQQLPEKYKEIFFDQSKNGYAGYIDGGASQEEFYKFIKPILEKMDGTEELLVKLNREDLLRKQRTFDNGSIPHQIHLGELHAILRRQEDFYPFLKDNREKIEKILTFRIPYYVGPLARGNSRFAWMTRKSEETITPWNFEEVVDKGASAQSFIERMTNFDKNLPNEKVLPKHSLLYEYFTVYNELTKVKYVTEGMRKPAFLSGEQKKAIVDLLFKTNRKVTVKQLKEDYFKKIECFDSVEISGVEDRFNASLGTYHDLLKIIKDKDFLDNEENEDILEDIVLTLTLFEDREMIEERLKTYAHLFDDKVMKQLKRRRYTGWGRLSRKLINGIRDKQSGKTILDFLKSDGFANRNFMQLIHDDSLTFKEDIQKAQVSGQGDSLHEHIANLAGSPAIKKGILQTVKVVDELVKVMGRHKPENIVIEMARENQTTQKGQKNSRERMKRIEEGIKELGSQILKEHPVENTQLQNEKLYLYYLQNGRDMYVDQELDINRLSDYDVDHIVPQSFLKDDSIDNKVLTRSDKARGKSDNVPSEEVVKKMKNYWRQLLNAKLITQRKFDNLTKAERGGLSELDKAGFIKRQLVETRQITKHVAQILDSRMNTKYDENDKLIREVKVITLKSKLVSDFRKDFQFYKVREINNYHHAHDAYLNAVVGTALIKKYPKLESEFVYGDYKVYDVRKMIAKSEQEIGKATAKYFFYSNIMNFFKTEITLANGEIRKRPLIETNGETGEIVWDKGRDFATVRKVLSMPQVNIVKKTEVQTGGFSKESILPKRNSDKLIARKKDWDPKKYGGFDSPTVAYSVLVVAKVEKGKSKKLKSVKELLGITIMERSSFEKNPIDFLEAKGYKEVKKDLIIKLPKYSLFELENGRKRMLASAGELQKGNELALPSKYVNFLYLASHYEKLKGSPEDNEQKQLFVEQHKHYLDEIIEQISEFSKRVILADANLDKVLSAYNKHRDKPIREQAENIIHLFTLTNLGAPAAFKYFDTTIDRKRYTSTKEVLDATLIHQSITGLYETRIDLSQLGGDGGGSSGSSGSSGSSGSSGGTLNIEDEHRLHETSKEPDVSLGSTWLSDFPQAWAETGGMGLAVRQAPLIIPLKATSTPVSIKQYPMSQEARLGIKPHIQRLLDQGILVPCQSPWNTPLLPVKKPGTNDYRPVQDLREVNKRVEDIHPTVPNPYNLLSGLPPSHQWYTVLDLKDAFFCLRLHPTSQPLFAFEWRDPEMGISGQLTWTRLPQGFKNSPTLFNEALHRDLADFRIQHPDLILLQYVDDLLLAATSELDCQQGTRALLQTLGNLGYRASAKKAQICQKQVKYLGYLLKEGQRWLTEARKETVMGQPTPKTPRQLREFLGKAGFCRLFIPGFAEMAAPLYPLTKPGTLFNWGPDQQKAYQEIKQALLTAPALGLPDLTKPFELFVDEKQGYAKGVLTQKLGPWRRPVAYLSKKLDPVAAGWPPCLRMVAAIAVLTKDAGKLTMGQPLVILAPHAVEALVKQPPDRWLSNARMTHYQALLLDTDRVQFGPVVALNPATLLPLPEEGLQHNCLDILAEAHGTRPDLTDQPLPDADHTWYTDGSSLLQEGQRKAGAAVTTETEVIWAKALPAGTSAQRAELIALTQALKMAEGKKLNVYTDSRYAFATAHIHGEIYRRRGWLTSEGKEIKNKDEILALLKALFLPKRLSIIHCPGHQKGHSAEARGNRMADQAARKAAITETPDTSTLLAGKRTADGSEFEKRTADGSEFESPKKKAKVE

SEQ ID NO: 2803 - protein, 2110 aa, synthetic construct
MPAAKRVKLDGGDKKYSIGLDIGTNSVGWAVITDEYKVPSKKFKVLGNTDRHSIKKNLIGALLFDSGETAEATRLKRTARRRYTRRKNRICYLQEIFSNEMAKVDDSFFHRLEESFLVEEDKKHERHPIFGNIVDEVAYHEKYPTIYHLRKKLVDSTDKADLRLIYLALAHMIKFRGHFLIEGDLNPDNSDVDKLFIQLVQTYNQLFEENPINASGVDAKAILSARLSKSRRLENLIAQLPGEKKNGLFGNLIALSLGLTPNFKSNFDLAEDAKLQLSKDTYDDDLDNLLAQIGDQYADLFLAAKNLSDAILLSDILRVNTEITKAPLSASMIKRYDEHHQDLTLLKALVRQQLPEKYKEIFFDQSKNGYAGYIDGGASQEEFYKFIKPILEKMDGTEELLVKLNREDLLRKQRTFDNGSIPHQIHLGELHAILRRQEDFYPFLKDNREKIEKILTFRIPYYVGPLARGNSRFAWMTRKSEETITPWNFEEVVDKGASAQSFIERMTNFDKNLPNEKVLPKHSLLYEYFTVYNELTKVKYVTEGMRKPAFLSGEQKKAIVDLLFKTNRKVTVKQLKEDYFKKIECFDSVEISGVEDRFNASLGTYHDLLKIIKDKDFLDNEENEDILEDIVLTLTLFEDREMIEERLKTYAHLFDDKVMKQLKRRRYTGWGRLSRKLINGIRDKQSGKTILDFLKSDGFANRNFMQLIHDDSLTFKEDIQKAQVSGQGDSLHEHIANLAGSPAIKKGILQTVKVVDELVKVMGRHKPENIVIEMARENQTTQKGQKNSRERMKRIEEGIKELGSQILKEHPVENTQLQNEKLYLYYLQNGRDMYVDQELDINRLSDYDVDHIVPQSFLKDDSIDNKVLTRSDKARGKSDNVPSEEVVKKMKNYWRQLLNAKLITQRKFDNLTKAERGGLSELDKAGFIKRQLVETRQITKHVAQILDSRMNTKYDENDKLIREVKVITLKSKLVSDFRKDFQFYKVREINNYHHAHDAYLNAVVGTALIKKYPKLESEFVYGDYKVYDVRKMIAKSEQEIGKATAKYFFYSNIMNFFKTEITLANGEIRKRPLIETNGETGEIVWDKGRDFATVRKVLSMPQVNIVKKTEVQTGGFSKESILPKRNSDKLIARKKDWDPKKYGGFDSPTVAYSVLVVAKVEKGKSKKLKSVKELLGITIMERSSFEKNPIDFLEAKGYKEVKKDLIIKLPKYSLFELENGRKRMLASAGELQKGNELALPSKYVNFLYLASHYEKLKGSPEDNEQKQLFVEQHKHYLDEIIEQISEFSKRVILADANLDKVLSAYNKHRDKPIREQAENIIHLFTLTNLGAPAAFKYFDTTIDRKRYTSTKEVLDATLIHQSITGLYETRIDLSQLGGDGGEAAAKEAAAKEAAAKEAAAKEAAAKGGTLNIEDEHRLHETSKEPDVSLGSTWLSDFPQAWAETGGMGLAVRQAPLIIPLKATSTPVSIKQYPMSQEARLGIKPHIQRLLDQGILVPCQSPWNTPLLPVKKPGTNDYRPVQDLREVNKRVEDIHPTVPNPYNLLSGLPPSHQWYTVLDLKDAFFCLRLHPTSQPLFAFEWRDPEMGISGQLTWTRLPQGFKNSPTLFNEALHRDLADFRIQHPDLILLQYVDDLLLAATSELDCQQGTRALLQTLGNLGYRASAKKAQICQKQVKYLGYLLKEGQRWLTEARKETVMGQPTPKTPRQLREFLGKAGFCRLFIPGFAEMAAPLYPLTKPGTLFNWGPDQQKAYQEIKQALLTAPALGLPDLTKPFELFVDEKQGYAKGVLTQKLGPWRRPVAYLSKKLDPVAAGWPPCLRMVAAIAVLTKDAGKLTMGQPLVILAPHAVEALVKQPPDRWLSNARMTHYQALLLDTDRVQFGPVVALNPATLLPLPEEGLQHNCLDILAEAHGTRPDLTDQPLPDADHTWYTDGSSLLQEGQRKAGAAVTTETEVIWAKALPAGTSAQRAELIALTQALKMAEGKKLNVYTDSRYAFATAHIHGEIYRRRGWLTSEGKEIKNKDEILALLKALFLPKRLSIIHCPGHQKGHSAEARGNRMADQAARKAAITETPDTSTLLAGKRTADGSEFEKRTADGSEFESPKKKAKVE

SEQ ID NO: 2804 - protein, 2094 aa, synthetic construct
MPAAKRVKLDGGDKKYSIGLDIGTNSVGWAVITDEYKVPSKKFKVLGNTDRHSIKKNLIGALLFDSGETAEATRLKRTARRRYTRRKNRICYLQEIFSNEMAKVDDSFFHRLEESFLVEEDKKHERHPIFGNIVDEVAYHEKYPTIYHLRKKLVDSTDKADLRLIYLALAHMIKFRGHFLIEGDLNPDNSDVDKLFIQLVQTYNQLFEENPINASGVDAKAILSARLSKSRRLENLIAQLPGEKKNGLFGNLIALSLGLTPNFKSNFDLAEDAKLQLSKDTYDDDLDNLLAQIGDQYADLFLAAKNLSDAILLSDILRVNTEITKAPLSASMIKRYDEHHQDLTLLKALVRQQLPEKYKEIFFDQSKNGYAGYIDGGASQEEFYKFIKPILEKMDGTEELLVKLNREDLLRKQRTFDNGSIPHQIHLGELHAILRRQEDFYPFLKDNREKIEKILTFRIPYYVGPLARGNSRFAWMTRKSEETITPWNFEEVVDKGASAQSFIERMTNFDKNLPNEKVLPKHSLLYEYFTVYNELTKVKYVTEGMRKPAFLSGEQKKAIVDLLFKTNRKVTVKQLKEDYFKKIECFDSVEISGVEDRFNASLGTYHDLLKIIKDKDFLDNEENEDILEDIVLTLTLFEDREMIEERLKTYAHLFDDKVMKQLKRRRYTGWGRLSRKLINGIRDKQSGKTILDFLKSDGFANRNFMQLIHDDSLTFKEDIQKAQVSGQGDSLHEHIANLAGSPAIKKGILQTVKVVDELVKVMGRHKPENIVIEMARENQTTQKGQKNSRERMKRIEEGIKELGSQILKEHPVENTQLQNEKLYLYYLQNGRDMYVDQELDINRLSDYDVDHIVPQSFLKDDSIDNKVLTRSDKARGKSDNVPSEEVVKKMKNYWRQLLNAKLITQRKFDNLTKAERGGLSELDKAGFIKRQLVETRQITKHVAQILDSRMNTKYDENDKLIREVKVITLKSKLVSDFRKDFQFYKVREINNYHHAHDAYLNAVVGTALIKKYPKLESEFVYGDYKVYDVRKMIAKSEQEIGKATAKYFFYSNIMNFFKTEITLANGEIRKRPLIETNGETGEIVWDKGRDFATVRKVLSMPQVNIVKKTEVQTGGFSKESILPKRNSDKLIARKKDWDPKKYGGFDSPTVAYSVLVVAKVEKGKSKKLKSVKELLGITIMERSSFEKNPIDFLEAKGYKEVKKDLIIKLPKYSLFELENGRKRMLASAGELQKGNELALPSKYVNFLYLASHYEKLKGSPEDNEQKQLFVEQHKHYLDEIIEQISEFSKRVILADANLDKVLSAYNKHRDKPIREQAENIIHLFTLTNLGAPAAFKYFDTTIDRKRYTSTKEVLDATLIHQSITGLYETRIDLSQLGGDGGGGSGGGPAPGGTLNIEDEHRLHETSKEPDVSLGSTWLSDFPQAWAETGGMGLAVRQAPLIIPLKATSTPVSIKQYPMSQEARLGIKPHIQRLLDQGILVPCQSPWNTPLLPVKKPGTNDYRPVQDLREVNKRVEDIHPTVPNPYNLLSGLPPSHQWYTVLDLKDAFFCLRLHPTSQPLFAFEWRDPEMGISGQLTWTRLPQGFKNSPTLFNEALHRDLADFRIQHPDLILLQYVDDLLLAATSELDCQQGTRALLQTLGNLGYRASAKKAQICQKQVKYLGYLLKEGQRWLTEARKETVMGQPTPKTPRQLREFLGKAGFCRLFIPGFAEMAAPLYPLTKPGTLFNWGPDQQKAYQEIKQALLTAPALGLPDLTKPFELFVDEKQGYAKGVLTQKLGPWRRPVAYLSKKLDPVAAGWPPCLRMVAAIAVLTKDAGKLTMGQPLVILAPHAVEALVKQPPDRWLSNARMTHYQALLLDTDRVQFGPVVALNPATLLPLPEEGLQHNCLDILAEAHGTRPDLTDQPLPDADHTWYTDGSSLLQEGQRKAGAAVTTETEVIWAKALPAGTSAQRAELIALTQALKMAEGKKLNVYTDSRYAFATAHIHGEIYRRRGWLTSEGKEIKNKDEILALLKALFLPKRLSIIHCPGHQKGHSAEARGNRMADQAARKAAITETPDTSTLLAGKRTADGSEFEKRTADGSEFESPKKKAKVE

SEQ ID NO: 2805 - protein, 2096 aa, synthetic construct
MPAAKRVKLDGGDKKYSIGLDIGTNSVGWAVITDEYKVPSKKFKVLGNTDRHSIKKNLIGALLFDSGETAEATRLKRTARRRYTRRKNRICYLQEIFSNEMAKVDDSFFHRLEESFLVEEDKKHERHPIFGNIVDEVAYHEKYPTIYHLRKKLVDSTDKADLRLIYLALAHMIKFRGHFLIEGDLNPDNSDVDKLFIQLVQTYNQLFEENPINASGVDAKAILSARLSKSRRLENLIAQLPGEKKNGLFGNLIALSLGLTPNFKSNFDLAEDAKLQLSKDTYDDDLDNLLAQIGDQYADLFLAAKNLSDAILLSDILRVNTEITKAPLSASMIKRYDEHHQDLTLLKALVRQQLPEKYKEIFFDQSKNGYAGYIDGGASQEEFYKFIKPILEKMDGTEELLVKLNREDLLRKQRTFDNGSIPHQIHLGELHAILRRQEDFYPFLKDNREKIEKILTFRIPYYVGPLARGNSRFAWMTRKSEETITPWNFEEVVDKGASAQSFIERMTNFDKNLPNEKVLPKHSLLYEYFTVYNELTKVKYVTEGMRKPAFLSGEQKKAIVDLLFKTNRKVTVKQLKEDYFKKIECFDSVEISGVEDRFNASLGTYHDLLKIIKDKDFLDNEENEDILEDIVLTLTLFEDREMIEERLKTYAHLFDDKVMKQLKRRRYTGWGRLSRKLINGIRDKQSGKTILDFLKSDGFANRNFMQLIHDDSLTFKEDIQKAQVSGQGDSLHEHIANLAGSPAIKKGILQTVKVVDELVKVMGRHKPENIVIEMARENQTTQKGQKNSRERMKRIEEGIKELGSQILKEHPVENTQLQNEKLYLYYLQNGRDMYVDQELDINRLSDYDVDHIVPQSFLKDDSIDNKVLTRSDKARGKSDNVPSEEVVKKMKNYWRQLLNAKLITQRKFDNLTKAERGGLSELDKAGFIKRQLVETRQITKHVAQILDSRMNTKYDENDKLIREVKVITLKSKLVSDFRKDFQFYKVREINNYHHAHDAYLNAVVGTALIKKYPKLESEFVYGDYKVYDVRKMIAKSEQEIGKATAKYFFYSNIMNFFKTEITLANGEIRKRPLIETNGETGEIVWDKGRDFATVRKVLSMPQVNIVKKTEVQTGGFSKESILPKRNSDKLIARKKDWDPKKYGGFDSPTVAYSVLVVAKVEKGKSKKLKSVKELLGITIMERSSFEKNPIDFLEAKGYKEVKKDLIIKLPKYSLFELENGRKRMLASAGELQKGNELALPSKYVNFLYLASHYEKLKGSPEDNEQKQLFVEQHKHYLDEIIEQISEFSKRVILADANLDKVLSAYNKHRDKPIREQAENIIHLFTLTNLGAPAAFKYFDTTIDRKRYTSTKEVLDATLIHQSITGLYETRIDLSQLGGDGGGGSPAPEAAAKGGTLNIEDEHRLHETSKEPDVSLGSTWLSDFPQAWAETGGMGLAVRQAPLIIPLKATSTPVSIKQYPMSQEARLGIKPHIQRLLDQGILVPCQSPWNTPLLPVKKPGTNDYRPVQDLREVNKRVEDIHPTVPNPYNLLSGLPPSHQWYTVLDLKDAFFCLRLHPTSQPLFAFEWRDPEMGISGQLTWTRLPQGFKNSPTLFNEALHRDLADFRIQHPDLILLQYVDDLLLAATSELDCQQGTRALLQTLGNLGYRASAKKAQICQKQVKYLGYLLKEGQRWLTEARKETVMGQPTPKTPRQLREFLGKAGFCRLFIPGFAEMAAPLYPLTKPGTLFNWGPDQQKAYQEIKQALLTAPALGLPDLTKPFELFVDEKQGYAKGVLTQKLGPWRRPVAYLSKKLDPVAAGWPPCLRMVAAIAVLTKDAGKLTMGQPLVILAPHAVEALVKQPPDRWLSNARMTHYQALLLDTDRVQFGPVVALNPATLLPLPEEGLQHNCLDILAEAHGTRPDLTDQPLPDADHTWYTDGSSLLQEGQRKAGAAVTTETEVIWAKALPAGTSAQRAELIALTQALKMAEGKKLNVYTDSRYAFATAHIHGEIYRRRGWLTSEGKEIKNKDEILALLKALFLPKRLSIIHCPGHQKGHSAEARGNRMADQAARKAAITETPDTSTLLAGKRTADGSEFEKRTADGSEFESPKKKAKVE

SEQ ID NO: 2806 - protein, 2097 aa, synthetic construct
MPAAKRVKLDGGDKKYSIGLDIGTNSVGWAVITDEYKVPSKKFKVLGNTDRHSIKKNLIGALLFDSGETAEATRLKRTARRRYTRRKNRICYLQEIFSNEMAKVDDSFFHRLEESFLVEEDKKHERHPIFGNIVDEVAYHEKYPTIYHLRKKLVDSTDKADLRLIYLALAHMIKFRGHFLIEGDLNPDNSDVDKLFIQLVQTYNQLFEENPINASGVDAKAILSARLSKSRRLENLIAQLPGEKKNGLFGNLIALSLGLTPNFKSNFDLAEDAKLQLSKDTYDDDLDNLLAQIGDQYADLFLAAKNLSDAILLSDILRVNTEITKAPLSASMIKRYDEHHQDLTLLKALVRQQLPEKYKEIFFDQSKNGYAGYIDGGASQEEFYKFIKPILEKMDGTEELLVKLNREDLLRKQRTFDNGSIPHQIHLGELHAILRRQEDFYPFLKDNREKIEKILTFRIPYYVGPLARGNSRFAWMTRKSEETITPWNFEEVVDKGASAQSFIERMTNFDKNLPNEKVLPKHSLLYEYFTVYNELTKVKYVTEGMRKPAFLSGEQKKAIVDLLFKTNRKVTVKQLKEDYFKKIECFDSVEISGVEDRFNASLGTYHDLLKIIKDKDFLDNEENEDILEDIVLTLTLFEDREMIEERLKTYAHLFDDKVMKQLKRRRYTGWGRLSRKLINGIRDKQSGKTILDFLKSDGFANRNFMQLIHDDSLTFKEDIQKAQVSGQGDSLHEHIANLAGSPAIKKGILQTVKVVDELVKVMGRHKPENIVIEMARENQTTQKGQKNSRERMKRIEEGIKELGSQILKEHPVENTQLQNEKLYLYYLQNGRDMYVDQELDINRLSDYDVDHIVPQSFLKDDSIDNKVLTRSDKARGKSDNVPSEEVVKKMKNYWRQLLNAKLITQRKFDNLTKAERGGLSELDKAGFIKRQLVETRQITKHVAQILDSRMNTKYDENDKLIREVKVITLKSKLVSDFRKDFQFYKVREINNYHHAHDAYLNAVVGTALIKKYPKLESEFVYGDYKVYDVRKMIAKSEQEIGKATAKYFFYSNIMNFFKTEITLANGEIRKRPLIETNGETGEIVWDKGRDFATVRKVLSMPQVNIVKKTEVQTGGFSKESILPKRNSDKLIARKKDWDPKKYGGFDSPTVAYSVLVVAKVEKGKSKKLKSVKELLGITIMERSSFEKNPIDFLEAKGYKEVKKDLIIKLPKYSLFELENGRKRMLASAGELQKGNELALPSKYVNFLYLASHYEKLKGSPEDNEQKQLFVEQHKHYLDEIIEQISEFSKRVILADANLDKVLSAYNKHRDKPIREQAENIIHLFTLTNLGAPAAFKYFDTTIDRKRYTSTKEVLDATLIHQSITGLYETRIDLSQLGGDGGGSSGSSGSSGSSGGTLNIEDEHRLHETSKEPDVSLGSTWLSDFPQAWAETGGMGLAVRQAPLIIPLKATSTPVSIKQYPMSQEARLGIKPHIQRLLDQGILVPCQSPWNTPLLPVKKPGTNDYRPVQDLREVNKRVEDIHPTVPNPYNLLSGLPPSHQWYTVLDLKDAFFCLRLHPTSQPLFAFEWRDPEMGISGQLTWTRLPQGFKNSPTLFNEALHRDLADFRIQHPDLILLQYVDDLLLAATSELDCQQGTRALLQTLGNLGYRASAKKAQICQKQVKYLGYLLKEGQRWLTEARKETVMGQPTPKTPRQLREFLGKAGFCRLFIPGFAEMAAPLYPLTKPGTLFNWGPDQQKAYQEIKQALLTAPALGLPDLTKPFELFVDEKQGYAKGVLTQKLGPWRRPVAYLSKKLDPVAAGWPPCLRMVAAIAVLTKDAGKLTMGQPLVILAPHAVEALVKQPPDRWLSNARMTHYQALLLDTDRVQFGPVVALNPATLLPLPEEGLQHNCLDILAEAHGTRPDLTDQPLPDADHTWYTDGSSLLQEGQRKAGAAVTTETEVIWAKALPAGTSAQRAELIALTQALKMAEGKKLNVYTDSRYAFATAHIHGEIYRRRGWLTSEGKEIKNKDEILALLKALFLPKRLSIIHCPGHQKGHSAEARGNRMADQAARKAAITETPDTSTLLAGKRTADGSEFEKRTADGSEFESPKKKAKVE

SEQ ID NO: 2807 - protein, 2100 aa, synthetic construct
MPAAKRVKLDGGDKKYSIGLDIGTNSVGWAVITDEYKVPSKKFKVLGNTDRHSIKKNLIGALLFDSGETAEATRLKRTARRRYTRRKNRICYLQEIFSNEMAKVDDSFFHRLEESFLVEEDKKHERHPIFGNIVDEVAYHEKYPTIYHLRKKLVDSTDKADLRLIYLALAHMIKFRGHFLIEGDLNPDNSDVDKLFIQLVQTYNQLFEENPINASGVDAKAILSARLSKSRRLENLIAQLPGEKKNGLFGNLIALSLGLTPNFKSNFDLAEDAKLQLSKDTYDDDLDNLLAQIGDQYADLFLAAKNLSDAILLSDILRVNTEITKAPLSASMIKRYDEHHQDLTLLKALVRQQLPEKYKEIFFDQSKNGYAGYIDGGASQEEFYKFIKPILEKMDGTEELLVKLNREDLLRKQRTFDNGSIPHQIHLGELHAILRRQEDFYPFLKDNREKIEKILTFRIPYYVGPLARGNSRFAWMTRKSEETITPWNFEEVVDKGASAQSFIERMTNFDKNLPNEKVLPKHSLLYEYFTVYNELTKVKYVTEGMRKPAFLSGEQKKAIVDLLFKTNRKVTVKQLKEDYFKKIECFDSVEISGVEDRFNASLGTYHDLLKIIKDKDFLDNEENEDILEDIVLTLTLFEDREMIEERLKTYAHLFDDKVMKQLKRRRYTGWGRLSRKLINGIRDKQSGKTILDFLKSDGFANRNFMQLIHDDSLTFKEDIQKAQVSGQGDSLHEHIANLAGSPAIKKGILQTVKVVDELVKVMGRHKPENIVIEMARENQTTQKGQKNSRERMKRIEEGIKELGSQILKEHPVENTQLQNEKLYLYYLQNGRDMYVDQELDINRLSDYDVDHIVPQSFLKDDSIDNKVLTRSDKARGKSDNVPSEEVVKKMKNYWRQLLNAKLITQRKFDNLTKAERGGLSELDKAGFIKRQLVETRQITKHVAQILDSRMNTKYDENDKLIREVKVITLKSKLVSDFRKDFQFYKVREINNYHHAHDAYLNAVVGTALIKKYPKLESEFVYGDYKVYDVRKMIAKSEQEIGKATAKYFFYSNIMNFFKTEITLANGEIRKRPLIETNGETGEIVWDKGRDFATVRKVLSMPQVNIVKKTEVQTGGFSKESILPKRNSDKLIARKKDWDPKKYGGFDSPTVAYSVLVVAKVEKGKSKKLKSVKELLGITIMERSSFEKNPIDFLEAKGYKEVKKDLIIKLPKYSLFELENGRKRMLASAGELQKGNELALPSKYVNFLYLASHYEKLKGSPEDNEQKQLFVEQHKHYLDEIIEQISEFSKRVILADANLDKVLSAYNKHRDKPIREQAENIIHLFTLTNLGAPAAFKYFDTTIDRKRYTSTKEVLDATLIHQSITGLYETRIDLSQLGGDGGGGSGGSGGSGGSGGSGGTLNIEDEHRLHETSKEPDVSLGSTWLSDFPQAWAETGGMGLAVRQAPLIIPLKATSTPVSIKQYPMSQEARLGIKPHIQRLLDQGILVPCQSPWNTPLLPVKKPGTNDYRPVQDLREVNKRVEDIHPTVPNPYNLLSGLPPSHQWYTVLDLKDAFFCLRLHPTSQPLFAFEWRDPEMGISGQLTWTRLPQGFKNSPTLFNEALHRDLADFRIQHPDLILLQYVDDLLLAATSELDCQQGTRALLQTLGNLGYRASAKKAQICQKQVKYLGYLLKEGQRWLTEARKETVMGQPTPKTPRQLREFLGKAGFCRLFIPGFAEMAAPLYPLTKPGTLFNWGPDQQKAYQEIKQALLTAPALGLPDLTKPFELFVDEKQGYAKGVLTQKLGPWRRPVAYLSKKLDPVAAGWPPCLRMVAAIAVLTKDAGKLTMGQPLVILAPHAVEALVKQPPDRWLSNARMTHYQALLLDTDRVQFGPVVALNPATLLPLPEEGLQHNCLDILAEAHGTRPDLTDQPLPDADHTWYTDGSSLLQEGQRKAGAAVTTETEVIWAKALPAGTSAQRAELIALTQALKMAEGKKLNVYTDSRYAFATAHIHGEIYRRRGWLTSEGKEIKNKDEILALLKALFLPKRLSIIHCPGHQKGHSAEARGNRMADQAARKAAITETPDTSTLLAGKRTADGSEFEKRTADGSEFESPKKKAKVE

SEQ ID NO: 2808 - protein, 2091 aa, synthetic construct
MPAAKRVKLDGGDKKYSIGLDIGTNSVGWAVITDEYKVPSKKFKVLGNTDRHSIKKNLIGALLFDSGETAEATRLKRTARRRYTRRKNRICYLQEIFSNEMAKVDDSFFHRLEESFLVEEDKKHERHPIFGNIVDEVAYHEKYPTIYHLRKKLVDSTDKADLRLIYLALAHMIKFRGHFLIEGDLNPDNSDVDKLFIQLVQTYNQLFEENPINASGVDAKAILSARLSKSRRLENLIAQLPGEKKNGLFGNLIALSLGLTPNFKSNFDLAEDAKLQLSKDTYDDDLDNLLAQIGDQYADLFLAAKNLSDAILLSDILRVNTEITKAPLSASMIKRYDEHHQDLTLLKALVRQQLPEKYKEIFFDQSKNGYAGYIDGGASQEEFYKFIKPILEKMDGTEELLVKLNREDLLRKQRTFDNGSIPHQIHLGELHAILRRQEDFYPFLKDNREKIEKILTFRIPYYVGPLARGNSRFAWMTRKSEETITPWNFEEVVDKGASAQSFIERMTNFDKNLPNEKVLPKHSLLYEYFTVYNELTKVKYVTEGMRKPAFLSGEQKKAIVDLLFKTNRKVTVKQLKEDYFKKIECFDSVEISGVEDRFNASLGTYHDLLKIIKDKDFLDNEENEDILEDIVLTLTLFEDREMIEERLKTYAHLFDDKVMKQLKRRRYTGWGRLSRKLINGIRDKQSGKTILDFLKSDGFANRNFMQLIHDDSLTFKEDIQKAQVSGQGDSLHEHIANLAGSPAIKKGILQTVKVVDELVKVMGRHKPENIVIEMARENQTTQKGQKNSRERMKRIEEGIKELGSQILKEHPVENTQLQNEKLYLYYLQNGRDMYVDQELDINRLSDYDVDHIVPQSFLKDDSIDNKVLTRSDKARGKSDNVPSEEVVKKMKNYWRQLLNAKLITQRKFDNLTKAERGGLSELDKAGFIKRQLVETRQITKHVAQILDSRMNTKYDENDKLIREVKVITLKSKLVSDFRKDFQFYKVREINNYHHAHDAYLNAVVGTALIKKYPKLESEFVYGDYKVYDVRKMIAKSEQEIGKATAKYFFYSNIMNFFKTEITLANGEIRKRPLIETNGETGEIVWDKGRDFATVRKVLSMPQVNIVKKTEVQTGGFSKESILPKRNSDKLIARKKDWDPKKYGGFDSPTVAYSVLVVAKVEKGKSKKLKSVKELLGITIMERSSFEKNPIDFLEAKGYKEVKKDLIIKLPKYSLFELENGRKRMLASAGELQKGNELALPSKYVNFLYLASHYEKLKGSPEDNEQKQLFVEQHKHYLDEIIEQISEFSKRVILADANLDKVLSAYNKHRDKPIREQAENIIHLFTLTNLGAPAAFKYFDTTIDRKRYTSTKEVLDATLIHQSITGLYETRIDLSQLGGDGGGGSPAPGGTLNIEDEHRLHETSKEPDVSLGSTWLSDFPQAWAETGGMGLAVRQAPLIIPLKATSTPVSIKQYPMSQEARLGIKPHIQRLLDQGILVPCQSPWNTPLLPVKKPGTNDYRPVQDLREVNKRVEDIHPTVPNPYNLLSGLPPSHQWYTVLDLKDAFFCLRLHPTSQPLFAFEWRDPEMGISGQLTWTRLPQGFKNSPTLFNEALHRDLADFRIQHPDLILLQYVDDLLLAATSELDCQQGTRALLQTLGNLGYRASAKKAQICQKQVKYLGYLLKEGQRWLTEARKETVMGQPTPKTPRQLREFLGKAGFCRLFIPGFAEMAAPLYPLTKPGTLFNWGPDQQKAYQEIKQALLTAPALGLPDLTKPFELFVDEKQGYAKGVLTQKLGPWRRPVAYLSKKLDPVAAGWPPCLRMVAAIAVLTKDAGKLTMGQPLVILAPHAVEALVKQPPDRWLSNARMTHYQALLLDTDRVQFGPVVALNPATLLPLPEEGLQHNCLDILAEAHGTRPDLTDQPLPDADHTWYTDGSSLLQEGQRKAGAAVTTETEVIWAKALPAGTSAQRAELIALTQALKMAEGKKLNVYTDSRYAFATAHIHGEIYRRRGWLTSEGKEIKNKDEILALLKALFLPKRLSIIHCPGHQKGHSAEARGNRMADQAARKAAITETPDTSTLLAGKRTADGSEFEKRTADGSEFESPKKKAKVE

SEQ ID NO: 2809 - protein, 2094 aa, synthetic construct
MPAAKRVKLDGGDKKYSIGLDIGTNSVGWAVITDEYKVPSKKFKVLGNTDRHSIKKNLIGALLFDSGETAEATRLKRTARRRYTRRKNRICYLQEIFSNEMAKVDDSFFHRLEESFLVEEDKKHERHPIFGNIVDEVAYHEKYPTIYHLRKKLVDSTDKADLRLIYLALAHMIKFRGHFLIEGDLNPDNSDVDKLFIQLVQTYNQLFEENPINASGVDAKAILSARLSKSRRLENLIAQLPGEKKNGLFGNLIALSLGLTPNFKSNFDLAEDAKLQLSKDTYDDDLDNLLAQIGDQYADLFLAAKNLSDAILLSDILRVNTEITKAPLSASMIKRYDEHHQDLTLLKALVRQQLPEKYKEIFFDQSKNGYAGYIDGGASQEEFYKFIKPILEKMDGTEELLVKLNREDLLRKQRTFDNGSIPHQIHLGELHAILRRQEDFYPFLKDNREKIEKILTFRIPYYVGPLARGNSRFAWMTRKSEETITPWNFEEVVDKGASAQSFIERMTNFDKNLPNEKVLPKHSLLYEYFTVYNELTKVKYVTEGMRKPAFLSGEQKKAIVDLLFKTNRKVTVKQLKEDYFKKIECFDSVEISGVEDRFNASLGTYHDLLKIIKDKDFLDNEENEDILEDIVLTLTLFEDREMIEERLKTYAHLFDDKVMKQLKRRRYTGWGRLSRKLINGIRDKQSGKTILDFLKSDGFANRNFMQLIHDDSLTFKEDIQKAQVSGQGDSLHEHIANLAGSPAIKKGILQTVKVVDELVKVMGRHKPENIVIEMARENQTTQKGQKNSRERMKRIEEGIKELGSQILKEHPVENTQLQNEKLYLYYLQNGRDMYVDQELDINRLSDYDVDHIVPQSFLKDDSIDNKVLTRSDKARGKSDNVPSEEVVKKMKNYWRQLLNAKLITQRKFDNLTKAERGGLSELDKAGFIKRQLVETRQITKHVAQILDSRMNTKYDENDKLIREVKVITLKSKLVSDFRKDFQFYKVREINNYHHAHDAYLNAVVGTALIKKYPKLESEFVYGDYKVYDVRKMIAKSEQEIGKATAKYFFYSNIMNFFKTEITLANGEIRKRPLIETNGETGEIVWDKGRDFATVRKVLSMPQVNIVKKTEVQTGGFSKESILPKRNSDKLIARKKDWDPKKYGGFDSPTVAYSVLVVAKVEKGKSKKLKSVKELLGITIMERSSFEKNPIDFLEAKGYKEVKKDLIIKLPKYSLFELENGRKRMLASAGELQKGNELALPSKYVNFLYLASHYEKLKGSPEDNEQKQLFVEQHKHYLDEIIEQISEFSKRVILADANLDKVLSAYNKHRDKPIREQAENIIHLFTLTNLGAPAAFKYFDTTIDRKRYTSTKEVLDATLIHQSITGLYETRIDLSQLGGDGGGGSGGSGGSGGTLNIEDEHRLHETSKEPDVSLGSTWLSDFPQAWAETGGMGLAVRQAPLIIPLKATSTPVSIKQYPMSQEARLGIKPHIQRLLDQGILVPCQSPWNTPLLPVKKPGTNDYRPVQDLREVNKRVEDIHPTVPNPYNLLSGLPPSHQWYTVLDLKDAFFCLRLHPTSQPLFAFEWRDPEMGISGQLTWTRLPQGFKNSPTLFNEALHRDLADFRIQHPDLILLQYVDDLLLAATSELDCQQGTRALLQTLGNLGYRASAKKAQICQKQVKYLGYLLKEGQRWLTEARKETVMGQPTPKTPRQLREFLGKAGFCRLFIPGFAEMAAPLYPLTKPGTLFNWGPDQQKAYQEIKQALLTAPALGLPDLTKPFELFVDEKQGYAKGVLTQKLGPWRRPVAYLSKKLDPVAAGWPPCLRMVAAIAVLTKDAGKLTMGQPLVILAPHAVEALVKQPPDRWLSNARMTHYQALLLDTDRVQFGPVVALNPATLLPLPEEGLQHNCLDILAEAHGTRPDLTDQPLPDADHTWYTDGSSLLQEGQRKAGAAVTTETEVIWAKALPAGTSAQRAELIALTQALKMAEGKKLNVYTDSRYAFATAHIHGEIYRRRGWLTSEGKEIKNKDEILALLKALFLPKRLSIIHCPGHQKGHSAEARGNRMADQAARKAAITETPDTSTLLAGKRTADGSEFEKRTADGSEFESPKKKAKVE

SEQ ID NO: 2810 - protein, 2096 aa, synthetic construct
MPAAKRVKLDGGDKKYSIGLDIGTNSVGWAVITDEYKVPSKKFKVLGNTDRHSIKKNLIGALLFDSGETAEATRLKRTARRRYTRRKNRICYLQEIFSNEMAKVDDSFFHRLEESFLVEEDKKHERHPIFGNIVDEVAYHEKYPTIYHLRKKLVDSTDKADLRLIYLALAHMIKFRGHFLIEGDLNPDNSDVDKLFIQLVQTYNQLFEENPINASGVDAKAILSARLSKSRRLENLIAQLPGEKKNGLFGNLIALSLGLTPNFKSNFDLAEDAKLQLSKDTYDDDLDNLLAQIGDQYADLFLAAKNLSDAILLSDILRVNTEITKAPLSASMIKRYDEHHQDLTLLKALVRQQLPEKYKEIFFDQSKNGYAGYIDGGASQEEFYKFIKPILEKMDGTEELLVKLNREDLLRKQRTFDNGSIPHQIHLGELHAILRRQEDFYPFLKDNREKIEKILTFRIPYYVGPLARGNSRFAWMTRKSEETITPWNFEEVVDKGASAQSFIERMTNFDKNLPNEKVLPKHSLLYEYFTVYNELTKVKYVTEGMRKPAFLSGEQKKAIVDLLFKTNRKVTVKQLKEDYFKKIECFDSVEISGVEDRFNASLGTYHDLLKIIKDKDFLDNEENEDILEDIVLTLTLFEDREMIEERLKTYAHLFDDKVMKQLKRRRYTGWGRLSRKLINGIRDKQSGKTILDFLKSDGFANRNFMQLIHDDSLTFKEDIQKAQVSGQGDSLHEHIANLAGSPAIKKGILQTVKVVDELVKVMGRHKPENIVIEMARENQTTQKGQKNSRERMKRIEEGIKELGSQILKEHPVENTQLQNEKLYLYYLQNGRDMYVDQELDINRLSDYDVDHIVPQSFLKDDSIDNKVLTRSDKARGKSDNVPSEEVVKKMKNYWRQLLNAKLITQRKFDNLTKAERGGLSELDKAGFIKRQLVETRQITKHVAQILDSRMNTKYDENDKLIREVKVITLKSKLVSDFRKDFQFYKVREINNYHHAHDAYLNAVVGTALIKKYPKLESEFVYGDYKVYDVRKMIAKSEQEIGKATAKYFFYSNIMNFFKTEITLANGEIRKRPLIETNGETGEIVWDKGRDFATVRKVLSMPQVNIVKKTEVQTGGFSKESILPKRNSDKLIARKKDWDPKKYGGFDSPTVAYSVLVVAKVEKGKSKKLKSVKELLGITIMERSSFEKNPIDFLEAKGYKEVKKDLIIKLPKYSLFELENGRKRMLASAGELQKGNELALPSKYVNFLYLASHYEKLKGSPEDNEQKQLFVEQHKHYLDEIIEQISEFSKRVILADANLDKVLSAYNKHRDKPIREQAENIIHLFTLTNLGAPAAFKYFDTTIDRKRYTSTKEVLDATLIHQSITGLYETRIDLSQLGGDGGGSSGGGEAAAKGGTLNIEDEHRLHETSKEPDVSLGSTWLSDFPQAWAETGGMGLAVRQAPLIIPLKATSTPVSIKQYPMSQEARLGIKPHIQRLLDQGILVPCQSPWNTPLLPVKKPGTNDYRPVQDLREVNKRVEDIHPTVPNPYNLLSGLPPSHQWYTVLDLKDAFFCLRLHPTSQPLFAFEWRDPEMGISGQLTWTRLPQGFKNSPTLFNEALHRDLADFRIQHPDLILLQYVDDLLLAATSELDCQQGTRALLQTLGNLGYRASAKKAQICQKQVKYLGYLLKEGQRWLTEARKETVMGQPTPKTPRQLREFLGKAGFCRLFIPGFAEMAAPLYPLTKPGTLFNWGPDQQKAYQEIKQALLTAPALGLPDLTKPFELFVDEKQGYAKGVLTQKLGPWRRPVAYLSKKLDPVAAGWPPCLRMVAAIAVLTKDAGKLTMGQPLVILAPHAVEALVKQPPDRWLSNARMTHYQALLLDTDRVQFGPVVALNPATLLPLPEEGLQHNCLDILAEAHGTRPDLTDQPLPDADHTWYTDGSSLLQEGQRKAGAAVTTETEVIWAKALPAGTSAQRAELIALTQALKMAEGKKLNVYTDSRYAFATAHIHGEIYRRRGWLTSEGKEIKNKDEILALLKALFLPKRLSIIHCPGHQKGHSAEARGNRMADQAARKAAITETPDTSTLLAGKRTADGSEFEKRTADGSEFESPKKKAKVE

SEQ ID NO: 2811 - protein, 2094 aa, synthetic construct
MPAAKRVKLDGGDKKYSIGLDIGTNSVGWAVITDEYKVPSKKFKVLGNTDRHSIKKNLIGALLFDSGETAEATRLKRTARRRYTRRKNRICYLQEIFSNEMAKVDDSFFHRLEESFLVEEDKKHERHPIFGNIVDEVAYHEKYPTIYHLRKKLVDSTDKADLRLIYLALAHMIKFRGHFLIEGDLNPDNSDVDKLFIQLVQTYNQLFEENPINASGVDAKAILSARLSKSRRLENLIAQLPGEKKNGLFGNLIALSLGLTPNFKSNFDLAEDAKLQLSKDTYDDDLDNLLAQIGDQYADLFLAAKNLSDAILLSDILRVNTEITKAPLSASMIKRYDEHHQDLTLLKALVRQQLPEKYKEIFFDQSKNGYAGYIDGGASQEEFYKFIKPILEKMDGTEELLVKLNREDLLRKQRTFDNGSIPHQIHLGELHAILRRQEDFYPFLKDNREKIEKILTFRIPYYVGPLARGNSRFAWMTRKSEETITPWNFEEVVDKGASAQSFIERMTNFDKNLPNEKVLPKHSLLYEYFTVYNELTKVKYVTEGMRKPAFLSGEQKKAIVDLLFKTNRKVTVKQLKEDYFKKIECFDSVEISGVEDRFNASLGTYHDLLKIIKDKDFLDNEENEDILEDIVLTLTLFEDREMIEERLKTYAHLFDDKVMKQLKRRRYTGWGRLSRKLINGIRDKQSGKTILDFLKSDGFANRNFMQLIHDDSLTFKEDIQKAQVSGQGDSLHEHIANLAGSPAIKKGILQTVKVVDELVKVMGRHKPENIVIEMARENQTTQKGQKNSRERMKRIEEGIKELGSQILKEHPVENTQLQNEKLYLYYLQNGRDMYVDQELDINRLSDYDVDHIVPQSFLKDDSIDNKVLTRSDKARGKSDNVPSEEVVKKMKNYWRQLLNAKLITQRKFDNLTKAERGGLSELDKAGFIKRQLVETRQITKHVAQILDSRMNTKYDENDKLIREVKVITLKSKLVSDFRKDFQFYKVREINNYHHAHDAYLNAVVGTALIKKYPKLESEFVYGDYKVYDVRKMIAKSEQEIGKATAKYFFYSNIMNFFKTEITLANGEIRKRPLIETNGETGEIVWDKGRDFATVRKVLSMPQVNIVKKTEVQTGGFSKESILPKRNSDKLIARKKDWDPKKYGGFDSPTVAYSVLVVAKVEKGKSKKLKSVKELLGITIMERSSFEKNPIDFLEAKGYKEVKKDLIIKLPKYSLFELENGRKRMLASAGELQKGNELALPSKYVNFLYLASHYEKLKGSPEDNEQKQLFVEQHKHYLDEIIEQISEFSKRVILADANLDKVLSAYNKHRDKPIREQAENIIHLFTLTNLGAPAAFKYFDTTIDRKRYTSTKEVLDATLIHQSITGLYETRIDLSQLGGDGGGSSGSSGSSGGTLNIEDEHRLHETSKEPDVSLGSTWLSDFPQAWAETGGMGLAVRQAPLIIPLKATSTPVSIKQYPMSQEARLGIKPHIQRLLDQGILVPCQSPWNTPLLPVKKPGTNDYRPVQDLREVNKRVEDIHPTVPNPYNLLSGLPPSHQWYTVLDLKDAFFCLRLHPTSQPLFAFEWRDPEMGISGQLTWTRLPQGFKNSPTLFNEALHRDLADFRIQHPDLILLQYVDDLLLAATSELDCQQGTRALLQTLGNLGYRASAKKAQICQKQVKYLGYLLKEGQRWLTEARKETVMGQPTPKTPRQLREFLGKAGFCRLFIPGFAEMAAPLYPLTKPGTLFNWGPDQQKAYQEIKQALLTAPALGLPDLTKPFELFVDEKQGYAKGVLTQKLGPWRRPVAYLSKKLDPVAAGWPPCLRMVAAIAVLTKDAGKLTMGQPLVILAPHAVEALVKQPPDRWLSNARMTHYQALLLDTDRVQFGPVVALNPATLLPLPEEGLQHNCLDILAEAHGTRPDLTDQPLPDADHTWYTDGSSLLQEGQRKAGAAVTTETEVIWAKALPAGTSAQRAELIALTQALKMAEGKKLNVYTDSRYAFATAHIHGEIYRRRGWLTSEGKEIKNKDEILALLKALFLPKRLSIIHCPGHQKGHSAEARGNRMADQAARKAAITETPDTSTLLAGKRTADGSEFEKRTADGSEFESPKKKAKVE

SEQ ID NO: 2812 - protein, 2088 aa, synthetic construct
MPAAKRVKLDGGDKKYSIGLDIGTNSVGWAVITDEYKVPSKKFKVLGNTDRHSIKKNLIGALLFDSGETAEATRLKRTARRRYTRRKNRICYLQEIFSNEMAKVDDSFFHRLEESFLVEEDKKHERHPIFGNIVDEVAYHEKYPTIYHLRKKLVDSTDKADLRLIYLALAHMIKFRGHFLIEGDLNPDNSDVDKLFIQLVQTYNQLFEENPINASGVDAKAILSARLSKSRRLENLIAQLPGEKKNGLFGNLIALSLGLTPNFKSNFDLAEDAKLQLSKDTYDDDLDNLLAQIGDQYADLFLAAKNLSDAILLSDILRVNTEITKAPLSASMIKRYDEHHQDLTLLKALVRQQLPEKYKEIFFDQSKNGYAGYIDGGASQEEFYKFIKPILEKMDGTEELLVKLNREDLLRKQRTFDNGSIPHQIHLGELHAILRRQEDFYPFLKDNREKIEKILTFRIPYYVGPLARGNSRFAWMTRKSEETITPWNFEEVVDKGASAQSFIERMTNFDKNLPNEKVLPKHSLLYEYFTVYNELTKVKYVTEGMRKPAFLSGEQKKAIVDLLFKTNRKVTVKQLKEDYFKKIECFDSVEISGVEDRFNASLGTYHDLLKIIKDKDFLDNEENEDILEDIVLTLTLFEDREMIEERLKTYAHLFDDKVMKQLKRRRYTGWGRLSRKLINGIRDKQSGKTILDFLKSDGFANRNFMQLIHDDSLTFKEDIQKAQVSGQGDSLHEHIANLAGSPAIKKGILQTVKVVDELVKVMGRHKPENIVIEMARENQTTQKGQKNSRERMKRIEEGIKELGSQILKEHPVENTQLQNEKLYLYYLQNGRDMYVDQELDINRLSDYDVDHIVPQSFLKDDSIDNKVLTRSDKARGKSDNVPSEEVVKKMKNYWRQLLNAKLITQRKFDNLTKAERGGLSELDKAGFIKRQLVETRQITKHVAQILDSRMNTKYDENDKLIREVKVITLKSKLVSDFRKDFQFYKVREINNYHHAHDAYLNAVVGTALIKKYPKLESEFVYGDYKVYDVRKMIAKSEQEIGKATAKYFFYSNIMNFFKTEITLANGEIRKRPLIETNGETGEIVWDKGRDFATVRKVLSMPQVNIVKKTEVQTGGFSKESILPKRNSDKLIARKKDWDPKKYGGFDSPTVAYSVLVVAKVEKGKSKKLKSVKELLGITIMERSSFEKNPIDFLEAKGYKEVKKDLIIKLPKYSLFELENGRKRMLASAGELQKGNELALPSKYVNFLYLASHYEKLKGSPEDNEQKQLFVEQHKHYLDEIIEQISEFSKRVILADANLDKVLSAYNKHRDKPIREQAENIIHLFTLTNLGAPAAFKYFDTTIDRKRYTSTKEVLDATLIHQSITGLYETRIDLSQLGGDGGPAPGGTLNIEDEHRLHETSKEPDVSLGSTWLSDFPQAWAETGGMGLAVRQAPLIIPLKATSTPVSIKQYPMSQEARLGIKPHIQRLLDQGILVPCQSPWNTPLLPVKKPGTNDYRPVQDLREVNKRVEDIHPTVPNPYNLLSGLPPSHQWYTVLDLKDAFFCLRLHPTSQPLFAFEWRDPEMGISGQLTWTRLPQGFKNSPTLFNEALHRDLADFRIQHPDLILLQYVDDLLLAATSELDCQQGTRALLQTLGNLGYRASAKKAQICQKQVKYLGYLLKEGQRWLTEARKETVMGQPTPKTPRQLREFLGKAGFCRLFIPGFAEMAAPLYPLTKPGTLFNWGPDQQKAYQEIKQALLTAPALGLPDLTKPFELFVDEKQGYAKGVLTQKLGPWRRPVAYLSKKLDPVAAGWPPCLRMVAAIAVLTKDAGKLTMGQPLVILAPHAVEALVKQPPDRWLSNARMTHYQALLLDTDRVQFGPVVALNPATLLPLPEEGLQHNCLDILAEAHGTRPDLTDQPLPDADHTWYTDGSSLLQEGQRKAGAAVTTETEVIWAKALPAGTSAQRAELIALTQALKMAEGKKLNVYTDSRYAFATAHIHGEIYRRRGWLTSEGKEIKNKDEILALLKALFLPKRLSIIHCPGHQKGHSAEARGNRMADQAARKAAITETPDTSTLLAGKRTADGSEFEKRTADGSEFESPKKKAKVE

SEQ ID NO: 2813 - protein, 2115 aa, synthetic construct
MPAAKRVKLDGGDKKYSIGLDIGTNSVGWAVITDEYKVPSKKFKVLGNTDRHSIKKNLIGALLFDSGETAEATRLKRTARRRYTRRKNRICYLQEIFSNEMAKVDDSFFHRLEESFLVEEDKKHERHPIFGNIVDEVAYHEKYPTIYHLRKKLVDSTDKADLRLIYLALAHMIKFRGHFLIEGDLNPDNSDVDKLFIQLVQTYNQLFEENPINASGVDAKAILSARLSKSRRLENLIAQLPGEKKNGLFGNLIALSLGLTPNFKSNFDLAEDAKLQLSKDTYDDDLDNLLAQIGDQYADLFLAAKNLSDAILLSDILRVNTEITKAPLSASMIKRYDEHHQDLTLLKALVRQQLPEKYKEIFFDQSKNGYAGYIDGGASQEEFYKFIKPILEKMDGTEELLVKLNREDLLRKQRTFDNGSIPHQIHLGELHAILRRQEDFYPFLKDNREKIEKILTFRIPYYVGPLARGNSRFAWMTRKSEETITPWNFEEVVDKGASAQSFIERMTNFDKNLPNEKVLPKHSLLYEYFTVYNELTKVKYVTEGMRKPAFLSGEQKKAIVDLLFKTNRKVTVKQLKEDYFKKIECFDSVEISGVEDRFNASLGTYHDLLKIIKDKDFLDNEENEDILEDIVLTLTLFEDREMIEERLKTYAHLFDDKVMKQLKRRRYTGWGRLSRKLINGIRDKQSGKTILDFLKSDGFANRNFMQLIHDDSLTFKEDIQKAQVSGQGDSLHEHIANLAGSPAIKKGILQTVKVVDELVKVMGRHKPENIVIEMARENQTTQKGQKNSRERMKRIEEGIKELGSQILKEHPVENTQLQNEKLYLYYLQNGRDMYVDQELDINRLSDYDVDHIVPQSFLKDDSIDNKVLTRSDKARGKSDNVPSEEVVKKMKNYWRQLLNAKLITQRKFDNLTKAERGGLSELDKAGFIKRQLVETRQITKHVAQILDSRMNTKYDENDKLIREVKVITLKSKLVSDFRKDFQFYKVREINNYHHAHDAYLNAVVGTALIKKYPKLESEFVYGDYKVYDVRKMIAKSEQEIGKATAKYFFYSNIMNFFKTEITLANGEIRKRPLIETNGETGEIVWDKGRDFATVRKVLSMPQVNIVKKTEVQTGGFSKESILPKRNSDKLIARKKDWDPKKYGGFDSPTVAYSVLVVAKVEKGKSKKLKSVKELLGITIMERSSFEKNPIDFLEAKGYKEVKKDLIIKLPKYSLFELENGRKRMLASAGELQKGNELALPSKYVNFLYLASHYEKLKGSPEDNEQKQLFVEQHKHYLDEIIEQISEFSKRVILADANLDKVLSAYNKHRDKPIREQAENIIHLFTLTNLGAPAAFKYFDTTIDRKRYTSTKEVLDATLIHQSITGLYETRIDLSQLGGDGGEAAAKEAAAKEAAAKEAAAKEAAAKEAAAKGGTLNIEDEHRLHETSKEPDVSLGSTWLSDFPQAWAETGGMGLAVRQAPLIIPLKATSTPVSIKQYPMSQEARLGIKPHIQRLLDQGILVPCQSPWNTPLLPVKKPGTNDYRPVQDLREVNKRVEDIHPTVPNPYNLLSGLPPSHQWYTVLDLKDAFFCLRLHPTSQPLFAFEWRDPEMGISGQLTWTRLPQGFKNSPTLFNEALHRDLADFRIQHPDLILLQYVDDLLLAATSELDCQQGTRALLQTLGNLGYRASAKKAQICQKQVKYLGYLLKEGQRWLTEARKETVMGQPTPKTPRQLREFLGKAGFCRLFIPGFAEMAAPLYPLTKPGTLFNWGPDQQKAYQEIKQALLTAPALGLPDLTKPFELFVDEKQGYAKGVLTQKLGPWRRPVAYLSKKLDPVAAGWPPCLRMVAAIAVLTKDAGKLTMGQPLVILAPHAVEALVKQPPDRWLSNARMTHYQALLLDTDRVQFGPVVALNPATLLPLPEEGLQHNCLDILAEAHGTRPDLTDQPLPDADHTWYTDGSSLLQEGQRKAGAAVTTETEVIWAKALPAGTSAQRAELIALTQALKMAEGKKLNVYTDSRYAFATAHIHGEIYRRRGWLTSEGKEIKNKDEILALLKALFLPKRLSIIHCPGHQKGHSAEARGNRMADQAARKAAITETPDTSTLLAGKRTADGSEFEKRTADGSEFESPKKKAKVE

SEQ ID NO: 2814 - protein, 2097 aa, synthetic construct
MPAAKRVKLDGGDKKYSIGLDIGTNSVGWAVITDEYKVPSKKFKVLGNTDRHSIKKNLIGALLFDSGETAEATRLKRTARRRYTRRKNRICYLQEIFSNEMAKVDDSFFHRLEESFLVEEDKKHERHPIFGNIVDEVAYHEKYPTIYHLRKKLVDSTDKADLRLIYLALAHMIKFRGHFLIEGDLNPDNSDVDKLFIQLVQTYNQLFEENPINASGVDAKAILSARLSKSRRLENLIAQLPGEKKNGLFGNLIALSLGLTPNFKSNFDLAEDAKLQLSKDTYDDDLDNLLAQIGDQYADLFLAAKNLSDAILLSDILRVNTEITKAPLSASMIKRYDEHHQDLTLLKALVRQQLPEKYKEIFFDQSKNGYAGYIDGGASQEEFYKFIKPILEKMDGTEELLVKLNREDLLRKQRTFDNGSIPHQIHLGELHAILRRQEDFYPFLKDNREKIEKILTFRIPYYVGPLARGNSRFAWMTRKSEETITPWNFEEVVDKGASAQSFIERMTNFDKNLPNEKVLPKHSLLYEYFTVYNELTKVKYVTEGMRKPAFLSGEQKKAIVDLLFKTNRKVTVKQLKEDYFKKIECFDSVEISGVEDRFNASLGTYHDLLKIIKDKDFLDNEENEDILEDIVLTLTLFEDREMIEERLKTYAHLFDDKVMKQLKRRRYTGWGRLSRKLINGIRDKQSGKTILDFLKSDGFANRNFMQLIHDDSLTFKEDIQKAQVSGQGDSLHEHIANLAGSPAIKKGILQTVKVVDELVKVMGRHKPENIVIEMARENQTTQKGQKNSRERMKRIEEGIKELGSQILKEHPVENTQLQNEKLYLYYLQNGRDMYVDQELDINRLSDYDVDHIVPQSFLKDDSIDNKVLTRSDKARGKSDNVPSEEVVKKMKNYWRQLLNAKLITQRKFDNLTKAERGGLSELDKAGFIKRQLVETRQITKHVAQILDSRMNTKYDENDKLIREVKVITLKSKLVSDFRKDFQFYKVREINNYHHAHDAYLNAVVGTALIKKYPKLESEFVYGDYKVYDVRKMIAKSEQEIGKATAKYFFYSNIMNFFKTEITLANGEIRKRPLIETNGETGEIVWDKGRDFATVRKVLSMPQVNIVKKTEVQTGGFSKESILPKRNSDKLIARKKDWDPKKYGGFDSPTVAYSVLVVAKVEKGKSKKLKSVKELLGITIMERSSFEKNPIDFLEAKGYKEVKKDLIIKLPKYSLFELENGRKRMLASAGELQKGNELALPSKYVNFLYLASHYEKLKGSPEDNEQKQLFVEQHKHYLDEIIEQISEFSKRVILADANLDKVLSAYNKHRDKPIREQAENIIHLFTLTNLGAPAAFKYFDTTIDRKRYTSTKEVLDATLIHQSITGLYETRIDLSQLGGDGGGSAGSAAGSGEFGGTLNIEDEHRLHETSKEPDVSLGSTWLSDFPQAWAETGGMGLAVRQAPLIIPLKATSTPVSIKQYPMSQEARLGIKPHIQRLLDQGILVPCQSPWNTPLLPVKKPGTNDYRPVQDLREVNKRVEDIHPTVPNPYNLLSGLPPSHQWYTVLDLKDAFFCLRLHPTSQPLFAFEWRDPEMGISGQLTWTRLPQGFKNSPTLFNEALHRDLADFRIQHPDLILLQYVDDLLLAATSELDCQQGTRALLQTLGNLGYRASAKKAQICQKQVKYLGYLLKEGQRWLTEARKETVMGQPTPKTPRQLREFLGKAGFCRLFIPGFAEMAAPLYPLTKPGTLFNWGPDQQKAYQEIKQALLTAPALGLPDLTKPFELFVDEKQGYAKGVLTQKLGPWRRPVAYLSKKLDPVAAGWPPCLRMVAAIAVLTKDAGKLTMGQPLVILAPHAVEALVKQPPDRWLSNARMTHYQALLLDTDRVQFGPVVALNPATLLPLPEEGLQHNCLDILAEAHGTRPDLTDQPLPDADHTWYTDGSSLLQEGQRKAGAAVTTETEVIWAKALPAGTSAQRAELIALTQALKMAEGKKLNVYTDSRYAFATAHIHGEIYRRRGWLTSEGKEIKNKDEILALLKALFLPKRLSIIHCPGHQKGHSAEARGNRMADQAARKAAITETPDTSTLLAGKRTADGSEFEKRTADGSEFESPKKKAKVE

SEQ ID NO: 2815 - protein, 2096 aa, synthetic construct
MPAAKRVKLDGGDKKYSIGLDIGTNSVGWAVITDEYKVPSKKFKVLGNTDRHSIKKNLIGALLFDSGETAEATRLKRTARRRYTRRKNRICYLQEIFSNEMAKVDDSFFHRLEESFLVEEDKKHERHPIFGNIVDEVAYHEKYPTIYHLRKKLVDSTDKADLRLIYLALAHMIKFRGHFLIEGDLNPDNSDVDKLFIQLVQTYNQLFEENPINASGVDAKAILSARLSKSRRLENLIAQLPGEKKNGLFGNLIALSLGLTPNFKSNFDLAEDAKLQLSKDTYDDDLDNLLAQIGDQYADLFLAAKNLSDAILLSDILRVNTEITKAPLSASMIKRYDEHHQDLTLLKALVRQQLPEKYKEIFFDQSKNGYAGYIDGGASQEEFYKFIKPILEKMDGTEELLVKLNREDLLRKQRTFDNGSIPHQIHLGELHAILRRQEDFYPFLKDNREKIEKILTFRIPYYVGPLARGNSRFAWMTRKSEETITPWNFEEVVDKGASAQSFIERMTNFDKNLPNEKVLPKHSLLYEYFTVYNELTKVKYVTEGMRKPAFLSGEQKKAIVDLLFKTNRKVTVKQLKEDYFKKIECFDSVEISGVEDRFNASLGTYHDLLKIIKDKDFLDNEENEDILEDIVLTLTLFEDREMIEERLKTYAHLFDDKVMKQLKRRRYTGWGRLSRKLINGIRDKQSGKTILDFLKSDGFANRNFMQLIHDDSLTFKEDIQKAQVSGQGDSLHEHIANLAGSPAIKKGILQTVKVVDELVKVMGRHKPENIVIEMARENQTTQKGQKNSRERMKRIEEGIKELGSQILKEHPVENTQLQNEKLYLYYLQNGRDMYVDQELDINRLSDYDVDHIVPQSFLKDDSIDNKVLTRSDKARGKSDNVPSEEVVKKMKNYWRQLLNAKLITQRKFDNLTKAERGGLSELDKAGFIKRQLVETRQITKHVAQILDSRMNTKYDENDKLIREVKVITLKSKLVSDFRKDFQFYKVREINNYHHAHDAYLNAVVGTALIKKYPKLESEFVYGDYKVYDVRKMIAKSEQEIGKATAKYFFYSNIMNFFKTEITLANGEIRKRPLIETNGETGEIVWDKGRDFATVRKVLSMPQVNIVKKTEVQTGGFSKESILPKRNSDKLIARKKDWDPKKYGGFDSPTVAYSVLVVAKVEKGKSKKLKSVKELLGITIMERSSFEKNPIDFLEAKGYKEVKKDLIIKLPKYSLFELENGRKRMLASAGELQKGNELALPSKYVNFLYLASHYEKLKGSPEDNEQKQLFVEQHKHYLDEIIEQISEFSKRVILADANLDKVLSAYNKHRDKPIREQAENIIHLFTLTNLGAPAAFKYFDTTIDRKRYTSTKEVLDATLIHQSITGLYETRIDLSQLGGDGGEAAAKGGGGGSGGTLNIEDEHRLHETSKEPDVSLGSTWLSDFPQAWAETGGMGLAVRQAPLIIPLKATSTPVSIKQYPMSQEARLGIKPHIQRLLDQGILVPCQSPWNTPLLPVKKPGTNDYRPVQDLREVNKRVEDIHPTVPNPYNLLSGLPPSHQWYTVLDLKDAFFCLRLHPTSQPLFAFEWRDPEMGISGQLTWTRLPQGFKNSPTLFNEALHRDLADFRIQHPDLILLQYVDDLLLAATSELDCQQGTRALLQTLGNLGYRASAKKAQICQKQVKYLGYLLKEGQRWLTEARKETVMGQPTPKTPRQLREFLGKAGFCRLFIPGFAEMAAPLYPLTKPGTLFNWGPDQQKAYQEIKQALLTAPALGLPDLTKPFELFVDEKQGYAKGVLTQKLGPWRRPVAYLSKKLDPVAAGWPPCLRMVAAIAVLTKDAGKLTMGQPLVILAPHAVEALVKQPPDRWLSNARMTHYQALLLDTDRVQFGPVVALNPATLLPLPEEGLQHNCLDILAEAHGTRPDLTDQPLPDADHTWYTDGSSLLQEGQRKAGAAVTTETEVIWAKALPAGTSAQRAELIALTQALKMAEGKKLNVYTDSRYAFATAHIHGEIYRRRGWLTSEGKEIKNKDEILALLKALFLPKRLSIIHCPGHQKGHSAEARGNRMADQAARKAAITETPDTSTLLAGKRTADGSEFEKRTADGSEFESPKKKAKVE

SEQ ID NO: 2816 - protein, 2103 aa, synthetic construct
MPAAKRVKLDGGDKKYSIGLDIGTNSVGWAVITDEYKVPSKKFKVLGNTDRHSIKKNLIGALLFDSGETAEATRLKRTARRRYTRRKNRICYLQEIFSNEMAKVDDSFFHRLEESFLVEEDKKHERHPIFGNIVDEVAYHEKYPTIYHLRKKLVDSTDKADLRLIYLALAHMIKFRGHFLIEGDLNPDNSDVDKLFIQLVQTYNQLFEENPINASGVDAKAILSARLSKSRRLENLIAQLPGEKKNGLFGNLIALSLGLTPNFKSNFDLAEDAKLQLSKDTYDDDLDNLLAQIGDQYADLFLAAKNLSDAILLSDILRVNTEITKAPLSASMIKRYDEHHQDLTLLKALVRQQLPEKYKEIFFDQSKNGYAGYIDGGASQEEFYKFIKPILEKMDGTEELLVKLNREDLLRKQRTFDNGSIPHQIHLGELHAILRRQEDFYPFLKDNREKIEKILTFRIPYYVGPLARGNSRFAWMTRKSEETITPWNFEEVVDKGASAQSFIERMTNFDKNLPNEKVLPKHSLLYEYFTVYNELTKVKYVTEGMRKPAFLSGEQKKAIVDLLFKTNRKVTVKQLKEDYFKKIECFDSVEISGVEDRFNASLGTYHDLLKIIKDKDFLDNEENEDILEDIVLTLTLFEDREMIEERLKTYAHLFDDKVMKQLKRRRYTGWGRLSRKLINGIRDKQSGKTILDFLKSDGFANRNFMQLIHDDSLTFKEDIQKAQVSGQGDSLHEHIANLAGSPAIKKGILQTVKVVDELVKVMGRHKPENIVIEMARENQTTQKGQKNSRERMKRIEEGIKELGSQILKEHPVENTQLQNEKLYLYYLQNGRDMYVDQELDINRLSDYDVDHIVPQSFLKDDSIDNKVLTRSDKARGKSDNVPSEEVVKKMKNYWRQLLNAKLITQRKFDNLTKAERGGLSELDKAGFIKRQLVETRQITKHVAQILDSRMNTKYDENDKLIREVKVITLKSKLVSDFRKDFQFYKVREINNYHHAHDAYLNAVVGTALIKKYPKLESEFVYGDYKVYDVRKMIAKSEQEIGKATAKYFFYSNIMNFFKTEITLANGEIRKRPLIETNGETGEIVWDKGRDFATVRKVLSMPQVNIVKKTEVQTGGFSKESILPKRNSDKLIARKKDWDPKKYGGFDSPTVAYSVLVVAKVEKGKSKKLKSVKELLGITIMERSSFEKNPIDFLEAKGYKEVKKDLIIKLPKYSLFELENGRKRMLASAGELQKGNELALPSKYVNFLYLASHYEKLKGSPEDNEQKQLFVEQHKHYLDEIIEQISEFSKRVILADANLDKVLSAYNKHRDKPIREQAENIIHLFTLTNLGAPAAFKYFDTTIDRKRYTSTKEVLDATLIHQSITGLYETRIDLSQLGGDGGGSSGSSGSSGSSGSSGSSGGTLNIEDEHRLHETSKEPDVSLGSTWLSDFPQAWAETGGMGLAVRQAPLIIPLKATSTPVSIKQYPMSQEARLGIKPHIQRLLDQGILVPCQSPWNTPLLPVKKPGTNDYRPVQDLREVNKRVEDIHPTVPNPYNLLSGLPPSHQWYTVLDLKDAFFCLRLHPTSQPLFAFEWRDPEMGISGQLTWTRLPQGFKNSPTLFNEALHRDLADFRIQHPDLILLQYVDDLLLAATSELDCQQGTRALLQTLGNLGYRASAKKAQICQKQVKYLGYLLKEGQRWLTEARKETVMGQPTPKTPRQLREFLGKAGFCRLFIPGFAEMAAPLYPLTKPGTLFNWGPDQQKAYQEIKQALLTAPALGLPDLTKPFELFVDEKQGYAKGVLTQKLGPWRRPVAYLSKKLDPVAAGWPPCLRMVAAIAVLTKDAGKLTMGQPLVILAPHAVEALVKQPPDRWLSNARMTHYQALLLDTDRVQFGPVVALNPATLLPLPEEGLQHNCLDILAEAHGTRPDLTDQPLPDADHTWYTDGSSLLQEGQRKAGAAVTTETEVIWAKALPAGTSAQRAELIALTQALKMAEGKKLNVYTDSRYAFATAHIHGEIYRRRGWLTSEGKEIKNKDEILALLKALFLPKRLSIIHCPGHQKGHSAEARGNRMADQAARKAAITETPDTSTLLAGKRTADGSEFEKRTADGSEFESPKKKAKVE

SEQ ID NO: 2817 - protein, 2096 aa, synthetic construct
MPAAKRVKLDGGDKKYSIGLDIGTNSVGWAVITDEYKVPSKKFKVLGNTDRHSIKKNLIGALLFDSGETAEATRLKRTARRRYTRRKNRICYLQEIFSNEMAKVDDSFFHRLEESFLVEEDKKHERHPIFGNIVDEVAYHEKYPTIYHLRKKLVDSTDKADLRLIYLALAHMIKFRGHFLIEGDLNPDNSDVDKLFIQLVQTYNQLFEENPINASGVDAKAILSARLSKSRRLENLIAQLPGEKKNGLFGNLIALSLGLTPNFKSNFDLAEDAKLQLSKDTYDDDLDNLLAQIGDQYADLFLAAKNLSDAILLSDILRVNTEITKAPLSASMIKRYDEHHQDLTLLKALVRQQLPEKYKEIFFDQSKNGYAGYIDGGASQEEFYKFIKPILEKMDGTEELLVKLNREDLLRKQRTFDNGSIPHQIHLGELHAILRRQEDFYPFLKDNREKIEKILTFRIPYYVGPLARGNSRFAWMTRKSEETITPWNFEEVVDKGASAQSFIERMTNFDKNLPNEKVLPKHSLLYEYFTVYNELTKVKYVTEGMRKPAFLSGEQKKAIVDLLFKTNRKVTVKQLKEDYFKKIECFDSVEISGVEDRFNASLGTYHDLLKIIKDKDFLDNEENEDILEDIVLTLTLFEDREMIEERLKTYAHLFDDKVMKQLKRRRYTGWGRLSRKLINGIRDKQSGKTILDFLKSDGFANRNFMQLIHDDSLTFKEDIQKAQVSGQGDSLHEHIANLAGSPAIKKGILQTVKVVDELVKVMGRHKPENIVIEMARENQTTQKGQKNSRERMKRIEEGIKELGSQILKEHPVENTQLQNEKLYLYYLQNGRDMYVDQELDINRLSDYDVDHIVPQSFLKDDSIDNKVLTRSDKARGKSDNVPSEEVVKKMKNYWRQLLNAKLITQRKFDNLTKAERGGLSELDKAGFIKRQLVETRQITKHVAQILDSRMNTKYDENDKLIREVKVITLKSKLVSDFRKDFQFYKVREINNYHHAHDAYLNAVVGTALIKKYPKLESEFVYGDYKVYDVRKMIAKSEQEIGKATAKYFFYSNIMNFFKTEITLANGEIRKRPLIETNGETGEIVWDKGRDFATVRKVLSMPQVNIVKKTEVQTGGFSKESILPKRNSDKLIARKKDWDPKKYGGFDSPTVAYSVLVVAKVEKGKSKKLKSVKELLGITIMERSSFEKNPIDFLEAKGYKEVKKDLIIKLPKYSLFELENGRKRMLASAGELQKGNELALPSKYVNFLYLASHYEKLKGSPEDNEQKQLFVEQHKHYLDEIIEQISEFSKRVILADANLDKVLSAYNKHRDKPIREQAENIIHLFTLTNLGAPAAFKYFDTTIDRKRYTSTKEVLDATLIHQSITGLYETRIDLSQLGGDGGEAAAKGGSGSSGGTLNIEDEHRLHETSKEPDVSLGSTWLSDFPQAWAETGGMGLAVRQAPLIIPLKATSTPVSIKQYPMSQEARLGIKPHIQRLLDQGILVPCQSPWNTPLLPVKKPGTNDYRPVQDLREVNKRVEDIHPTVPNPYNLLSGLPPSHQWYTVLDLKDAFFCLRLHPTSQPLFAFEWRDPEMGISGQLTWTRLPQGFKNSPTLFNEALHRDLADFRIQHPDLILLQYVDDLLLAATSELDCQQGTRALLQTLGNLGYRASAKKAQICQKQVKYLGYLLKEGQRWLTEARKETVMGQPTPKTPRQLREFLGKAGFCRLFIPGFAEMAAPLYPLTKPGTLFNWGPDQQKAYQEIKQALLTAPALGLPDLTKPFELFVDEKQGYAKGVLTQKLGPWRRPVAYLSKKLDPVAAGWPPCLRMVAAIAVLTKDAGKLTMGQPLVILAPHAVEALVKQPPDRWLSNARMTHYQALLLDTDRVQFGPVVALNPATLLPLPEEGLQHNCLDILAEAHGTRPDLTDQPLPDADHTWYTDGSSLLQEGQRKAGAAVTTETEVIWAKALPAGTSAQRAELIALTQALKMAEGKKLNVYTDSRYAFATAHIHGEIYRRRGWLTSEGKEIKNKDEILALLKALFLPKRLSIIHCPGHQKGHSAEARGNRMADQAARKAAITETPDTSTLLAGKRTADGSEFEKRTADGSEFESPKKKAKVE

SEQ ID NO: 2818 - protein, 2094 aa, synthetic construct
MPAAKRVKLDGGDKKYSIGLDIGTNSVGWAVITDEYKVPSKKFKVLGNTDRHSIKKNLIGALLFDSGETAEATRLKRTARRRYTRRKNRICYLQEIFSNEMAKVDDSFFHRLEESFLVEEDKKHERHPIFGNIVDEVAYHEKYPTIYHLRKKLVDSTDKADLRLIYLALAHMIKFRGHFLIEGDLNPDNSDVDKLFIQLVQTYNQLFEENPINASGVDAKAILSARLSKSRRLENLIAQLPGEKKNGLFGNLIALSLGLTPNFKSNFDLAEDAKLQLSKDTYDDDLDNLLAQIGDQYADLFLAAKNLSDAILLSDILRVNTEITKAPLSASMIKRYDEHHQDLTLLKALVRQQLPEKYKEIFFDQSKNGYAGYIDGGASQEEFYKFIKPILEKMDGTEELLVKLNREDLLRKQRTFDNGSIPHQIHLGELHAILRRQEDFYPFLKDNREKIEKILTFRIPYYVGPLARGNSRFAWMTRKSEETITPWNFEEVVDKGASAQSFIERMTNFDKNLPNEKVLPKHSLLYEYFTVYNELTKVKYVTEGMRKPAFLSGEQKKAIVDLLFKTNRKVTVKQLKEDYFKKIECFDSVEISGVEDRFNASLGTYHDLLKIIKDKDFLDNEENEDILEDIVLTLTLFEDREMIEERLKTYAHLFDDKVMKQLKRRRYTGWGRLSRKLINGIRDKQSGKTILDFLKSDGFANRNFMQLIHDDSLTFKEDIQKAQVSGQGDSLHEHIANLAGSPAIKKGILQTVKVVDELVKVMGRHKPENIVIEMARENQTTQKGQKNSRERMKRIEEGIKELGSQILKEHPVENTQLQNEKLYLYYLQNGRDMYVDQELDINRLSDYDVDHIVPQSFLKDDSIDNKVLTRSDKARGKSDNVPSEEVVKKMKNYWRQLLNAKLITQRKFDNLTKAERGGLSELDKAGFIKRQLVETRQITKHVAQILDSRMNTKYDENDKLIREVKVITLKSKLVSDFRKDFQFYKVREINNYHHAHDAYLNAVVGTALIKKYPKLESEFVYGDYKVYDVRKMIAKSEQEIGKATAKYFFYSNIMNFFKTEITLANGEIRKRPLIETNGETGEIVWDKGRDFATVRKVLSMPQVNIVKKTEVQTGGFSKESILPKRNSDKLIARKKDWDPKKYGGFDSPTVAYSVLVVAKVEKGKSKKLKSVKELLGITIMERSSFEKNPIDFLEAKGYKEVKKDLIIKLPKYSLFELENGRKRMLASAGELQKGNELALPSKYVNFLYLASHYEKLKGSPEDNEQKQLFVEQHKHYLDEIIEQISEFSKRVILADANLDKVLSAYNKHRDKPIREQAENIIHLFTLTNLGAPAAFKYFDTTIDRKRYTSTKEVLDATLIHQSITGLYETRIDLSQLGGDGGGGSGSSGGGGGTLNIEDEHRLHETSKEPDVSLGSTWLSDFPQAWAETGGMGLAVRQAPLIIPLKATSTPVSIKQYPMSQEARLGIKPHIQRLLDQGILVPCQSPWNTPLLPVKKPGTNDYRPVQDLREVNKRVEDIHPTVPNPYNLLSGLPPSHQWYTVLDLKDAFFCLRLHPTSQPLFAFEWRDPEMGISGQLTWTRLPQGFKNSPTLFNEALHRDLADFRIQHPDLILLQYVDDLLLAATSELDCQQGTRALLQTLGNLGYRASAKKAQICQKQVKYLGYLLKEGQRWLTEARKETVMGQPTPKTPRQLREFLGKAGFCRLFIPGFAEMAAPLYPLTKPGTLFNWGPDQQKAYQEIKQALLTAPALGLPDLTKPFELFVDEKQGYAKGVLTQKLGPWRRPVAYLSKKLDPVAAGWPPCLRMVAAIAVLTKDAGKLTMGQPLVILAPHAVEALVKQPPDRWLSNARMTHYQALLLDTDRVQFGPVVALNPATLLPLPEEGLQHNCLDILAEAHGTRPDLTDQPLPDADHTWYTDGSSLLQEGQRKAGAAVTTETEVIWAKALPAGTSAQRAELIALTQALKMAEGKKLNVYTDSRYAFATAHIHGEIYRRRGWLTSEGKEIKNKDEILALLKALFLPKRLSIIHCPGHQKGHSAEARGNRMADQAARKAAITETPDTSTLLAGKRTADGSEFEKRTADGSEFESPKKKAKVE

SEQ ID NO: 2819 - protein, 2100 aa, synthetic construct
MPAAKRVKLDGGDKKYSIGLDIGTNSVGWAVITDEYKVPSKKFKVLGNTDRHSIKKNLIGALLFDSGETAEATRLKRTARRRYTRRKNRICYLQEIFSNEMAKVDDSFFHRLEESFLVEEDKKHERHPIFGNIVDEVAYHEKYPTIYHLRKKLVDSTDKADLRLIYLALAHMIKFRGHFLIEGDLNPDNSDVDKLFIQLVQTYNQLFEENPINASGVDAKAILSARLSKSRRLENLIAQLPGEKKNGLFGNLIALSLGLTPNFKSNFDLAEDAKLQLSKDTYDDDLDNLLAQIGDQYADLFLAAKNLSDAILLSDILRVNTEITKAPLSASMIKRYDEHHQDLTLLKALVRQQLPEKYKEIFFDQSKNGYAGYIDGGASQEEFYKFIKPILEKMDGTEELLVKLNREDLLRKQRTFDNGSIPHQIHLGELHAILRRQEDFYPFLKDNREKIEKILTFRIPYYVGPLARGNSRFAWMTRKSEETITPWNFEEVVDKGASAQSFIERMTNFDKNLPNEKVLPKHSLLYEYFTVYNELTKVKYVTEGMRKPAFLSGEQKKAIVDLLFKTNRKVTVKQLKEDYFKKIECFDSVEISGVEDRFNASLGTYHDLLKIIKDKDFLDNEENEDILEDIVLTLTLFEDREMIEERLKTYAHLFDDKVMKQLKRRRYTGWGRLSRKLINGIRDKQSGKTILDFLKSDGFANRNFMQLIHDDSLTFKEDIQKAQVSGQGDSLHEHIANLAGSPAIKKGILQTVKVVDELVKVMGRHKPENIVIEMARENQTTQKGQKNSRERMKRIEEGIKELGSQILKEHPVENTQLQNEKLYLYYLQNGRDMYVDQELDINRLSDYDVDHIVPQSFLKDDSIDNKVLTRSDKARGKSDNVPSEEVVKKMKNYWRQLLNAKLITQRKFDNLTKAERGGLSELDKAGFIKRQLVETRQITKHVAQILDSRMNTKYDENDKLIREVKVITLKSKLVSDFRKDFQFYKVREINNYHHAHDAYLNAVVGTALIKKYPKLESEFVYGDYKVYDVRKMIAKSEQEIGKATAKYFFYSNIMNFFKTEITLANGEIRKRPLIETNGETGEIVWDKGRDFATVRKVLSMPQVNIVKKTEVQTGGFSKESILPKRNSDKLIARKKDWDPKKYGGFDSPTVAYSVLVVAKVEKGKSKKLKSVKELLGITIMERSSFEKNPIDFLEAKGYKEVKKDLIIKLPKYSLFELENGRKRMLASAGELQKGNELALPSKYVNFLYLASHYEKLKGSPEDNEQKQLFVEQHKHYLDEIIEQISEFSKRVILADANLDKVLSAYNKHRDKPIREQAENIIHLFTLTNLGAPAAFKYFDTTIDRKRYTSTKEVLDATLIHQSITGLYETRIDLSQLGGDGGGGGGSGGGGSGGGGSGGTLNIEDEHRLHETSKEPDVSLGSTWLSDFPQAWAETGGMGLAVRQAPLIIPLKATSTPVSIKQYPMSQEARLGIKPHIQRLLDQGILVPCQSPWNTPLLPVKKPGTNDYRPVQDLREVNKRVEDIHPTVPNPYNLLSGLPPSHQWYTVLDLKDAFFCLRLHPTSQPLFAFEWRDPEMGISGQLTWTRLPQGFKNSPTLFNEALHRDLADFRIQHPDLILLQYVDDLLLAATSELDCQQGTRALLQTLGNLGYRASAKKAQICQKQVKYLGYLLKEGQRWLTEARKETVMGQPTPKTPRQLREFLGKAGFCRLFIPGFAEMAAPLYPLTKPGTLFNWGPDQQKAYQEIKQALLTAPALGLPDLTKPFELFVDEKQGYAKGVLTQKLGPWRRPVAYLSKKLDPVAAGWPPCLRMVAAIAVLTKDAGKLTMGQPLVILAPHAVEALVKQPPDRWLSNARMTHYQALLLDTDRVQFGPVVALNPATLLPLPEEGLQHNCLDILAEAHGTRPDLTDQPLPDADHTWYTDGSSLLQEGQRKAGAAVTTETEVIWAKALPAGTSAQRAELIALTQALKMAEGKKLNVYTDSRYAFATAHIHGEIYRRRGWLTSEGKEIKNKDEILALLKALFLPKRLSIIHCPGHQKGHSAEARGNRMADQAARKAAITETPDTSTLLAGKRTADGSEFEKRTADGSEFESPKKKAKVE

SEQ ID NO: 2820 - protein, 2091 aa, synthetic construct
MPAAKRVKLDGGDKKYSIGLDIGTNSVGWAVITDEYKVPSKKFKVLGNTDRHSIKKNLIGALLFDSGETAEATRLKRTARRRYTRRKNRICYLQEIFSNEMAKVDDSFFHRLEESFLVEEDKKHERHPIFGNIVDEVAYHEKYPTIYHLRKKLVDSTDKADLRLIYLALAHMIKFRGHFLIEGDLNPDNSDVDKLFIQLVQTYNQLFEENPINASGVDAKAILSARLSKSRRLENLIAQLPGEKKNGLFGNLIALSLGLTPNFKSNFDLAEDAKLQLSKDTYDDDLDNLLAQIGDQYADLFLAAKNLSDAILLSDILRVNTEITKAPLSASMIKRYDEHHQDLTLLKALVRQQLPEKYKEIFFDQSKNGYAGYIDGGASQEEFYKFIKPILEKMDGTEELLVKLNREDLLRKQRTFDNGSIPHQIHLGELHAILRRQEDFYPFLKDNREKIEKILTFRIPYYVGPLARGNSRFAWMTRKSEETITPWNFEEVVDKGASAQSFIERMTNFDKNLPNEKVLPKHSLLYEYFTVYNELTKVKYVTEGMRKPAFLSGEQKKAIVDLLFKTNRKVTVKQLKEDYFKKIECFDSVEISGVEDRFNASLGTYHDLLKIIKDKDFLDNEENEDILEDIVLTLTLFEDREMIEERLKTYAHLFDDKVMKQLKRRRYTGWGRLSRKLINGIRDKQSGKTILDFLKSDGFANRNFMQLIHDDSLTFKEDIQKAQVSGQGDSLHEHIANLAGSPAIKKGILQTVKVVDELVKVMGRHKPENIVIEMARENQTTQKGQKNSRERMKRIEEGIKELGSQILKEHPVENTQLQNEKLYLYYLQNGRDMYVDQELDINRLSDYDVDHIVPQSFLKDDSIDNKVLTRSDKARGKSDNVPSEEVVKKMKNYWRQLLNAKLITQRKFDNLTKAERGGLSELDKAGFIKRQLVETRQITKHVAQILDSRMNTKYDENDKLIREVKVITLKSKLVSDFRKDFQFYKVREINNYHHAHDAYLNAVVGTALIKKYPKLESEFVYGDYKVYDVRKMIAKSEQEIGKATAKYFFYSNIMNFFKTEITLANGEIRKRPLIETNGETGEIVWDKGRDFATVRKVLSMPQVNIVKKTEVQTGGFSKESILPKRNSDKLIARKKDWDPKKYGGFDSPTVAYSVLVVAKVEKGKSKKLKSVKELLGITIMERSSFEKNPIDFLEAKGYKEVKKDLIIKLPKYSLFELENGRKRMLASAGELQKGNELALPSKYVNFLYLASHYEKLKGSPEDNEQKQLFVEQHKHYLDEIIEQISEFSKRVILADANLDKVLSAYNKHRDKPIREQAENIIHLFTLTNLGAPAAFKYFDTTIDRKRYTSTKEVLDATLIHQSITGLYETRIDLSQLGGDGGGGGGSSGGTLNIEDEHRLHETSKEPDVSLGSTWLSDFPQAWAETGGMGLAVRQAPLIIPLKATSTPVSIKQYPMSQEARLGIKPHIQRLLDQGILVPCQSPWNTPLLPVKKPGTNDYRPVQDLREVNKRVEDIHPTVPNPYNLLSGLPPSHQWYTVLDLKDAFFCLRLHPTSQPLFAFEWRDPEMGISGQLTWTRLPQGFKNSPTLFNEALHRDLADFRIQHPDLILLQYVDDLLLAATSELDCQQGTRALLQTLGNLGYRASAKKAQICQKQVKYLGYLLKEGQRWLTEARKETVMGQPTPKTPRQLREFLGKAGFCRLFIPGFAEMAAPLYPLTKPGTLFNWGPDQQKAYQEIKQALLTAPALGLPDLTKPFELFVDEKQGYAKGVLTQKLGPWRRPVAYLSKKLDPVAAGWPPCLRMVAAIAVLTKDAGKLTMGQPLVILAPHAVEALVKQPPDRWLSNARMTHYQALLLDTDRVQFGPVVALNPATLLPLPEEGLQHNCLDILAEAHGTRPDLTDQPLPDADHTWYTDGSSLLQEGQRKAGAAVTTETEVIWAKALPAGTSAQRAELIALTQALKMAEGKKLNVYTDSRYAFATAHIHGEIYRRRGWLTSEGKEIKNKDEILALLKALFLPKRLSIIHCPGHQKGHSAEARGNRMADQAARKAAITETPDTSTLLAGKRTADGSEFEKRTADGSEFESPKKKAKVE

SEQ ID NO: 2821 - protein, 2093 aa, synthetic construct
MPAAKRVKLDGGDKKYSIGLDIGTNSVGWAVITDEYKVPSKKFKVLGNTDRHSIKKNLIGALLFDSGETAEATRLKRTARRRYTRRKNRICYLQEIFSNEMAKVDDSFFHRLEESFLVEEDKKHERHPIFGNIVDEVAYHEKYPTIYHLRKKLVDSTDKADLRLIYLALAHMIKFRGHFLIEGDLNPDNSDVDKLFIQLVQTYNQLFEENPINASGVDAKAILSARLSKSRRLENLIAQLPGEKKNGLFGNLIALSLGLTPNFKSNFDLAEDAKLQLSKDTYDDDLDNLLAQIGDQYADLFLAAKNLSDAILLSDILRVNTEITKAPLSASMIKRYDEHHQDLTLLKALVRQQLPEKYKEIFFDQSKNGYAGYIDGGASQEEFYKFIKPILEKMDGTEELLVKLNREDLLRKQRTFDNGSIPHQIHLGELHAILRRQEDFYPFLKDNREKIEKILTFRIPYYVGPLARGNSRFAWMTRKSEETITPWNFEEVVDKGASAQSFIERMTNFDKNLPNEKVLPKHSLLYEYFTVYNELTKVKYVTEGMRKPAFLSGEQKKAIVDLLFKTNRKVTVKQLKEDYFKKIECFDSVEISGVEDRFNASLGTYHDLLKIIKDKDFLDNEENEDILEDIVLTLTLFEDREMIEERLKTYAHLFDDKVMKQLKRRRYTGWGRLSRKLINGIRDKQSGKTILDFLKSDGFANRNFMQLIHDDSLTFKEDIQKAQVSGQGDSLHEHIANLAGSPAIKKGILQTVKVVDELVKVMGRHKPENIVIEMARENQTTQKGQKNSRERMKRIEEGIKELGSQILKEHPVENTQLQNEKLYLYYLQNGRDMYVDQELDINRLSDYDVDHIVPQSFLKDDSIDNKVLTRSDKARGKSDNVPSEEVVKKMKNYWRQLLNAKLITQRKFDNLTKAERGGLSELDKAGFIKRQLVETRQITKHVAQILDSRMNTKYDENDKLIREVKVITLKSKLVSDFRKDFQFYKVREINNYHHAHDAYLNAVVGTALIKKYPKLESEFVYGDYKVYDVRKMIAKSEQEIGKATAKYFFYSNIMNFFKTEITLANGEIRKRPLIETNGETGEIVWDKGRDFATVRKVLSMPQVNIVKKTEVQTGGFSKESILPKRNSDKLIARKKDWDPKKYGGFDSPTVAYSVLVVAKVEKGKSKKLKSVKELLGITIMERSSFEKNPIDFLEAKGYKEVKKDLIIKLPKYSLFELENGRKRMLASAGELQKGNELALPSKYVNFLYLASHYEKLKGSPEDNEQKQLFVEQHKHYLDEIIEQISEFSKRVILADANLDKVLSAYNKHRDKPIREQAENIIHLFTLTNLGAPAAFKYFDTTIDRKRYTSTKEVLDATLIHQSITGLYETRIDLSQLGGDGGEAAAKGSSGGTLNIEDEHRLHETSKEPDVSLGSTWLSDFPQAWAETGGMGLAVRQAPLIIPLKATSTPVSIKQYPMSQEARLGIKPHIQRLLDQGILVPCQSPWNTPLLPVKKPGTNDYRPVQDLREVNKRVEDIHPTVPNPYNLLSGLPPSHQWYTVLDLKDAFFCLRLHPTSQPLFAFEWRDPEMGISGQLTWTRLPQGFKNSPTLFNEALHRDLADFRIQHPDLILLQYVDDLLLAATSELDCQQGTRALLQTLGNLGYRASAKKAQICQKQVKYLGYLLKEGQRWLTEARKETVMGQPTPKTPRQLREFLGKAGFCRLFIPGFAEMAAPLYPLTKPGTLFNWGPDQQKAYQEIKQALLTAPALGLPDLTKPFELFVDEKQGYAKGVLTQKLGPWRRPVAYLSKKLDPVAAGWPPCLRMVAAIAVLTKDAGKLTMGQPLVILAPHAVEALVKQPPDRWLSNARMTHYQALLLDTDRVQFGPVVALNPATLLPLPEEGLQHNCLDILAEAHGTRPDLTDQPLPDADHTWYTDGSSLLQEGQRKAGAAVTTETEVIWAKALPAGTSAQRAELIALTQALKMAEGKKLNVYTDSRYAFATAHIHGEIYRRRGWLTSEGKEIKNKDEILALLKALFLPKRLSIIHCPGHQKGHSAEARGNRMADQAARKAAITETPDTSTLLAGKRTADGSEFEKRTADGSEFESPKKKAKVE

SEQ ID NO: 2822 - protein, 2096 aa, synthetic construct
MPAAKRVKLDGGDKKYSIGLDIGTNSVGWAVITDEYKVPSKKFKVLGNTDRHSIKKNLIGALLFDSGETAEATRLKRTARRRYTRRKNRICYLQEIFSNEMAKVDDSFFHRLEESFLVEEDKKHERHPIFGNIVDEVAYHEKYPTIYHLRKKLVDSTDKADLRLIYLALAHMIKFRGHFLIEGDLNPDNSDVDKLFIQLVQTYNQLFEENPINASGVDAKAILSARLSKSRRLENLIAQLPGEKKNGLFGNLIALSLGLTPNFKSNFDLAEDAKLQLSKDTYDDDLDNLLAQIGDQYADLFLAAKNLSDAILLSDILRVNTEITKAPLSASMIKRYDEHHQDLTLLKALVRQQLPEKYKEIFFDQSKNGYAGYIDGGASQEEFYKFIKPILEKMDGTEELLVKLNREDLLRKQRTFDNGSIPHQIHLGELHAILRRQEDFYPFLKDNREKIEKILTFRIPYYVGPLARGNSRFAWMTRKSEETITPWNFEEVVDKGASAQSFIERMTNFDKNLPNEKVLPKHSLLYEYFTVYNELTKVKYVTEGMRKPAFLSGEQKKAIVDLLFKTNRKVTVKQLKEDYFKKIECFDSVEISGVEDRFNASLGTYHDLLKIIKDKDFLDNEENEDILEDIVLTLTLFEDREMIEERLKTYAHLFDDKVMKQLKRRRYTGWGRLSRKLINGIRDKQSGKTILDFLKSDGFANRNFMQLIHDDSLTFKEDIQKAQVSGQGDSLHEHIANLAGSPAIKKGILQTVKVVDELVKVMGRHKPENIVIEMARENQTTQKGQKNSRERMKRIEEGIKELGSQILKEHPVENTQLQNEKLYLYYLQNGRDMYVDQELDINRLSDYDVDHIVPQSFLKDDSIDNKVLTRSDKARGKSDNVPSEEVVKKMKNYWRQLLNAKLITQRKFDNLTKAERGGLSELDKAGFIKRQLVETRQITKHVAQILDSRMNTKYDENDKLIREVKVITLKSKLVSDFRKDFQFYKVREINNYHHAHDAYLNAVVGTALIKKYPKLESEFVYGDYKVYDVRKMIAKSEQEIGKATAKYFFYSNIMNFFKTEITLANGEIRKRPLIETNGETGEIVWDKGRDFATVRKVLSMPQVNIVKKTEVQTGGFSKESILPKRNSDKLIARKKDWDPKKYGGFDSPTVAYSVLVVAKVEKGKSKKLKSVKELLGITIMERSSFEKNPIDFLEAKGYKEVKKDLIIKLPKYSLFELENGRKRMLASAGELQKGNELALPSKYVNFLYLASHYEKLKGSPEDNEQKQLFVEQHKHYLDEIIEQISEFSKRVILADANLDKVLSAYNKHRDKPIREQAENIIHLFTLTNLGAPAAFKYFDTTIDRKRYTSTKEVLDATLIHQSITGLYETRIDLSQLGGDGGPAPGGGEAAAKGGTLNIEDEHRLHETSKEPDVSLGSTWLSDFPQAWAETGGMGLAVRQAPLIIPLKATSTPVSIKQYPMSQEARLGIKPHIQRLLDQGILVPCQSPWNTPLLPVKKPGTNDYRPVQDLREVNKRVEDIHPTVPNPYNLLSGLPPSHQWYTVLDLKDAFFCLRLHPTSQPLFAFEWRDPEMGISGQLTWTRLPQGFKNSPTLFNEALHRDLADFRIQHPDLILLQYVDDLLLAATSELDCQQGTRALLQTLGNLGYRASAKKAQICQKQVKYLGYLLKEGQRWLTEARKETVMGQPTPKTPRQLREFLGKAGFCRLFIPGFAEMAAPLYPLTKPGTLFNWGPDQQKAYQEIKQALLTAPALGLPDLTKPFELFVDEKQGYAKGVLTQKLGPWRRPVAYLSKKLDPVAAGWPPCLRMVAAIAVLTKDAGKLTMGQPLVILAPHAVEALVKQPPDRWLSNARMTHYQALLLDTDRVQFGPVVALNPATLLPLPEEGLQHNCLDILAEAHGTRPDLTDQPLPDADHTWYTDGSSLLQEGQRKAGAAVTTETEVIWAKALPAGTSAQRAELIALTQALKMAEGKKLNVYTDSRYAFATAHIHGEIYRRRGWLTSEGKEIKNKDEILALLKALFLPKRLSIIHCPGHQKGHSAEARGNRMADQAARKAAITETPDTSTLLAGKRTADGSEFEKRTADGSEFESPKKKAKVE

SEQ ID NO: 2823 - protein, 2090 aa, synthetic construct
MPAAKRVKLDGGDKKYSIGLDIGTNSVGWAVITDEYKVPSKKFKVLGNTDRHSIKKNLIGALLFDSGETAEATRLKRTARRRYTRRKNRICYLQEIFSNEMAKVDDSFFHRLEESFLVEEDKKHERHPIFGNIVDEVAYHEKYPTIYHLRKKLVDSTDKADLRLIYLALAHMIKFRGHFLIEGDLNPDNSDVDKLFIQLVQTYNQLFEENPINASGVDAKAILSARLSKSRRLENLIAQLPGEKKNGLFGNLIALSLGLTPNFKSNFDLAEDAKLQLSKDTYDDDLDNLLAQIGDQYADLFLAAKNLSDAILLSDILRVNTEITKAPLSASMIKRYDEHHQDLTLLKALVRQQLPEKYKEIFFDQSKNGYAGYIDGGASQEEFYKFIKPILEKMDGTEELLVKLNREDLLRKQRTFDNGSIPHQIHLGELHAILRRQEDFYPFLKDNREKIEKILTFRIPYYVGPLARGNSRFAWMTRKSEETITPWNFEEVVDKGASAQSFIERMTNFDKNLPNEKVLPKHSLLYEYFTVYNELTKVKYVTEGMRKPAFLSGEQKKAIVDLLFKTNRKVTVKQLKEDYFKKIECFDSVEISGVEDRFNASLGTYHDLLKIIKDKDFLDNEENEDILEDIVLTLTLFEDREMIEERLKTYAHLFDDKVMKQLKRRRYTGWGRLSRKLINGIRDKQSGKTILDFLKSDGFANRNFMQLIHDDSLTFKEDIQKAQVSGQGDSLHEHIANLAGSPAIKKGILQTVKVVDELVKVMGRHKPENIVIEMARENQTTQKGQKNSRERMKRIEEGIKELGSQILKEHPVENTQLQNEKLYLYYLQNGRDMYVDQELDINRLSDYDVDHIVPQSFLKDDSIDNKVLTRSDKARGKSDNVPSEEVVKKMKNYWRQLLNAKLITQRKFDNLTKAERGGLSELDKAGFIKRQLVETRQITKHVAQILDSRMNTKYDENDKLIREVKVITLKSKLVSDFRKDFQFYKVREINNYHHAHDAYLNAVVGTALIKKYPKLESEFVYGDYKVYDVRKMIAKSEQEIGKATAKYFFYSNIMNFFKTEITLANGEIRKRPLIETNGETGEIVWDKGRDFATVRKVLSMPQVNIVKKTEVQTGGFSKESILPKRNSDKLIARKKDWDPKKYGGFDSPTVAYSVLVVAKVEKGKSKKLKSVKELLGITIMERSSFEKNPIDFLEAKGYKEVKKDLIIKLPKYSLFELENGRKRMLASAGELQKGNELALPSKYVNFLYLASHYEKLKGSPEDNEQKQLFVEQHKHYLDEIIEQISEFSKRVILADANLDKVLSAYNKHRDKPIREQAENIIHLFTLTNLGAPAAFKYFDTTIDRKRYTSTKEVLDATLIHQSITGLYETRIDLSQLGGDGGEAAAKGGTLNIEDEHRLHETSKEPDVSLGSTWLSDFPQAWAETGGMGLAVRQAPLIIPLKATSTPVSIKQYPMSQEARLGIKPHIQRLLDQGILVPCQSPWNTPLLPVKKPGTNDYRPVQDLREVNKRVEDIHPTVPNPYNLLSGLPPSHQWYTVLDLKDAFFCLRLHPTSQPLFAFEWRDPEMGISGQLTWTRLPQGFKNSPTLFNEALHRDLADFRIQHPDLILLQYVDDLLLAATSELDCQQGTRALLQTLGNLGYRASAKKAQICQKQVKYLGYLLKEGQRWLTEARKETVMGQPTPKTPRQLREFLGKAGFCRLFIPGFAEMAAPLYPLTKPGTLFNWGPDQQKAYQEIKQALLTAPALGLPDLTKPFELFVDEKQGYAKGVLTQKLGPWRRPVAYLSKKLDPVAAGWPPCLRMVAAIAVLTKDAGKLTMGQPLVILAPHAVEALVKQPPDRWLSNARMTHYQALLLDTDRVQFGPVVALNPATLLPLPEEGLQHNCLDILAEAHGTRPDLTDQPLPDADHTWYTDGSSLLQEGQRKAGAAVTTETEVIWAKALPAGTSAQRAELIALTQALKMAEGKKLNVYTDSRYAFATAHIHGEIYRRRGWLTSEGKEIKNKDEILALLKALFLPKRLSIIHCPGHQKGHSAEARGNRMADQAARKAAITETPDTSTLLAGKRTADGSEFEKRTADGSEFESPKKKAKVE

SEQ ID NO: 2824 - protein, 2088 aa, synthetic construct
MPAAKRVKLDGGDKKYSIGLDIGTNSVGWAVITDEYKVPSKKFKVLGNTDRHSIKKNLIGALLFDSGETAEATRLKRTARRRYTRRKNRICYLQEIFSNEMAKVDDSFFHRLEESFLVEEDKKHERHPIFGNIVDEVAYHEKYPTIYHLRKKLVDSTDKADLRLIYLALAHMIKFRGHFLIEGDLNPDNSDVDKLFIQLVQTYNQLFEENPINASGVDAKAILSARLSKSRRLENLIAQLPGEKKNGLFGNLIALSLGLTPNFKSNFDLAEDAKLQLSKDTYDDDLDNLLAQIGDQYADLFLAAKNLSDAILLSDILRVNTEITKAPLSASMIKRYDEHHQDLTLLKALVRQQLPEKYKEIFFDQSKNGYAGYIDGGASQEEFYKFIKPILEKMDGTEELLVKLNREDLLRKQRTFDNGSIPHQIHLGELHAILRRQEDFYPFLKDNREKIEKILTFRIPYYVGPLARGNSRFAWMTRKSEETITPWNFEEVVDKGASAQSFIERMTNFDKNLPNEKVLPKHSLLYEYFTVYNELTKVKYVTEGMRKPAFLSGEQKKAIVDLLFKTNRKVTVKQLKEDYFKKIECFDSVEISGVEDRFNASLGTYHDLLKIIKDKDFLDNEENEDILEDIVLTLTLFEDREMIEERLKTYAHLFDDKVMKQLKRRRYTGWGRLSRKLINGIRDKQSGKTILDFLKSDGFANRNFMQLIHDDSLTFKEDIQKAQVSGQGDSLHEHIANLAGSPAIKKGILQTVKVVDELVKVMGRHKPENIVIEMARENQTTQKGQKNSRERMKRIEEGIKELGSQILKEHPVENTQLQNEKLYLYYLQNGRDMYVDQELDINRLSDYDVDHIVPQSFLKDDSIDNKVLTRSDKARGKSDNVPSEEVVKKMKNYWRQLLNAKLITQRKFDNLTKAERGGLSELDKAGFIKRQLVETRQITKHVAQILDSRMNTKYDENDKLIREVKVITLKSKLVSDFRKDFQFYKVREINNYHHAHDAYLNAVVGTALIKKYPKLESEFVYGDYKVYDVRKMIAKSEQEIGKATAKYFFYSNIMNFFKTEITLANGEIRKRPLIETNGETGEIVWDKGRDFATVRKVLSMPQVNIVKKTEVQTGGFSKESILPKRNSDKLIARKKDWDPKKYGGFDSPTVAYSVLVVAKVEKGKSKKLKSVKELLGITIMERSSFEKNPIDFLEAKGYKEVKKDLIIKLPKYSLFELENGRKRMLASAGELQKGNELALPSKYVNFLYLASHYEKLKGSPEDNEQKQLFVEQHKHYLDEIIEQISEFSKRVILADANLDKVLSAYNKHRDKPIREQAENIIHLFTLTNLGAPAAFKYFDTTIDRKRYTSTKEVLDATLIHQSITGLYETRIDLSQLGGDGGGGGGGTLNIEDEHRLHETSKEPDVSLGSTWLSDFPQAWAETGGMGLAVRQAPLIIPLKATSTPVSIKQYPMSQEARLGIKPHIQRLLDQGILVPCQSPWNTPLLPVKKPGTNDYRPVQDLREVNKRVEDIHPTVPNPYNLLSGLPPSHQWYTVLDLKDAFFCLRLHPTSQPLFAFEWRDPEMGISGQLTWTRLPQGFKNSPTLFNEALHRDLADFRIQHPDLILLQYVDDLLLAATSELDCQQGTRALLQTLGNLGYRASAKKAQICQKQVKYLGYLLKEGQRWLTEARKETVMGQPTPKTPRQLREFLGKAGFCRLFIPGFAEMAAPLYPLTKPGTLFNWGPDQQKAYQEIKQALLTAPALGLPDLTKPFELFVDEKQGYAKGVLTQKLGPWRRPVAYLSKKLDPVAAGWPPCLRMVAAIAVLTKDAGKLTMGQPLVILAPHAVEALVKQPPDRWLSNARMTHYQALLLDTDRVQFGPVVALNPATLLPLPEEGLQHNCLDILAEAHGTRPDLTDQPLPDADHTWYTDGSSLLQEGQRKAGAAVTTETEVIWAKALPAGTSAQRAELIALTQALKMAEGKKLNVYTDSRYAFATAHIHGEIYRRRGWLTSEGKEIKNKDEILALLKALFLPKRLSIIHCPGHQKGHSAEARGNRMADQAARKAAITETPDTSTLLAGKRTADGSEFEKRTADGSEFESPKKKAKVE

SEQ ID NO: 2825 - protein, 2090 aa, synthetic construct
MPAAKRVKLDGGDKKYSIGLDIGTNSVGWAVITDEYKVPSKKFKVLGNTDRHSIKKNLIGALLFDSGETAEATRLKRTARRRYTRRKNRICYLQEIFSNEMAKVDDSFFHRLEESFLVEEDKKHERHPIFGNIVDEVAYHEKYPTIYHLRKKLVDSTDKADLRLIYLALAHMIKFRGHFLIEGDLNPDNSDVDKLFIQLVQTYNQLFEENPINASGVDAKAILSARLSKSRRLENLIAQLPGEKKNGLFGNLIALSLGLTPNFKSNFDLAEDAKLQLSKDTYDDDLDNLLAQIGDQYADLFLAAKNLSDAILLSDILRVNTEITKAPLSASMIKRYDEHHQDLTLLKALVRQQLPEKYKEIFFDQSKNGYAGYIDGGASQEEFYKFIKPILEKMDGTEELLVKLNREDLLRKQRTFDNGSIPHQIHLGELHAILRRQEDFYPFLKDNREKIEKILTFRIPYYVGPLARGNSRFAWMTRKSEETITPWNFEEVVDKGASAQSFIERMTNFDKNLPNEKVLPKHSLLYEYFTVYNELTKVKYVTEGMRKPAFLSGEQKKAIVDLLFKTNRKVTVKQLKEDYFKKIECFDSVEISGVEDRFNASLGTYHDLLKIIKDKDFLDNEENEDILEDIVLTLTLFEDREMIEERLKTYAHLFDDKVMKQLKRRRYTGWGRLSRKLINGIRDKQSGKTILDFLKSDGFANRNFMQLIHDDSLTFKEDIQKAQVSGQGDSLHEHIANLAGSPAIKKGILQTVKVVDELVKVMGRHKPENIVIEMARENQTTQKGQKNSRERMKRIEEGIKELGSQILKEHPVENTQLQNEKLYLYYLQNGRDMYVDQELDINRLSDYDVDHIVPQSFLKDDSIDNKVLTRSDKARGKSDNVPSEEVVKKMKNYWRQLLNAKLITQRKFDNLTKAERGGLSELDKAGFIKRQLVETRQITKHVAQILDSRMNTKYDENDKLIREVKVITLKSKLVSDFRKDFQFYKVREINNYHHAHDAYLNAVVGTALIKKYPKLESEFVYGDYKVYDVRKMIAKSEQEIGKATAKYFFYSNIMNFFKTEITLANGEIRKRPLIETNGETGEIVWDKGRDFATVRKVLSMPQVNIVKKTEVQTGGFSKESILPKRNSDKLIARKKDWDPKKYGGFDSPTVAYSVLVVAKVEKGKSKKLKSVKELLGITIMERSSFEKNPIDFLEAKGYKEVKKDLIIKLPKYSLFELENGRKRMLASAGELQKGNELALPSKYVNFLYLASHYEKLKGSPEDNEQKQLFVEQHKHYLDEIIEQISEFSKRVILADANLDKVLSAYNKHRDKPIREQAENIIHLFTLTNLGAPAAFKYFDTTIDRKRYTSTKEVLDATLIHQSITGLYETRIDLSQLGGDGGGGGGSGGTLNIEDEHRLHETSKEPDVSLGSTWLSDFPQAWAETGGMGLAVRQAPLIIPLKATSTPVSIKQYPMSQEARLGIKPHIQRLLDQGILVPCQSPWNTPLLPVKKPGTNDYRPVQDLREVNKRVEDIHPTVPNPYNLLSGLPPSHQWYTVLDLKDAFFCLRLHPTSQPLFAFEWRDPEMGISGQLTWTRLPQGFKNSPTLFNEALHRDLADFRIQHPDLILLQYVDDLLLAATSELDCQQGTRALLQTLGNLGYRASAKKAQICQKQVKYLGYLLKEGQRWLTEARKETVMGQPTPKTPRQLREFLGKAGFCRLFIPGFAEMAAPLYPLTKPGTLFNWGPDQQKAYQEIKQALLTAPALGLPDLTKPFELFVDEKQGYAKGVLTQKLGPWRRPVAYLSKKLDPVAAGWPPCLRMVAAIAVLTKDAGKLTMGQPLVILAPHAVEALVKQPPDRWLSNARMTHYQALLLDTDRVQFGPVVALNPATLLPLPEEGLQHNCLDILAEAHGTRPDLTDQPLPDADHTWYTDGSSLLQEGQRKAGAAVTTETEVIWAKALPAGTSAQRAELIALTQALKMAEGKKLNVYTDSRYAFATAHIHGEIYRRRGWLTSEGKEIKNKDEILALLKALFLPKRLSIIHCPGHQKGHSAEARGNRMADQAARKAAITETPDTSTLLAGKRTADGSEFEKRTADGSEFESPKKKAKVE

SEQ ID NO: 2826 - protein, 2096 aa, synthetic construct
MPAAKRVKLDGGDKKYSIGLDIGTNSVGWAVITDEYKVPSKKFKVLGNTDRHSIKKNLIGALLFDSGETAEATRLKRTARRRYTRRKNRICYLQEIFSNEMAKVDDSFFHRLEESFLVEEDKKHERHPIFGNIVDEVAYHEKYPTIYHLRKKLVDSTDKADLRLIYLALAHMIKFRGHFLIEGDLNPDNSDVDKLFIQLVQTYNQLFEENPINASGVDAKAILSARLSKSRRLENLIAQLPGEKKNGLFGNLIALSLGLTPNFKSNFDLAEDAKLQLSKDTYDDDLDNLLAQIGDQYADLFLAAKNLSDAILLSDILRVNTEITKAPLSASMIKRYDEHHQDLTLLKALVRQQLPEKYKEIFFDQSKNGYAGYIDGGASQEEFYKFIKPILEKMDGTEELLVKLNREDLLRKQRTFDNGSIPHQIHLGELHAILRRQEDFYPFLKDNREKIEKILTFRIPYYVGPLARGNSRFAWMTRKSEETITPWNFEEVVDKGASAQSFIERMTNFDKNLPNEKVLPKHSLLYEYFTVYNELTKVKYVTEGMRKPAFLSGEQKKAIVDLLFKTNRKVTVKQLKEDYFKKIECFDSVEISGVEDRFNASLGTYHDLLKIIKDKDFLDNEENEDILEDIVLTLTLFEDREMIEERLKTYAHLFDDKVMKQLKRRRYTGWGRLSRKLINGIRDKQSGKTILDFLKSDGFANRNFMQLIHDDSLTFKEDIQKAQVSGQGDSLHEHIANLAGSPAIKKGILQTVKVVDELVKVMGRHKPENIVIEMARENQTTQKGQKNSRERMKRIEEGIKELGSQILKEHPVENTQLQNEKLYLYYLQNGRDMYVDQELDINRLSDYDVDHIVPQSFLKDDSIDNKVLTRSDKARGKSDNVPSEEVVKKMKNYWRQLLNAKLITQRKFDNLTKAERGGLSELDKAGFIKRQLVETRQITKHVAQILDSRMNTKYDENDKLIREVKVITLKSKLVSDFRKDFQFYKVREINNYHHAHDAYLNAVVGTALIKKYPKLESEFVYGDYKVYDVRKMIAKSEQEIGKATAKYFFYSNIMNFFKTEITLANGEIRKRPLIETNGETGEIVWDKGRDFATVRKVLSMPQVNIVKKTEVQTGGFSKESILPKRNSDKLIARKKDWDPKKYGGFDSPTVAYSVLVVAKVEKGKSKKLKSVKELLGITIMERSSFEKNPIDFLEAKGYKEVKKDLIIKLPKYSLFELENGRKRMLASAGELQKGNELALPSKYVNFLYLASHYEKLKGSPEDNEQKQLFVEQHKHYLDEIIEQISEFSKRVILADANLDKVLSAYNKHRDKPIREQAENIIHLFTLTNLGAPAAFKYFDTTIDRKRYTSTKEVLDATLIHQSITGLYETRIDLSQLGGDGGGGSEAAAKGSSGGTLNIEDEHRLHETSKEPDVSLGSTWLSDFPQAWAETGGMGLAVRQAPLIIPLKATSTPVSIKQYPMSQEARLGIKPHIQRLLDQGILVPCQSPWNTPLLPVKKPGTNDYRPVQDLREVNKRVEDIHPTVPNPYNLLSGLPPSHQWYTVLDLKDAFFCLRLHPTSQPLFAFEWRDPEMGISGQLTWTRLPQGFKNSPTLFNEALHRDLADFRIQHPDLILLQYVDDLLLAATSELDCQQGTRALLQTLGNLGYRASAKKAQICQKQVKYLGYLLKEGQRWLTEARKETVMGQPTPKTPRQLREFLGKAGFCRLFIPGFAEMAAPLYPLTKPGTLFNWGPDQQKAYQEIKQALLTAPALGLPDLTKPFELFVDEKQGYAKGVLTQKLGPWRRPVAYLSKKLDPVAAGWPPCLRMVAAIAVLTKDAGKLTMGQPLVILAPHAVEALVKQPPDRWLSNARMTHYQALLLDTDRVQFGPVVALNPATLLPLPEEGLQHNCLDILAEAHGTRPDLTDQPLPDADHTWYTDGSSLLQEGQRKAGAAVTTETEVIWAKALPAGTSAQRAELIALTQALKMAEGKKLNVYTDSRYAFATAHIHGEIYRRRGWLTSEGKEIKNKDEILALLKALFLPKRLSIIHCPGHQKGHSAEARGNRMADQAARKAAITETPDTSTLLAGKRTADGSEFEKRTADGSEFESPKKKAKVE

SEQ ID NO: 2827 - protein, 2115 aa, synthetic construct
MPAAKRVKLDGGDKKYSIGLDIGTNSVGWAVITDEYKVPSKKFKVLGNTDRHSIKKNLIGALLFDSGETAEATRLKRTARRRYTRRKNRICYLQEIFSNEMAKVDDSFFHRLEESFLVEEDKKHERHPIFGNIVDEVAYHEKYPTIYHLRKKLVDSTDKADLRLIYLALAHMIKFRGHFLIEGDLNPDNSDVDKLFIQLVQTYNQLFEENPINASGVDAKAILSARLSKSRRLENLIAQLPGEKKNGLFGNLIALSLGLTPNFKSNFDLAEDAKLQLSKDTYDDDLDNLLAQIGDQYADLFLAAKNLSDAILLSDILRVNTEITKAPLSASMIKRYDEHHQDLTLLKALVRQQLPEKYKEIFFDQSKNGYAGYIDGGASQEEFYKFIKPILEKMDGTEELLVKLNREDLLRKQRTFDNGSIPHQIHLGELHAILRRQEDFYPFLKDNREKIEKILTFRIPYYVGPLARGNSRFAWMTRKSEETITPWNFEEVVDKGASAQSFIERMTNFDKNLPNEKVLPKHSLLYEYFTVYNELTKVKYVTEGMRKPAFLSGEQKKAIVDLLFKTNRKVTVKQLKEDYFKKIECFDSVEISGVEDRFNASLGTYHDLLKIIKDKDFLDNEENEDILEDIVLTLTLFEDREMIEERLKTYAHLFDDKVMKQLKRRRYTGWGRLSRKLINGIRDKQSGKTILDFLKSDGFANRNFMQLIHDDSLTFKEDIQKAQVSGQGDSLHEHIANLAGSPAIKKGILQTVKVVDELVKVMGRHKPENIVIEMARENQTTQKGQKNSRERMKRIEEGIKELGSQILKEHPVENTQLQNEKLYLYYLQNGRDMYVDQELDINRLSDYDVDHIVPQSFLKDDSIDNKVLTRSDKARGKSDNVPSEEVVKKMKNYWRQLLNAKLITQRKFDNLTKAERGGLSELDKAGFIKRQLVETRQITKHVAQILDSRMNTKYDENDKLIREVKVITLKSKLVSDFRKDFQFYKVREINNYHHAHDAYLNAVVGTALIKKYPKLESEFVYGDYKVYDVRKMIAKSEQEIGKATAKYFFYSNIMNFFKTEITLANGEIRKRPLIETNGETGEIVWDKGRDFATVRKVLSMPQVNIVKKTEVQTGGFSKESILPKRNSDKLIARKKDWDPKKYGGFDSPTVAYSVLVVAKVEKGKSKKLKSVKELLGITIMERSSFEKNPIDFLEAKGYKEVKKDLIIKLPKYSLFELENGRKRMLASAGELQKGNELALPSKYVNFLYLASHYEKLKGSPEDNEQKQLFVEQHKHYLDEIIEQISEFSKRVILADANLDKVLSAYNKHRDKPIREQAENIIHLFTLTNLGAPAAFKYFDTTIDRKRYTSTKEVLDATLIHQSITGLYETRIDLSQLGGDGGGGGGSGGGGSGGGGSGGGGSGGGGSGGGGSGGTLNIEDEHRLHETSKEPDVSLGSTWLSDFPQAWAETGGMGLAVRQAPLIIPLKATSTPVSIKQYPMSQEARLGIKPHIQRLLDQGILVPCQSPWNTPLLPVKKPGTNDYRPVQDLREVNKRVEDIHPTVPNPYNLLSGLPPSHQWYTVLDLKDAFFCLRLHPTSQPLFAFEWRDPEMGISGQLTWTRLPQGFKNSPTLFNEALHRDLADFRIQHPDLILLQYVDDLLLAATSELDCQQGTRALLQTLGNLGYRASAKKAQICQKQVKYLGYLLKEGQRWLTEARKETVMGQPTPKTPRQLREFLGKAGFCRLFIPGFAEMAAPLYPLTKPGTLFNWGPDQQKAYQEIKQALLTAPALGLPDLTKPFELFVDEKQGYAKGVLTQKLGPWRRPVAYLSKKLDPVAAGWPPCLRMVAAIAVLTKDAGKLTMGQPLVILAPHAVEALVKQPPDRWLSNARMTHYQALLLDTDRVQFGPVVALNPATLLPLPEEGLQHNCLDILAEAHGTRPDLTDQPLPDADHTWYTDGSSLLQEGQRKAGAAVTTETEVIWAKALPAGTSAQRAELIALTQALKMAEGKKLNVYTDSRYAFATAHIHGEIYRRRGWLTSEGKEIKNKDEILALLKALFLPKRLSIIHCPGHQKGHSAEARGNRMADQAARKAAITETPDTSTLLAGKRTADGSEFEKRTADGSEFESPKKKAKVE

SEQ ID NO: 2828 - protein, 2093 aa, synthetic construct
MPAAKRVKLDGGDKKYSIGLDIGTNSVGWAVITDEYKVPSKKFKVLGNTDRHSIKKNLIGALLFDSGETAEATRLKRTARRRYTRRKNRICYLQEIFSNEMAKVDDSFFHRLEESFLVEEDKKHERHPIFGNIVDEVAYHEKYPTIYHLRKKLVDSTDKADLRLIYLALAHMIKFRGHFLIEGDLNPDNSDVDKLFIQLVQTYNQLFEENPINASGVDAKAILSARLSKSRRLENLIAQLPGEKKNGLFGNLIALSLGLTPNFKSNFDLAEDAKLQLSKDTYDDDLDNLLAQIGDQYADLFLAAKNLSDAILLSDILRVNTEITKAPLSASMIKRYDEHHQDLTLLKALVRQQLPEKYKEIFFDQSKNGYAGYIDGGASQEEFYKFIKPILEKMDGTEELLVKLNREDLLRKQRTFDNGSIPHQIHLGELHAILRRQEDFYPFLKDNREKIEKILTFRIPYYVGPLARGNSRFAWMTRKSEETITPWNFEEVVDKGASAQSFIERMTNFDKNLPNEKVLPKHSLLYEYFTVYNELTKVKYVTEGMRKPAFLSGEQKKAIVDLLFKTNRKVTVKQLKEDYFKKIECFDSVEISGVEDRFNASLGTYHDLLKIIKDKDFLDNEENEDILEDIVLTLTLFEDREMIEERLKTYAHLFDDKVMKQLKRRRYTGWGRLSRKLINGIRDKQSGKTILDFLKSDGFANRNFMQLIHDDSLTFKEDIQKAQVSGQGDSLHEHIANLAGSPAIKKGILQTVKVVDELVKVMGRHKPENIVIEMARENQTTQKGQKNSRERMKRIEEGIKELGSQILKEHPVENTQLQNEKLYLYYLQNGRDMYVDQELDINRLSDYDVDHIVPQSFLKDDSIDNKVLTRSDKARGKSDNVPSEEVVKKMKNYWRQLLNAKLITQRKFDNLTKAERGGLSELDKAGFIKRQLVETRQITKHVAQILDSRMNTKYDENDKLIREVKVITLKSKLVSDFRKDFQFYKVREINNYHHAHDAYLNAVVGTALIKKYPKLESEFVYGDYKVYDVRKMIAKSEQEIGKATAKYFFYSNIMNFFKTEITLANGEIRKRPLIETNGETGEIVWDKGRDFATVRKVLSMPQVNIVKKTEVQTGGFSKESILPKRNSDKLIARKKDWDPKKYGGFDSPTVAYSVLVVAKVEKGKSKKLKSVKELLGITIMERSSFEKNPIDFLEAKGYKEVKKDLIIKLPKYSLFELENGRKRMLASAGELQKGNELALPSKYVNFLYLASHYEKLKGSPEDNEQKQLFVEQHKHYLDEIIEQISEFSKRVILADANLDKVLSAYNKHRDKPIREQAENIIHLFTLTNLGAPAAFKYFDTTIDRKRYTSTKEVLDATLIHQSITGLYETRIDLSQLGGDGGGSSEAAAKGGTLNIEDEHRLHETSKEPDVSLGSTWLSDFPQAWAETGGMGLAVRQAPLIIPLKATSTPVSIKQYPMSQEARLGIKPHIQRLLDQGILVPCQSPWNTPLLPVKKPGTNDYRPVQDLREVNKRVEDIHPTVPNPYNLLSGLPPSHQWYTVLDLKDAFFCLRLHPTSQPLFAFEWRDPEMGISGQLTWTRLPQGFKNSPTLFNEALHRDLADFRIQHPDLILLQYVDDLLLAATSELDCQQGTRALLQTLGNLGYRASAKKAQICQKQVKYLGYLLKEGQRWLTEARKETVMGQPTPKTPRQLREFLGKAGFCRLFIPGFAEMAAPLYPLTKPGTLFNWGPDQQKAYQEIKQALLTAPALGLPDLTKPFELFVDEKQGYAKGVLTQKLGPWRRPVAYLSKKLDPVAAGWPPCLRMVAAIAVLTKDAGKLTMGQPLVILAPHAVEALVKQPPDRWLSNARMTHYQALLLDTDRVQFGPVVALNPATLLPLPEEGLQHNCLDILAEAHGTRPDLTDQPLPDADHTWYTDGSSLLQEGQRKAGAAVTTETEVIWAKALPAGTSAQRAELIALTQALKMAEGKKLNVYTDSRYAFATAHIHGEIYRRRGWLTSEGKEIKNKDEILALLKALFLPKRLSIIHCPGHQKGHSAEARGNRMADQAARKAAITETPDTSTLLAGKRTADGSEFEKRTADGSEFESPKKKAKVE

SEQ ID NO: 2829 - protein, 2096 aa, synthetic construct
MPAAKRVKLDGGDKKYSIGLDIGTNSVGWAVITDEYKVPSKKFKVLGNTDRHSIKKNLIGALLFDSGETAEATRLKRTARRRYTRRKNRICYLQEIFSNEMAKVDDSFFHRLEESFLVEEDKKHERHPIFGNIVDEVAYHEKYPTIYHLRKKLVDSTDKADLRLIYLALAHMIKFRGHFLIEGDLNPDNSDVDKLFIQLVQTYNQLFEENPINASGVDAKAILSARLSKSRRLENLIAQLPGEKKNGLFGNLIALSLGLTPNFKSNFDLAEDAKLQLSKDTYDDDLDNLLAQIGDQYADLFLAAKNLSDAILLSDILRVNTEITKAPLSASMIKRYDEHHQDLTLLKALVRQQLPEKYKEIFFDQSKNGYAGYIDGGASQEEFYKFIKPILEKMDGTEELLVKLNREDLLRKQRTFDNGSIPHQIHLGELHAILRRQEDFYPFLKDNREKIEKILTFRIPYYVGPLARGNSRFAWMTRKSEETITPWNFEEVVDKGASAQSFIERMTNFDKNLPNEKVLPKHSLLYEYFTVYNELTKVKYVTEGMRKPAFLSGEQKKAIVDLLFKTNRKVTVKQLKEDYFKKIECFDSVEISGVEDRFNASLGTYHDLLKIIKDKDFLDNEENEDILEDIVLTLTLFEDREMIEERLKTYAHLFDDKVMKQLKRRRYTGWGRLSRKLINGIRDKQSGKTILDFLKSDGFANRNFMQLIHDDSLTFKEDIQKAQVSGQGDSLHEHIANLAGSPAIKKGILQTVKVVDELVKVMGRHKPENIVIEMARENQTTQKGQKNSRERMKRIEEGIKELGSQILKEHPVENTQLQNEKLYLYYLQNGRDMYVDQELDINRLSDYDVDHIVPQSFLKDDSIDNKVLTRSDKARGKSDNVPSEEVVKKMKNYWRQLLNAKLITQRKFDNLTKAERGGLSELDKAGFIKRQLVETRQITKHVAQILDSRMNTKYDENDKLIREVKVITLKSKLVSDFRKDFQFYKVREINNYHHAHDAYLNAVVGTALIKKYPKLESEFVYGDYKVYDVRKMIAKSEQEIGKATAKYFFYSNIMNFFKTEITLANGEIRKRPLIETNGETGEIVWDKGRDFATVRKVLSMPQVNIVKKTEVQTGGFSKESILPKRNSDKLIARKKDWDPKKYGGFDSPTVAYSVLVVAKVEKGKSKKLKSVKELLGITIMERSSFEKNPIDFLEAKGYKEVKKDLIIKLPKYSLFELENGRKRMLASAGELQKGNELALPSKYVNFLYLASHYEKLKGSPEDNEQKQLFVEQHKHYLDEIIEQISEFSKRVILADANLDKVLSAYNKHRDKPIREQAENIIHLFTLTNLGAPAAFKYFDTTIDRKRYTSTKEVLDATLIHQSITGLYETRIDLSQLGGDGGPAPEAAAKGGSGGTLNIEDEHRLHETSKEPDVSLGSTWLSDFPQAWAETGGMGLAVRQAPLIIPLKATSTPVSIKQYPMSQEARLGIKPHIQRLLDQGILVPCQSPWNTPLLPVKKPGTNDYRPVQDLREVNKRVEDIHPTVPNPYNLLSGLPPSHQWYTVLDLKDAFFCLRLHPTSQPLFAFEWRDPEMGISGQLTWTRLPQGFKNSPTLFNEALHRDLADFRIQHPDLILLQYVDDLLLAATSELDCQQGTRALLQTLGNLGYRASAKKAQICQKQVKYLGYLLKEGQRWLTEARKETVMGQPTPKTPRQLREFLGKAGFCRLFIPGFAEMAAPLYPLTKPGTLFNWGPDQQKAYQEIKQALLTAPALGLPDLTKPFELFVDEKQGYAKGVLTQKLGPWRRPVAYLSKKLDPVAAGWPPCLRMVAAIAVLTKDAGKLTMGQPLVILAPHAVEALVKQPPDRWLSNARMTHYQALLLDTDRVQFGPVVALNPATLLPLPEEGLQHNCLDILAEAHGTRPDLTDQPLPDADHTWYTDGSSLLQEGQRKAGAAVTTETEVIWAKALPAGTSAQRAELIALTQALKMAEGKKLNVYTDSRYAFATAHIHGEIYRRRGWLTSEGKEIKNKDEILALLKALFLPKRLSIIHCPGHQKGHSAEARGNRMADQAARKAAITETPDTSTLLAGKRTADGSEFEKRTADGSEFESPKKKAKVE

SEQ ID NO: 2830 - protein, 2096 aa, synthetic construct
MPAAKRVKLDGGDKKYSIGLDIGTNSVGWAVITDEYKVPSKKFKVLGNTDRHSIKKNLIGALLFDSGETAEATRLKRTARRRYTRRKNRICYLQEIFSNEMAKVDDSFFHRLEESFLVEEDKKHERHPIFGNIVDEVAYHEKYPTIYHLRKKLVDSTDKADLRLIYLALAHMIKFRGHFLIEGDLNPDNSDVDKLFIQLVQTYNQLFEENPINASGVDAKAILSARLSKSRRLENLIAQLPGEKKNGLFGNLIALSLGLTPNFKSNFDLAEDAKLQLSKDTYDDDLDNLLAQIGDQYADLFLAAKNLSDAILLSDILRVNTEITKAPLSASMIKRYDEHHQDLTLLKALVRQQLPEKYKEIFFDQSKNGYAGYIDGGASQEEFYKFIKPILEKMDGTEELLVKLNREDLLRKQRTFDNGSIPHQIHLGELHAILRRQEDFYPFLKDNREKIEKILTFRIPYYVGPLARGNSRFAWMTRKSEETITPWNFEEVVDKGASAQSFIERMTNFDKNLPNEKVLPKHSLLYEYFTVYNELTKVKYVTEGMRKPAFLSGEQKKAIVDLLFKTNRKVTVKQLKEDYFKKIECFDSVEISGVEDRFNASLGTYHDLLKIIKDKDFLDNEENEDILEDIVLTLTLFEDREMIEERLKTYAHLFDDKVMKQLKRRRYTGWGRLSRKLINGIRDKQSGKTILDFLKSDGFANRNFMQLIHDDSLTFKEDIQKAQVSGQGDSLHEHIANLAGSPAIKKGILQTVKVVDELVKVMGRHKPENIVIEMARENQTTQKGQKNSRERMKRIEEGIKELGSQILKEHPVENTQLQNEKLYLYYLQNGRDMYVDQELDINRLSDYDVDHIVPQSFLKDDSIDNKVLTRSDKARGKSDNVPSEEVVKKMKNYWRQLLNAKLITQRKFDNLTKAERGGLSELDKAGFIKRQLVETRQITKHVAQILDSRMNTKYDENDKLIREVKVITLKSKLVSDFRKDFQFYKVREINNYHHAHDAYLNAVVGTALIKKYPKLESEFVYGDYKVYDVRKMIAKSEQEIGKATAKYFFYSNIMNFFKTEITLANGEIRKRPLIETNGETGEIVWDKGRDFATVRKVLSMPQVNIVKKTEVQTGGFSKESILPKRNSDKLIARKKDWDPKKYGGFDSPTVAYSVLVVAKVEKGKSKKLKSVKELLGITIMERSSFEKNPIDFLEAKGYKEVKKDLIIKLPKYSLFELENGRKRMLASAGELQKGNELALPSKYVNFLYLASHYEKLKGSPEDNEQKQLFVEQHKHYLDEIIEQISEFSKRVILADANLDKVLSAYNKHRDKPIREQAENIIHLFTLTNLGAPAAFKYFDTTIDRKRYTSTKEVLDATLIHQSITGLYETRIDLSQLGGDGGGGGEAAAKPAPGGTLNIEDEHRLHETSKEPDVSLGSTWLSDFPQAWAETGGMGLAVRQAPLIIPLKATSTPVSIKQYPMSQEARLGIKPHIQRLLDQGILVPCQSPWNTPLLPVKKPGTNDYRPVQDLREVNKRVEDIHPTVPNPYNLLSGLPPSHQWYTVLDLKDAFFCLRLHPTSQPLFAFEWRDPEMGISGQLTWTRLPQGFKNSPTLFNEALHRDLADFRIQHPDLILLQYVDDLLLAATSELDCQQGTRALLQTLGNLGYRASAKKAQICQKQVKYLGYLLKEGQRWLTEARKETVMGQPTPKTPRQLREFLGKAGFCRLFIPGFAEMAAPLYPLTKPGTLFNWGPDQQKAYQEIKQALLTAPALGLPDLTKPFELFVDEKQGYAKGVLTQKLGPWRRPVAYLSKKLDPVAAGWPPCLRMVAAIAVLTKDAGKLTMGQPLVILAPHAVEALVKQPPDRWLSNARMTHYQALLLDTDRVQFGPVVALNPATLLPLPEEGLQHNCLDILAEAHGTRPDLTDQPLPDADHTWYTDGSSLLQEGQRKAGAAVTTETEVIWAKALPAGTSAQRAELIALTQALKMAEGKKLNVYTDSRYAFATAHIHGEIYRRRGWLTSEGKEIKNKDEILALLKALFLPKRLSIIHCPGHQKGHSAEARGNRMADQAARKAAITETPDTSTLLAGKRTADGSEFEKRTADGSEFESPKKKAKVE

SEQ ID NO: 2831 - protein, 2096 aa, synthetic construct
MPAAKRVKLDGGDKKYSIGLDIGTNSVGWAVITDEYKVPSKKFKVLGNTDRHSIKKNLIGALLFDSGETAEATRLKRTARRRYTRRKNRICYLQEIFSNEMAKVDDSFFHRLEESFLVEEDKKHERHPIFGNIVDEVAYHEKYPTIYHLRKKLVDSTDKADLRLIYLALAHMIKFRGHFLIEGDLNPDNSDVDKLFIQLVQTYNQLFEENPINASGVDAKAILSARLSKSRRLENLIAQLPGEKKNGLFGNLIALSLGLTPNFKSNFDLAEDAKLQLSKDTYDDDLDNLLAQIGDQYADLFLAAKNLSDAILLSDILRVNTEITKAPLSASMIKRYDEHHQDLTLLKALVRQQLPEKYKEIFFDQSKNGYAGYIDGGASQEEFYKFIKPILEKMDGTEELLVKLNREDLLRKQRTFDNGSIPHQIHLGELHAILRRQEDFYPFLKDNREKIEKILTFRIPYYVGPLARGNSRFAWMTRKSEETITPWNFEEVVDKGASAQSFIERMTNFDKNLPNEKVLPKHSLLYEYFTVYNELTKVKYVTEGMRKPAFLSGEQKKAIVDLLFKTNRKVTVKQLKEDYFKKIECFDSVEISGVEDRFNASLGTYHDLLKIIKDKDFLDNEENEDILEDIVLTLTLFEDREMIEERLKTYAHLFDDKVMKQLKRRRYTGWGRLSRKLINGIRDKQSGKTILDFLKSDGFANRNFMQLIHDDSLTFKEDIQKAQVSGQGDSLHEHIANLAGSPAIKKGILQTVKVVDELVKVMGRHKPENIVIEMARENQTTQKGQKNSRERMKRIEEGIKELGSQILKEHPVENTQLQNEKLYLYYLQNGRDMYVDQELDINRLSDYDVDHIVPQSFLKDDSIDNKVLTRSDKARGKSDNVPSEEVVKKMKNYWRQLLNAKLITQRKFDNLTKAERGGLSELDKAGFIKRQLVETRQITKHVAQILDSRMNTKYDENDKLIREVKVITLKSKLVSDFRKDFQFYKVREINNYHHAHDAYLNAVVGTALIKKYPKLESEFVYGDYKVYDVRKMIAKSEQEIGKATAKYFFYSNIMNFFKTEITLANGEIRKRPLIETNGETGEIVWDKGRDFATVRKVLSMPQVNIVKKTEVQTGGFSKESILPKRNSDKLIARKKDWDPKKYGGFDSPTVAYSVLVVAKVEKGKSKKLKSVKELLGITIMERSSFEKNPIDFLEAKGYKEVKKDLIIKLPKYSLFELENGRKRMLASAGELQKGNELALPSKYVNFLYLASHYEKLKGSPEDNEQKQLFVEQHKHYLDEIIEQISEFSKRVILADANLDKVLSAYNKHRDKPIREQAENIIHLFTLTNLGAPAAFKYFDTTIDRKRYTSTKEVLDATLIHQSITGLYETRIDLSQLGGDGGGGGGSSEAAAKGGTLNIEDEHRLHETSKEPDVSLGSTWLSDFPQAWAETGGMGLAVRQAPLIIPLKATSTPVSIKQYPMSQEARLGIKPHIQRLLDQGILVPCQSPWNTPLLPVKKPGTNDYRPVQDLREVNKRVEDIHPTVPNPYNLLSGLPPSHQWYTVLDLKDAFFCLRLHPTSQPLFAFEWRDPEMGISGQLTWTRLPQGFKNSPTLFNEALHRDLADFRIQHPDLILLQYVDDLLLAATSELDCQQGTRALLQTLGNLGYRASAKKAQICQKQVKYLGYLLKEGQRWLTEARKETVMGQPTPKTPRQLREFLGKAGFCRLFIPGFAEMAAPLYPLTKPGTLFNWGPDQQKAYQEIKQALLTAPALGLPDLTKPFELFVDEKQGYAKGVLTQKLGPWRRPVAYLSKKLDPVAAGWPPCLRMVAAIAVLTKDAGKLTMGQPLVILAPHAVEALVKQPPDRWLSNARMTHYQALLLDTDRVQFGPVVALNPATLLPLPEEGLQHNCLDILAEAHGTRPDLTDQPLPDADHTWYTDGSSLLQEGQRKAGAAVTTETEVIWAKALPAGTSAQRAELIALTQALKMAEGKKLNVYTDSRYAFATAHIHGEIYRRRGWLTSEGKEIKNKDEILALLKALFLPKRLSIIHCPGHQKGHSAEARGNRMADQAARKAAITETPDTSTLLAGKRTADGSEFEKRTADGSEFESPKKKAKVE

SEQ ID NO: 2832 - protein, 2091 aa, synthetic construct
MPAAKRVKLDGGDKKYSIGLDIGTNSVGWAVITDEYKVPSKKFKVLGNTDRHSIKKNLIGALLFDSGETAEATRLKRTARRRYTRRKNRICYLQEIFSNEMAKVDDSFFHRLEESFLVEEDKKHERHPIFGNIVDEVAYHEKYPTIYHLRKKLVDSTDKADLRLIYLALAHMIKFRGHFLIEGDLNPDNSDVDKLFIQLVQTYNQLFEENPINASGVDAKAILSARLSKSRRLENLIAQLPGEKKNGLFGNLIALSLGLTPNFKSNFDLAEDAKLQLSKDTYDDDLDNLLAQIGDQYADLFLAAKNLSDAILLSDILRVNTEITKAPLSASMIKRYDEHHQDLTLLKALVRQQLPEKYKEIFFDQSKNGYAGYIDGGASQEEFYKFIKPILEKMDGTEELLVKLNREDLLRKQRTFDNGSIPHQIHLGELHAILRRQEDFYPFLKDNREKIEKILTFRIPYYVGPLARGNSRFAWMTRKSEETITPWNFEEVVDKGASAQSFIERMTNFDKNLPNEKVLPKHSLLYEYFTVYNELTKVKYVTEGMRKPAFLSGEQKKAIVDLLFKTNRKVTVKQLKEDYFKKIECFDSVEISGVEDRFNASLGTYHDLLKIIKDKDFLDNEENEDILEDIVLTLTLFEDREMIEERLKTYAHLFDDKVMKQLKRRRYTGWGRLSRKLINGIRDKQSGKTILDFLKSDGFANRNFMQLIHDDSLTFKEDIQKAQVSGQGDSLHEHIANLAGSPAIKKGILQTVKVVDELVKVMGRHKPENIVIEMARENQTTQKGQKNSRERMKRIEEGIKELGSQILKEHPVENTQLQNEKLYLYYLQNGRDMYVDQELDINRLSDYDVDHIVPQSFLKDDSIDNKVLTRSDKARGKSDNVPSEEVVKKMKNYWRQLLNAKLITQRKFDNLTKAERGGLSELDKAGFIKRQLVETRQITKHVAQILDSRMNTKYDENDKLIREVKVITLKSKLVSDFRKDFQFYKVREINNYHHAHDAYLNAVVGTALIKKYPKLESEFVYGDYKVYDVRKMIAKSEQEIGKATAKYFFYSNIMNFFKTEITLANGEIRKRPLIETNGETGEIVWDKGRDFATVRKVLSMPQVNIVKKTEVQTGGFSKESILPKRNSDKLIARKKDWDPKKYGGFDSPTVAYSVLVVAKVEKGKSKKLKSVKELLGITIMERSSFEKNPIDFLEAKGYKEVKKDLIIKLPKYSLFELENGRKRMLASAGELQKGNELALPSKYVNFLYLASHYEKLKGSPEDNEQKQLFVEQHKHYLDEIIEQISEFSKRVILADANLDKVLSAYNKHRDKPIREQAENIIHLFTLTNLGAPAAFKYFDTTIDRKRYTSTKEVLDATLIHQSITGLYETRIDLSQLGGDGGGSSGSSGGTLNIEDEHRLHETSKEPDVSLGSTWLSDFPQAWAETGGMGLAVRQAPLIIPLKATSTPVSIKQYPMSQEARLGIKPHIQRLLDQGILVPCQSPWNTPLLPVKKPGTNDYRPVQDLREVNKRVEDIHPTVPNPYNLLSGLPPSHQWYTVLDLKDAFFCLRLHPTSQPLFAFEWRDPEMGISGQLTWTRLPQGFKNSPTLFNEALHRDLADFRIQHPDLILLQYVDDLLLAATSELDCQQGTRALLQTLGNLGYRASAKKAQICQKQVKYLGYLLKEGQRWLTEARKETVMGQPTPKTPRQLREFLGKAGFCRLFIPGFAEMAAPLYPLTKPGTLFNWGPDQQKAYQEIKQALLTAPALGLPDLTKPFELFVDEKQGYAKGVLTQKLGPWRRPVAYLSKKLDPVAAGWPPCLRMVAAIAVLTKDAGKLTMGQPLVILAPHAVEALVKQPPDRWLSNARMTHYQALLLDTDRVQFGPVVALNPATLLPLPEEGLQHNCLDILAEAHGTRPDLTDQPLPDADHTWYTDGSSLLQEGQRKAGAAVTTETEVIWAKALPAGTSAQRAELIALTQALKMAEGKKLNVYTDSRYAFATAHIHGEIYRRRGWLTSEGKEIKNKDEILALLKALFLPKRLSIIHCPGHQKGHSAEARGNRMADQAARKAAITETPDTSTLLAGKRTADGSEFEKRTADGSEFESPKKKAKVE

SEQ ID NO: 2833 - protein, 2094 aa, synthetic construct
MPAAKRVKLDGGDKKYSIGLDIGTNSVGWAVITDEYKVPSKKFKVLGNTDRHSIKKNLIGALLFDSGETAEATRLKRTARRRYTRRKNRICYLQEIFSNEMAKVDDSFFHRLEESFLVEEDKKHERHPIFGNIVDEVAYHEKYPTIYHLRKKLVDSTDKADLRLIYLALAHMIKFRGHFLIEGDLNPDNSDVDKLFIQLVQTYNQLFEENPINASGVDAKAILSARLSKSRRLENLIAQLPGEKKNGLFGNLIALSLGLTPNFKSNFDLAEDAKLQLSKDTYDDDLDNLLAQIGDQYADLFLAAKNLSDAILLSDILRVNTEITKAPLSASMIKRYDEHHQDLTLLKALVRQQLPEKYKEIFFDQSKNGYAGYIDGGASQEEFYKFIKPILEKMDGTEELLVKLNREDLLRKQRTFDNGSIPHQIHLGELHAILRRQEDFYPFLKDNREKIEKILTFRIPYYVGPLARGNSRFAWMTRKSEETITPWNFEEVVDKGASAQSFIERMTNFDKNLPNEKVLPKHSLLYEYFTVYNELTKVKYVTEGMRKPAFLSGEQKKAIVDLLFKTNRKVTVKQLKEDYFKKIECFDSVEISGVEDRFNASLGTYHDLLKIIKDKDFLDNEENEDILEDIVLTLTLFEDREMIEERLKTYAHLFDDKVMKQLKRRRYTGWGRLSRKLINGIRDKQSGKTILDFLKSDGFANRNFMQLIHDDSLTFKEDIQKAQVSGQGDSLHEHIANLAGSPAIKKGILQTVKVVDELVKVMGRHKPENIVIEMARENQTTQKGQKNSRERMKRIEEGIKELGSQILKEHPVENTQLQNEKLYLYYLQNGRDMYVDQELDINRLSDYDVDHIVPQSFLKDDSIDNKVLTRSDKARGKSDNVPSEEVVKKMKNYWRQLLNAKLITQRKFDNLTKAERGGLSELDKAGFIKRQLVETRQITKHVAQILDSRMNTKYDENDKLIREVKVITLKSKLVSDFRKDFQFYKVREINNYHHAHDAYLNAVVGTALIKKYPKLESEFVYGDYKVYDVRKMIAKSEQEIGKATAKYFFYSNIMNFFKTEITLANGEIRKRPLIETNGETGEIVWDKGRDFATVRKVLSMPQVNIVKKTEVQTGGFSKESILPKRNSDKLIARKKDWDPKKYGGFDSPTVAYSVLVVAKVEKGKSKKLKSVKELLGITIMERSSFEKNPIDFLEAKGYKEVKKDLIIKLPKYSLFELENGRKRMLASAGELQKGNELALPSKYVNFLYLASHYEKLKGSPEDNEQKQLFVEQHKHYLDEIIEQISEFSKRVILADANLDKVLSAYNKHRDKPIREQAENIIHLFTLTNLGAPAAFKYFDTTIDRKRYTSTKEVLDATLIHQSITGLYETRIDLSQLGGDGGPAPGGSGGGGGTLNIEDEHRLHETSKEPDVSLGSTWLSDFPQAWAETGGMGLAVRQAPLIIPLKATSTPVSIKQYPMSQEARLGIKPHIQRLLDQGILVPCQSPWNTPLLPVKKPGTNDYRPVQDLREVNKRVEDIHPTVPNPYNLLSGLPPSHQWYTVLDLKDAFFCLRLHPTSQPLFAFEWRDPEMGISGQLTWTRLPQGFKNSPTLFNEALHRDLADFRIQHPDLILLQYVDDLLLAATSELDCQQGTRALLQTLGNLGYRASAKKAQICQKQVKYLGYLLKEGQRWLTEARKETVMGQPTPKTPRQLREFLGKAGFCRLFIPGFAEMAAPLYPLTKPGTLFNWGPDQQKAYQEIKQALLTAPALGLPDLTKPFELFVDEKQGYAKGVLTQKLGPWRRPVAYLSKKLDPVAAGWPPCLRMVAAIAVLTKDAGKLTMGQPLVILAPHAVEALVKQPPDRWLSNARMTHYQALLLDTDRVQFGPVVALNPATLLPLPEEGLQHNCLDILAEAHGTRPDLTDQPLPDADHTWYTDGSSLLQEGQRKAGAAVTTETEVIWAKALPAGTSAQRAELIALTQALKMAEGKKLNVYTDSRYAFATAHIHGEIYRRRGWLTSEGKEIKNKDEILALLKALFLPKRLSIIHCPGHQKGHSAEARGNRMADQAARKAAITETPDTSTLLAGKRTADGSEFEKRTADGSEFESPKKKAKVE

SEQ ID NO: 2834 - protein, 2090 aa, synthetic construct
MPAAKRVKLDGGDKKYSIGLDIGTNSVGWAVITDEYKVPSKKFKVLGNTDRHSIKKNLIGALLFDSGETAEATRLKRTARRRYTRRKNRICYLQEIFSNEMAKVDDSFFHRLEESFLVEEDKKHERHPIFGNIVDEVAYHEKYPTIYHLRKKLVDSTDKADLRLIYLALAHMIKFRGHFLIEGDLNPDNSDVDKLFIQLVQTYNQLFEENPINASGVDAKAILSARLSKSRRLENLIAQLPGEKKNGLFGNLIALSLGLTPNFKSNFDLAEDAKLQLSKDTYDDDLDNLLAQIGDQYADLFLAAKNLSDAILLSDILRVNTEITKAPLSASMIKRYDEHHQDLTLLKALVRQQLPEKYKEIFFDQSKNGYAGYIDGGASQEEFYKFIKPILEKMDGTEELLVKLNREDLLRKQRTFDNGSIPHQIHLGELHAILRRQEDFYPFLKDNREKIEKILTFRIPYYVGPLARGNSRFAWMTRKSEETITPWNFEEVVDKGASAQSFIERMTNFDKNLPNEKVLPKHSLLYEYFTVYNELTKVKYVTEGMRKPAFLSGEQKKAIVDLLFKTNRKVTVKQLKEDYFKKIECFDSVEISGVEDRFNASLGTYHDLLKIIKDKDFLDNEENEDILEDIVLTLTLFEDREMIEERLKTYAHLFDDKVMKQLKRRRYTGWGRLSRKLINGIRDKQSGKTILDFLKSDGFANRNFMQLIHDDSLTFKEDIQKAQVSGQGDSLHEHIANLAGSPAIKKGILQTVKVVDELVKVMGRHKPENIVIEMARENQTTQKGQKNSRERMKRIEEGIKELGSQILKEHPVENTQLQNEKLYLYYLQNGRDMYVDQELDINRLSDYDVDHIVPQSFLKDDSIDNKVLTRSDKARGKSDNVPSEEVVKKMKNYWRQLLNAKLITQRKFDNLTKAERGGLSELDKAGFIKRQLVETRQITKHVAQILDSRMNTKYDENDKLIREVKVITLKSKLVSDFRKDFQFYKVREINNYHHAHDAYLNAVVGTALIKKYPKLESEFVYGDYKVYDVRKMIAKSEQEIGKATAKYFFYSNIMNFFKTEITLANGEIRKRPLIETNGETGEIVWDKGRDFATVRKVLSMPQVNIVKKTEVQTGGFSKESILPKRNSDKLIARKKDWDPKKYGGFDSPTVAYSVLVVAKVEKGKSKKLKSVKELLGITIMERSSFEKNPIDFLEAKGYKEVKKDLIIKLPKYSLFELENGRKRMLASAGELQKGNELALPSKYVNFLYLASHYEKLKGSPEDNEQKQLFVEQHKHYLDEIIEQISEFSKRVILADANLDKVLSAYNKHRDKPIREQAENIIHLFTLTNLGAPAAFKYFDTTIDRKRYTSTKEVLDATLIHQSITGLYETRIDLSQLGGDGGGGGGGGGTLNIEDEHRLHETSKEPDVSLGSTWLSDFPQAWAETGGMGLAVRQAPLIIPLKATSTPVSIKQYPMSQEARLGIKPHIQRLLDQGILVPCQSPWNTPLLPVKKPGTNDYRPVQDLREVNKRVEDIHPTVPNPYNLLSGLPPSHQWYTVLDLKDAFFCLRLHPTSQPLFAFEWRDPEMGISGQLTWTRLPQGFKNSPTLFNEALHRDLADFRIQHPDLILLQYVDDLLLAATSELDCQQGTRALLQTLGNLGYRASAKKAQICQKQVKYLGYLLKEGQRWLTEARKETVMGQPTPKTPRQLREFLGKAGFCRLFIPGFAEMAAPLYPLTKPGTLFNWGPDQQKAYQEIKQALLTAPALGLPDLTKPFELFVDEKQGYAKGVLTQKLGPWRRPVAYLSKKLDPVAAGWPPCLRMVAAIAVLTKDAGKLTMGQPLVILAPHAVEALVKQPPDRWLSNARMTHYQALLLDTDRVQFGPVVALNPATLLPLPEEGLQHNCLDILAEAHGTRPDLTDQPLPDADHTWYTDGSSLLQEGQRKAGAAVTTETEVIWAKALPAGTSAQRAELIALTQALKMAEGKKLNVYTDSRYAFATAHIHGEIYRRRGWLTSEGKEIKNKDEILALLKALFLPKRLSIIHCPGHQKGHSAEARGNRMADQAARKAAITETPDTSTLLAGKRTADGSEFEKRTADGSEFESPKKKAKVE

SEQ ID NO: 2835 - protein, 2094 aa, synthetic construct
MPAAKRVKLDGGDKKYSIGLDIGTNSVGWAVITDEYKVPSKKFKVLGNTDRHSIKKNLIGALLFDSGETAEATRLKRTARRRYTRRKNRICYLQEIFSNEMAKVDDSFFHRLEESFLVEEDKKHERHPIFGNIVDEVAYHEKYPTIYHLRKKLVDSTDKADLRLIYLALAHMIKFRGHFLIEGDLNPDNSDVDKLFIQLVQTYNQLFEENPINASGVDAKAILSARLSKSRRLENLIAQLPGEKKNGLFGNLIALSLGLTPNFKSNFDLAEDAKLQLSKDTYDDDLDNLLAQIGDQYADLFLAAKNLSDAILLSDILRVNTEITKAPLSASMIKRYDEHHQDLTLLKALVRQQLPEKYKEIFFDQSKNGYAGYIDGGASQEEFYKFIKPILEKMDGTEELLVKLNREDLLRKQRTFDNGSIPHQIHLGELHAILRRQEDFYPFLKDNREKIEKILTFRIPYYVGPLARGNSRFAWMTRKSEETITPWNFEEVVDKGASAQSFIERMTNFDKNLPNEKVLPKHSLLYEYFTVYNELTKVKYVTEGMRKPAFLSGEQKKAIVDLLFKTNRKVTVKQLKEDYFKKIECFDSVEISGVEDRFNASLGTYHDLLKIIKDKDFLDNEENEDILEDIVLTLTLFEDREMIEERLKTYAHLFDDKVMKQLKRRRYTGWGRLSRKLINGIRDKQSGKTILDFLKSDGFANRNFMQLIHDDSLTFKEDIQKAQVSGQGDSLHEHIANLAGSPAIKKGILQTVKVVDELVKVMGRHKPENIVIEMARENQTTQKGQKNSRERMKRIEEGIKELGSQILKEHPVENTQLQNEKLYLYYLQNGRDMYVDQELDINRLSDYDVDHIVPQSFLKDDSIDNKVLTRSDKARGKSDNVPSEEVVKKMKNYWRQLLNAKLITQRKFDNLTKAERGGLSELDKAGFIKRQLVETRQITKHVAQILDSRMNTKYDENDKLIREVKVITLKSKLVSDFRKDFQFYKVREINNYHHAHDAYLNAVVGTALIKKYPKLESEFVYGDYKVYDVRKMIAKSEQEIGKATAKYFFYSNIMNFFKTEITLANGEIRKRPLIETNGETGEIVWDKGRDFATVRKVLSMPQVNIVKKTEVQTGGFSKESILPKRNSDKLIARKKDWDPKKYGGFDSPTVAYSVLVVAKVEKGKSKKLKSVKELLGITIMERSSFEKNPIDFLEAKGYKEVKKDLIIKLPKYSLFELENGRKRMLASAGELQKGNELALPSKYVNFLYLASHYEKLKGSPEDNEQKQLFVEQHKHYLDEIIEQISEFSKRVILADANLDKVLSAYNKHRDKPIREQAENIIHLFTLTNLGAPAAFKYFDTTIDRKRYTSTKEVLDATLIHQSITGLYETRIDLSQLGGDGGGSSPAPGGGGGTLNIEDEHRLHETSKEPDVSLGSTWLSDFPQAWAETGGMGLAVRQAPLIIPLKATSTPVSIKQYPMSQEARLGIKPHIQRLLDQGILVPCQSPWNTPLLPVKKPGTNDYRPVQDLREVNKRVEDIHPTVPNPYNLLSGLPPSHQWYTVLDLKDAFFCLRLHPTSQPLFAFEWRDPEMGISGQLTWTRLPQGFKNSPTLFNEALHRDLADFRIQHPDLILLQYVDDLLLAATSELDCQQGTRALLQTLGNLGYRASAKKAQICQKQVKYLGYLLKEGQRWLTEARKETVMGQPTPKTPRQLREFLGKAGFCRLFIPGFAEMAAPLYPLTKPGTLFNWGPDQQKAYQEIKQALLTAPALGLPDLTKPFELFVDEKQGYAKGVLTQKLGPWRRPVAYLSKKLDPVAAGWPPCLRMVAAIAVLTKDAGKLTMGQPLVILAPHAVEALVKQPPDRWLSNARMTHYQALLLDTDRVQFGPVVALNPATLLPLPEEGLQHNCLDILAEAHGTRPDLTDQPLPDADHTWYTDGSSLLQEGQRKAGAAVTTETEVIWAKALPAGTSAQRAELIALTQALKMAEGKKLNVYTDSRYAFATAHIHGEIYRRRGWLTSEGKEIKNKDEILALLKALFLPKRLSIIHCPGHQKGHSAEARGNRMADQAARKAAITETPDTSTLLAGKRTADGSEFEKRTADGSEFESPKKKAKVE

SEQ ID NO: 2836 - protein, 2100 aa, synthetic construct
MPAAKRVKLDGGDKKYSIGLDIGTNSVGWAVITDEYKVPSKKFKVLGNTDRHSIKKNLIGALLFDSGETAEATRLKRTARRRYTRRKNRICYLQEIFSNEMAKVDDSFFHRLEESFLVEEDKKHERHPIFGNIVDEVAYHEKYPTIYHLRKKLVDSTDKADLRLIYLALAHMIKFRGHFLIEGDLNPDNSDVDKLFIQLVQTYNQLFEENPINASGVDAKAILSARLSKSRRLENLIAQLPGEKKNGLFGNLIALSLGLTPNFKSNFDLAEDAKLQLSKDTYDDDLDNLLAQIGDQYADLFLAAKNLSDAILLSDILRVNTEITKAPLSASMIKRYDEHHQDLTLLKALVRQQLPEKYKEIFFDQSKNGYAGYIDGGASQEEFYKFIKPILEKMDGTEELLVKLNREDLLRKQRTFDNGSIPHQIHLGELHAILRRQEDFYPFLKDNREKIEKILTFRIPYYVGPLARGNSRFAWMTRKSEETITPWNFEEVVDKGASAQSFIERMTNFDKNLPNEKVLPKHSLLYEYFTVYNELTKVKYVTEGMRKPAFLSGEQKKAIVDLLFKTNRKVTVKQLKEDYFKKIECFDSVEISGVEDRFNASLGTYHDLLKIIKDKDFLDNEENEDILEDIVLTLTLFEDREMIEERLKTYAHLFDDKVMKQLKRRRYTGWGRLSRKLINGIRDKQSGKTILDFLKSDGFANRNFMQLIHDDSLTFKEDIQKAQVSGQGDSLHEHIANLAGSPAIKKGILQTVKVVDELVKVMGRHKPENIVIEMARENQTTQKGQKNSRERMKRIEEGIKELGSQILKEHPVENTQLQNEKLYLYYLQNGRDMYVDQELDINRLSDYDVDHIVPQSFLKDDSIDNKVLTRSDKARGKSDNVPSEEVVKKMKNYWRQLLNAKLITQRKFDNLTKAERGGLSELDKAGFIKRQLVETRQITKHVAQILDSRMNTKYDENDKLIREVKVITLKSKLVSDFRKDFQFYKVREINNYHHAHDAYLNAVVGTALIKKYPKLESEFVYGDYKVYDVRKMIAKSEQEIGKATAKYFFYSNIMNFFKTEITLANGEIRKRPLIETNGETGEIVWDKGRDFATVRKVLSMPQVNIVKKTEVQTGGFSKESILPKRNSDKLIARKKDWDPKKYGGFDSPTVAYSVLVVAKVEKGKSKKLKSVKELLGITIMERSSFEKNPIDFLEAKGYKEVKKDLIIKLPKYSLFELENGRKRMLASAGELQKGNELALPSKYVNFLYLASHYEKLKGSPEDNEQKQLFVEQHKHYLDEIIEQISEFSKRVILADANLDKVLSAYNKHRDKPIREQAENIIHLFTLTNLGAPAAFKYFDTTIDRKRYTSTKEVLDATLIHQSITGLYETRIDLSQLGGDGGGGGGSEAAAKGGGGSGGTLNIEDEHRLHETSKEPDVSLGSTWLSDFPQAWAETGGMGLAVRQAPLIIPLKATSTPVSIKQYPMSQEARLGIKPHIQRLLDQGILVPCQSPWNTPLLPVKKPGTNDYRPVQDLREVNKRVEDIHPTVPNPYNLLSGLPPSHQWYTVLDLKDAFFCLRLHPTSQPLFAFEWRDPEMGISGQLTWTRLPQGFKNSPTLFNEALHRDLADFRIQHPDLILLQYVDDLLLAATSELDCQQGTRALLQTLGNLGYRASAKKAQICQKQVKYLGYLLKEGQRWLTEARKETVMGQPTPKTPRQLREFLGKAGFCRLFIPGFAEMAAPLYPLTKPGTLFNWGPDQQKAYQEIKQALLTAPALGLPDLTKPFELFVDEKQGYAKGVLTQKLGPWRRPVAYLSKKLDPVAAGWPPCLRMVAAIAVLTKDAGKLTMGQPLVILAPHAVEALVKQPPDRWLSNARMTHYQALLLDTDRVQFGPVVALNPATLLPLPEEGLQHNCLDILAEAHGTRPDLTDQPLPDADHTWYTDGSSLLQEGQRKAGAAVTTETEVIWAKALPAGTSAQRAELIALTQALKMAEGKKLNVYTDSRYAFATAHIHGEIYRRRGWLTSEGKEIKNKDEILALLKALFLPKRLSIIHCPGHQKGHSAEARGNRMADQAARKAAITETPDTSTLLAGKRTADGSEFEKRTADGSEFESPKKKAKVE

SEQ ID NO: 2837 - protein, 2091 aa, synthetic construct
MPAAKRVKLDGGDKKYSIGLDIGTNSVGWAVITDEYKVPSKKFKVLGNTDRHSIKKNLIGALLFDSGETAEATRLKRTARRRYTRRKNRICYLQEIFSNEMAKVDDSFFHRLEESFLVEEDKKHERHPIFGNIVDEVAYHEKYPTIYHLRKKLVDSTDKADLRLIYLALAHMIKFRGHFLIEGDLNPDNSDVDKLFIQLVQTYNQLFEENPINASGVDAKAILSARLSKSRRLENLIAQLPGEKKNGLFGNLIALSLGLTPNFKSNFDLAEDAKLQLSKDTYDDDLDNLLAQIGDQYADLFLAAKNLSDAILLSDILRVNTEITKAPLSASMIKRYDEHHQDLTLLKALVRQQLPEKYKEIFFDQSKNGYAGYIDGGASQEEFYKFIKPILEKMDGTEELLVKLNREDLLRKQRTFDNGSIPHQIHLGELHAILRRQEDFYPFLKDNREKIEKILTFRIPYYVGPLARGNSRFAWMTRKSEETITPWNFEEVVDKGASAQSFIERMTNFDKNLPNEKVLPKHSLLYEYFTVYNELTKVKYVTEGMRKPAFLSGEQKKAIVDLLFKTNRKVTVKQLKEDYFKKIECFDSVEISGVEDRFNASLGTYHDLLKIIKDKDFLDNEENEDILEDIVLTLTLFEDREMIEERLKTYAHLFDDKVMKQLKRRRYTGWGRLSRKLINGIRDKQSGKTILDFLKSDGFANRNFMQLIHDDSLTFKEDIQKAQVSGQGDSLHEHIANLAGSPAIKKGILQTVKVVDELVKVMGRHKPENIVIEMARENQTTQKGQKNSRERMKRIEEGIKELGSQILKEHPVENTQLQNEKLYLYYLQNGRDMYVDQELDINRLSDYDVDHIVPQSFLKDDSIDNKVLTRSDKARGKSDNVPSEEVVKKMKNYWRQLLNAKLITQRKFDNLTKAERGGLSELDKAGFIKRQLVETRQITKHVAQILDSRMNTKYDENDKLIREVKVITLKSKLVSDFRKDFQFYKVREINNYHHAHDAYLNAVVGTALIKKYPKLESEFVYGDYKVYDVRKMIAKSEQEIGKATAKYFFYSNIMNFFKTEITLANGEIRKRPLIETNGETGEIVWDKGRDFATVRKVLSMPQVNIVKKTEVQTGGFSKESILPKRNSDKLIARKKDWDPKKYGGFDSPTVAYSVLVVAKVEKGKSKKLKSVKELLGITIMERSSFEKNPIDFLEAKGYKEVKKDLIIKLPKYSLFELENGRKRMLASAGELQKGNELALPSKYVNFLYLASHYEKLKGSPEDNEQKQLFVEQHKHYLDEIIEQISEFSKRVILADANLDKVLSAYNKHRDKPIREQAENIIHLFTLTNLGAPAAFKYFDTTIDRKRYTSTKEVLDATLIHQSITGLYETRIDLSQLGGDGGPAPGGGGGTLNIEDEHRLHETSKEPDVSLGSTWLSDFPQAWAETGGMGLAVRQAPLIIPLKATSTPVSIKQYPMSQEARLGIKPHIQRLLDQGILVPCQSPWNTPLLPVKKPGTNDYRPVQDLREVNKRVEDIHPTVPNPYNLLSGLPPSHQWYTVLDLKDAFFCLRLHPTSQPLFAFEWRDPEMGISGQLTWTRLPQGFKNSPTLFNEALHRDLADFRIQHPDLILLQYVDDLLLAATSELDCQQGTRALLQTLGNLGYRASAKKAQICQKQVKYLGYLLKEGQRWLTEARKETVMGQPTPKTPRQLREFLGKAGFCRLFIPGFAEMAAPLYPLTKPGTLFNWGPDQQKAYQEIKQALLTAPALGLPDLTKPFELFVDEKQGYAKGVLTQKLGPWRRPVAYLSKKLDPVAAGWPPCLRMVAAIAVLTKDAGKLTMGQPLVILAPHAVEALVKQPPDRWLSNARMTHYQALLLDTDRVQFGPVVALNPATLLPLPEEGLQHNCLDILAEAHGTRPDLTDQPLPDADHTWYTDGSSLLQEGQRKAGAAVTTETEVIWAKALPAGTSAQRAELIALTQALKMAEGKKLNVYTDSRYAFATAHIHGEIYRRRGWLTSEGKEIKNKDEILALLKALFLPKRLSIIHCPGHQKGHSAEARGNRMADQAARKAAITETPDTSTLLAGKRTADGSEFEKRTADGSEFESPKKKAKVE

SEQ ID NO: 2838 - protein, 2096 aa, synthetic construct
MPAAKRVKLDGGDKKYSIGLDIGTNSVGWAVITDEYKVPSKKFKVLGNTDRHSIKKNLIGALLFDSGETAEATRLKRTARRRYTRRKNRICYLQEIFSNEMAKVDDSFFHRLEESFLVEEDKKHERHPIFGNIVDEVAYHEKYPTIYHLRKKLVDSTDKADLRLIYLALAHMIKFRGHFLIEGDLNPDNSDVDKLFIQLVQTYNQLFEENPINASGVDAKAILSARLSKSRRLENLIAQLPGEKKNGLFGNLIALSLGLTPNFKSNFDLAEDAKLQLSKDTYDDDLDNLLAQIGDQYADLFLAAKNLSDAILLSDILRVNTEITKAPLSASMIKRYDEHHQDLTLLKALVRQQLPEKYKEIFFDQSKNGYAGYIDGGASQEEFYKFIKPILEKMDGTEELLVKLNREDLLRKQRTFDNGSIPHQIHLGELHAILRRQEDFYPFLKDNREKIEKILTFRIPYYVGPLARGNSRFAWMTRKSEETITPWNFEEVVDKGASAQSFIERMTNFDKNLPNEKVLPKHSLLYEYFTVYNELTKVKYVTEGMRKPAFLSGEQKKAIVDLLFKTNRKVTVKQLKEDYFKKIECFDSVEISGVEDRFNASLGTYHDLLKIIKDKDFLDNEENEDILEDIVLTLTLFEDREMIEERLKTYAHLFDDKVMKQLKRRRYTGWGRLSRKLINGIRDKQSGKTILDFLKSDGFANRNFMQLIHDDSLTFKEDIQKAQVSGQGDSLHEHIANLAGSPAIKKGILQTVKVVDELVKVMGRHKPENIVIEMARENQTTQKGQKNSRERMKRIEEGIKELGSQILKEHPVENTQLQNEKLYLYYLQNGRDMYVDQELDINRLSDYDVDHIVPQSFLKDDSIDNKVLTRSDKARGKSDNVPSEEVVKKMKNYWRQLLNAKLITQRKFDNLTKAERGGLSELDKAGFIKRQLVETRQITKHVAQILDSRMNTKYDENDKLIREVKVITLKSKLVSDFRKDFQFYKVREINNYHHAHDAYLNAVVGTALIKKYPKLESEFVYGDYKVYDVRKMIAKSEQEIGKATAKYFFYSNIMNFFKTEITLANGEIRKRPLIETNGETGEIVWDKGRDFATVRKVLSMPQVNIVKKTEVQTGGFSKESILPKRNSDKLIARKKDWDPKKYGGFDSPTVAYSVLVVAKVEKGKSKKLKSVKELLGITIMERSSFEKNPIDFLEAKGYKEVKKDLIIKLPKYSLFELENGRKRMLASAGELQKGNELALPSKYVNFLYLASHYEKLKGSPEDNEQKQLFVEQHKHYLDEIIEQISEFSKRVILADANLDKVLSAYNKHRDKPIREQAENIIHLFTLTNLGAPAAFKYFDTTIDRKRYTSTKEVLDATLIHQSITGLYETRIDLSQLGGDGGEAAAKPAPGGGGGTLNIEDEHRLHETSKEPDVSLGSTWLSDFPQAWAETGGMGLAVRQAPLIIPLKATSTPVSIKQYPMSQEARLGIKPHIQRLLDQGILVPCQSPWNTPLLPVKKPGTNDYRPVQDLREVNKRVEDIHPTVPNPYNLLSGLPPSHQWYTVLDLKDAFFCLRLHPTSQPLFAFEWRDPEMGISGQLTWTRLPQGFKNSPTLFNEALHRDLADFRIQHPDLILLQYVDDLLLAATSELDCQQGTRALLQTLGNLGYRASAKKAQICQKQVKYLGYLLKEGQRWLTEARKETVMGQPTPKTPRQLREFLGKAGFCRLFIPGFAEMAAPLYPLTKPGTLFNWGPDQQKAYQEIKQALLTAPALGLPDLTKPFELFVDEKQGYAKGVLTQKLGPWRRPVAYLSKKLDPVAAGWPPCLRMVAAIAVLTKDAGKLTMGQPLVILAPHAVEALVKQPPDRWLSNARMTHYQALLLDTDRVQFGPVVALNPATLLPLPEEGLQHNCLDILAEAHGTRPDLTDQPLPDADHTWYTDGSSLLQEGQRKAGAAVTTETEVIWAKALPAGTSAQRAELIALTQALKMAEGKKLNVYTDSRYAFATAHIHGEIYRRRGWLTSEGKEIKNKDEILALLKALFLPKRLSIIHCPGHQKGHSAEARGNRMADQAARKAAITETPDTSTLLAGKRTADGSEFEKRTADGSEFESPKKKAKVE

SEQ ID NO: 2839 - protein, 2096 aa, synthetic construct
MPAAKRVKLDGGDKKYSIGLDIGTNSVGWAVITDEYKVPSKKFKVLGNTDRHSIKKNLIGALLFDSGETAEATRLKRTARRRYTRRKNRICYLQEIFSNEMAKVDDSFFHRLEESFLVEEDKKHERHPIFGNIVDEVAYHEKYPTIYHLRKKLVDSTDKADLRLIYLALAHMIKFRGHFLIEGDLNPDNSDVDKLFIQLVQTYNQLFEENPINASGVDAKAILSARLSKSRRLENLIAQLPGEKKNGLFGNLIALSLGLTPNFKSNFDLAEDAKLQLSKDTYDDDLDNLLAQIGDQYADLFLAAKNLSDAILLSDILRVNTEITKAPLSASMIKRYDEHHQDLTLLKALVRQQLPEKYKEIFFDQSKNGYAGYIDGGASQEEFYKFIKPILEKMDGTEELLVKLNREDLLRKQRTFDNGSIPHQIHLGELHAILRRQEDFYPFLKDNREKIEKILTFRIPYYVGPLARGNSRFAWMTRKSEETITPWNFEEVVDKGASAQSFIERMTNFDKNLPNEKVLPKHSLLYEYFTVYNELTKVKYVTEGMRKPAFLSGEQKKAIVDLLFKTNRKVTVKQLKEDYFKKIECFDSVEISGVEDRFNASLGTYHDLLKIIKDKDFLDNEENEDILEDIVLTLTLFEDREMIEERLKTYAHLFDDKVMKQLKRRRYTGWGRLSRKLINGIRDKQSGKTILDFLKSDGFANRNFMQLIHDDSLTFKEDIQKAQVSGQGDSLHEHIANLAGSPAIKKGILQTVKVVDELVKVMGRHKPENIVIEMARENQTTQKGQKNSRERMKRIEEGIKELGSQILKEHPVENTQLQNEKLYLYYLQNGRDMYVDQELDINRLSDYDVDHIVPQSFLKDDSIDNKVLTRSDKARGKSDNVPSEEVVKKMKNYWRQLLNAKLITQRKFDNLTKAERGGLSELDKAGFIKRQLVETRQITKHVAQILDSRMNTKYDENDKLIREVKVITLKSKLVSDFRKDFQFYKVREINNYHHAHDAYLNAVVGTALIKKYPKLESEFVYGDYKVYDVRKMIAKSEQEIGKATAKYFFYSNIMNFFKTEITLANGEIRKRPLIETNGETGEIVWDKGRDFATVRKVLSMPQVNIVKKTEVQTGGFSKESILPKRNSDKLIARKKDWDPKKYGGFDSPTVAYSVLVVAKVEKGKSKKLKSVKELLGITIMERSSFEKNPIDFLEAKGYKEVKKDLIIKLPKYSLFELENGRKRMLASAGELQKGNELALPSKYVNFLYLASHYEKLKGSPEDNEQKQLFVEQHKHYLDEIIEQISEFSKRVILADANLDKVLSAYNKHRDKPIREQAENIIHLFTLTNLGAPAAFKYFDTTIDRKRYTSTKEVLDATLIHQSITGLYETRIDLSQLGGDGGGSSPAPEAAAKGGTLNIEDEHRLHETSKEPDVSLGSTWLSDFPQAWAETGGMGLAVRQAPLIIPLKATSTPVSIKQYPMSQEARLGIKPHIQRLLDQGILVPCQSPWNTPLLPVKKPGTNDYRPVQDLREVNKRVEDIHPTVPNPYNLLSGLPPSHQWYTVLDLKDAFFCLRLHPTSQPLFAFEWRDPEMGISGQLTWTRLPQGFKNSPTLFNEALHRDLADFRIQHPDLILLQYVDDLLLAATSELDCQQGTRALLQTLGNLGYRASAKKAQICQKQVKYLGYLLKEGQRWLTEARKETVMGQPTPKTPRQLREFLGKAGFCRLFIPGFAEMAAPLYPLTKPGTLFNWGPDQQKAYQEIKQALLTAPALGLPDLTKPFELFVDEKQGYAKGVLTQKLGPWRRPVAYLSKKLDPVAAGWPPCLRMVAAIAVLTKDAGKLTMGQPLVILAPHAVEALVKQPPDRWLSNARMTHYQALLLDTDRVQFGPVVALNPATLLPLPEEGLQHNCLDILAEAHGTRPDLTDQPLPDADHTWYTDGSSLLQEGQRKAGAAVTTETEVIWAKALPAGTSAQRAELIALTQALKMAEGKKLNVYTDSRYAFATAHIHGEIYRRRGWLTSEGKEIKNKDEILALLKALFLPKRLSIIHCPGHQKGHSAEARGNRMADQAARKAAITETPDTSTLLAGKRTADGSEFEKRTADGSEFESPKKKAKVE

SEQ ID NO: 2840 - protein, 2094 aa, synthetic construct
MPAAKRVKLDGGDKKYSIGLDIGTNSVGWAVITDEYKVPSKKFKVLGNTDRHSIKKNLIGALLFDSGETAEATRLKRTARRRYTRRKNRICYLQEIFSNEMAKVDDSFFHRLEESFLVEEDKKHERHPIFGNIVDEVAYHEKYPTIYHLRKKLVDSTDKADLRLIYLALAHMIKFRGHFLIEGDLNPDNSDVDKLFIQLVQTYNQLFEENPINASGVDAKAILSARLSKSRRLENLIAQLPGEKKNGLFGNLIALSLGLTPNFKSNFDLAEDAKLQLSKDTYDDDLDNLLAQIGDQYADLFLAAKNLSDAILLSDILRVNTEITKAPLSASMIKRYDEHHQDLTLLKALVRQQLPEKYKEIFFDQSKNGYAGYIDGGASQEEFYKFIKPILEKMDGTEELLVKLNREDLLRKQRTFDNGSIPHQIHLGELHAILRRQEDFYPFLKDNREKIEKILTFRIPYYVGPLARGNSRFAWMTRKSEETITPWNFEEVVDKGASAQSFIERMTNFDKNLPNEKVLPKHSLLYEYFTVYNELTKVKYVTEGMRKPAFLSGEQKKAIVDLLFKTNRKVTVKQLKEDYFKKIECFDSVEISGVEDRFNASLGTYHDLLKIIKDKDFLDNEENEDILEDIVLTLTLFEDREMIEERLKTYAHLFDDKVMKQLKRRRYTGWGRLSRKLINGIRDKQSGKTILDFLKSDGFANRNFMQLIHDDSLTFKEDIQKAQVSGQGDSLHEHIANLAGSPAIKKGILQTVKVVDELVKVMGRHKPENIVIEMARENQTTQKGQKNSRERMKRIEEGIKELGSQILKEHPVENTQLQNEKLYLYYLQNGRDMYVDQELDINRLSDYDVDHIVPQSFLKDDSIDNKVLTRSDKARGKSDNVPSEEVVKKMKNYWRQLLNAKLITQRKFDNLTKAERGGLSELDKAGFIKRQLVETRQITKHVAQILDSRMNTKYDENDKLIREVKVITLKSKLVSDFRKDFQFYKVREINNYHHAHDAYLNAVVGTALIKKYPKLESEFVYGDYKVYDVRKMIAKSEQEIGKATAKYFFYSNIMNFFKTEITLANGEIRKRPLIETNGETGEIVWDKGRDFATVRKVLSMPQVNIVKKTEVQTGGFSKESILPKRNSDKLIARKKDWDPKKYGGFDSPTVAYSVLVVAKVEKGKSKKLKSVKELLGITIMERSSFEKNPIDFLEAKGYKEVKKDLIIKLPKYSLFELENGRKRMLASAGELQKGNELALPSKYVNFLYLASHYEKLKGSPEDNEQKQLFVEQHKHYLDEIIEQISEFSKRVILADANLDKVLSAYNKHRDKPIREQAENIIHLFTLTNLGAPAAFKYFDTTIDRKRYTSTKEVLDATLIHQSITGLYETRIDLSQLGGDGGGGGGGSPAPGGTLNIEDEHRLHETSKEPDVSLGSTWLSDFPQAWAETGGMGLAVRQAPLIIPLKATSTPVSIKQYPMSQEARLGIKPHIQRLLDQGILVPCQSPWNTPLLPVKKPGTNDYRPVQDLREVNKRVEDIHPTVPNPYNLLSGLPPSHQWYTVLDLKDAFFCLRLHPTSQPLFAFEWRDPEMGISGQLTWTRLPQGFKNSPTLFNEALHRDLADFRIQHPDLILLQYVDDLLLAATSELDCQQGTRALLQTLGNLGYRASAKKAQICQKQVKYLGYLLKEGQRWLTEARKETVMGQPTPKTPRQLREFLGKAGFCRLFIPGFAEMAAPLYPLTKPGTLFNWGPDQQKAYQEIKQALLTAPALGLPDLTKPFELFVDEKQGYAKGVLTQKLGPWRRPVAYLSKKLDPVAAGWPPCLRMVAAIAVLTKDAGKLTMGQPLVILAPHAVEALVKQPPDRWLSNARMTHYQALLLDTDRVQFGPVVALNPATLLPLPEEGLQHNCLDILAEAHGTRPDLTDQPLPDADHTWYTDGSSLLQEGQRKAGAAVTTETEVIWAKALPAGTSAQRAELIALTQALKMAEGKKLNVYTDSRYAFATAHIHGEIYRRRGWLTSEGKEIKNKDEILALLKALFLPKRLSIIHCPGHQKGHSAEARGNRMADQAARKAAITETPDTSTLLAGKRTADGSEFEKRTADGSEFESPKKKAKVE

SEQ ID NO: 2841 - protein, 2094 aa, synthetic construct
MPAAKRVKLDGGDKKYSIGLDIGTNSVGWAVITDEYKVPSKKFKVLGNTDRHSIKKNLIGALLFDSGETAEATRLKRTARRRYTRRKNRICYLQEIFSNEMAKVDDSFFHRLEESFLVEEDKKHERHPIFGNIVDEVAYHEKYPTIYHLRKKLVDSTDKADLRLIYLALAHMIKFRGHFLIEGDLNPDNSDVDKLFIQLVQTYNQLFEENPINASGVDAKAILSARLSKSRRLENLIAQLPGEKKNGLFGNLIALSLGLTPNFKSNFDLAEDAKLQLSKDTYDDDLDNLLAQIGDQYADLFLAAKNLSDAILLSDILRVNTEITKAPLSASMIKRYDEHHQDLTLLKALVRQQLPEKYKEIFFDQSKNGYAGYIDGGASQEEFYKFIKPILEKMDGTEELLVKLNREDLLRKQRTFDNGSIPHQIHLGELHAILRRQEDFYPFLKDNREKIEKILTFRIPYYVGPLARGNSRFAWMTRKSEETITPWNFEEVVDKGASAQSFIERMTNFDKNLPNEKVLPKHSLLYEYFTVYNELTKVKYVTEGMRKPAFLSGEQKKAIVDLLFKTNRKVTVKQLKEDYFKKIECFDSVEISGVEDRFNASLGTYHDLLKIIKDKDFLDNEENEDILEDIVLTLTLFEDREMIEERLKTYAHLFDDKVMKQLKRRRYTGWGRLSRKLINGIRDKQSGKTILDFLKSDGFANRNFMQLIHDDSLTFKEDIQKAQVSGQGDSLHEHIANLAGSPAIKKGILQTVKVVDELVKVMGRHKPENIVIEMARENQTTQKGQKNSRERMKRIEEGIKELGSQILKEHPVENTQLQNEKLYLYYLQNGRDMYVDQELDINRLSDYDVDHIVPQSFLKDDSIDNKVLTRSDKARGKSDNVPSEEVVKKMKNYWRQLLNAKLITQRKFDNLTKAERGGLSELDKAGFIKRQLVETRQITKHVAQILDSRMNTKYDENDKLIREVKVITLKSKLVSDFRKDFQFYKVREINNYHHAHDAYLNAVVGTALIKKYPKLESEFVYGDYKVYDVRKMIAKSEQEIGKATAKYFFYSNIMNFFKTEITLANGEIRKRPLIETNGETGEIVWDKGRDFATVRKVLSMPQVNIVKKTEVQTGGFSKESILPKRNSDKLIARKKDWDPKKYGGFDSPTVAYSVLVVAKVEKGKSKKLKSVKELLGITIMERSSFEKNPIDFLEAKGYKEVKKDLIIKLPKYSLFELENGRKRMLASAGELQKGNELALPSKYVNFLYLASHYEKLKGSPEDNEQKQLFVEQHKHYLDEIIEQISEFSKRVILADANLDKVLSAYNKHRDKPIREQAENIIHLFTLTNLGAPAAFKYFDTTIDRKRYTSTKEVLDATLIHQSITGLYETRIDLSQLGGDGGGGGPAPGSSGGTLNIEDEHRLHETSKEPDVSLGSTWLSDFPQAWAETGGMGLAVRQAPLIIPLKATSTPVSIKQYPMSQEARLGIKPHIQRLLDQGILVPCQSPWNTPLLPVKKPGTNDYRPVQDLREVNKRVEDIHPTVPNPYNLLSGLPPSHQWYTVLDLKDAFFCLRLHPTSQPLFAFEWRDPEMGISGQLTWTRLPQGFKNSPTLFNEALHRDLADFRIQHPDLILLQYVDDLLLAATSELDCQQGTRALLQTLGNLGYRASAKKAQICQKQVKYLGYLLKEGQRWLTEARKETVMGQPTPKTPRQLREFLGKAGFCRLFIPGFAEMAAPLYPLTKPGTLFNWGPDQQKAYQEIKQALLTAPALGLPDLTKPFELFVDEKQGYAKGVLTQKLGPWRRPVAYLSKKLDPVAAGWPPCLRMVAAIAVLTKDAGKLTMGQPLVILAPHAVEALVKQPPDRWLSNARMTHYQALLLDTDRVQFGPVVALNPATLLPLPEEGLQHNCLDILAEAHGTRPDLTDQPLPDADHTWYTDGSSLLQEGQRKAGAAVTTETEVIWAKALPAGTSAQRAELIALTQALKMAEGKKLNVYTDSRYAFATAHIHGEIYRRRGWLTSEGKEIKNKDEILALLKALFLPKRLSIIHCPGHQKGHSAEARGNRMADQAARKAAITETPDTSTLLAGKRTADGSEFEKRTADGSEFESPKKKAKVE

SEQ ID NO: 2842 - protein, 2096 aa, synthetic construct
MPAAKRVKLDGGDKKYSIGLDIGTNSVGWAVITDEYKVPSKKFKVLGNTDRHSIKKNLIGALLFDSGETAEATRLKRTARRRYTRRKNRICYLQEIFSNEMAKVDDSFFHRLEESFLVEEDKKHERHPIFGNIVDEVAYHEKYPTIYHLRKKLVDSTDKADLRLIYLALAHMIKFRGHFLIEGDLNPDNSDVDKLFIQLVQTYNQLFEENPINASGVDAKAILSARLSKSRRLENLIAQLPGEKKNGLFGNLIALSLGLTPNFKSNFDLAEDAKLQLSKDTYDDDLDNLLAQIGDQYADLFLAAKNLSDAILLSDILRVNTEITKAPLSASMIKRYDEHHQDLTLLKALVRQQLPEKYKEIFFDQSKNGYAGYIDGGASQEEFYKFIKPILEKMDGTEELLVKLNREDLLRKQRTFDNGSIPHQIHLGELHAILRRQEDFYPFLKDNREKIEKILTFRIPYYVGPLARGNSRFAWMTRKSEETITPWNFEEVVDKGASAQSFIERMTNFDKNLPNEKVLPKHSLLYEYFTVYNELTKVKYVTEGMRKPAFLSGEQKKAIVDLLFKTNRKVTVKQLKEDYFKKIECFDSVEISGVEDRFNASLGTYHDLLKIIKDKDFLDNEENEDILEDIVLTLTLFEDREMIEERLKTYAHLFDDKVMKQLKRRRYTGWGRLSRKLINGIRDKQSGKTILDFLKSDGFANRNFMQLIHDDSLTFKEDIQKAQVSGQGDSLHEHIANLAGSPAIKKGILQTVKVVDELVKVMGRHKPENIVIEMARENQTTQKGQKNSRERMKRIEEGIKELGSQILKEHPVENTQLQNEKLYLYYLQNGRDMYVDQELDINRLSDYDVDHIVPQSFLKDDSIDNKVLTRSDKARGKSDNVPSEEVVKKMKNYWRQLLNAKLITQRKFDNLTKAERGGLSELDKAGFIKRQLVETRQITKHVAQILDSRMNTKYDENDKLIREVKVITLKSKLVSDFRKDFQFYKVREINNYHHAHDAYLNAVVGTALIKKYPKLESEFVYGDYKVYDVRKMIAKSEQEIGKATAKYFFYSNIMNFFKTEITLANGEIRKRPLIETNGETGEIVWDKGRDFATVRKVLSMPQVNIVKKTEVQTGGFSKESILPKRNSDKLIARKKDWDPKKYGGFDSPTVAYSVLVVAKVEKGKSKKLKSVKELLGITIMERSSFEKNPIDFLEAKGYKEVKKDLIIKLPKYSLFELENGRKRMLASAGELQKGNELALPSKYVNFLYLASHYEKLKGSPEDNEQKQLFVEQHKHYLDEIIEQISEFSKRVILADANLDKVLSAYNKHRDKPIREQAENIIHLFTLTNLGAPAAFKYFDTTIDRKRYTSTKEVLDATLIHQSITGLYETRIDLSQLGGDGGGGSGSSEAAAKGGTLNIEDEHRLHETSKEPDVSLGSTWLSDFPQAWAETGGMGLAVRQAPLIIPLKATSTPVSIKQYPMSQEARLGIKPHIQRLLDQGILVPCQSPWNTPLLPVKKPGTNDYRPVQDLREVNKRVEDIHPTVPNPYNLLSGLPPSHQWYTVLDLKDAFFCLRLHPTSQPLFAFEWRDPEMGISGQLTWTRLPQGFKNSPTLFNEALHRDLADFRIQHPDLILLQYVDDLLLAATSELDCQQGTRALLQTLGNLGYRASAKKAQICQKQVKYLGYLLKEGQRWLTEARKETVMGQPTPKTPRQLREFLGKAGFCRLFIPGFAEMAAPLYPLTKPGTLFNWGPDQQKAYQEIKQALLTAPALGLPDLTKPFELFVDEKQGYAKGVLTQKLGPWRRPVAYLSKKLDPVAAGWPPCLRMVAAIAVLTKDAGKLTMGQPLVILAPHAVEALVKQPPDRWLSNARMTHYQALLLDTDRVQFGPVVALNPATLLPLPEEGLQHNCLDILAEAHGTRPDLTDQPLPDADHTWYTDGSSLLQEGQRKAGAAVTTETEVIWAKALPAGTSAQRAELIALTQALKMAEGKKLNVYTDSRYAFATAHIHGEIYRRRGWLTSEGKEIKNKDEILALLKALFLPKRLSIIHCPGHQKGHSAEARGNRMADQAARKAAITETPDTSTLLAGKRTADGSEFEKRTADGSEFESPKKKAKVE

SEQ ID NO: 2843 - protein, 2096 aa, synthetic construct
MPAAKRVKLDGGDKKYSIGLDIGTNSVGWAVITDEYKVPSKKFKVLGNTDRHSIKKNLIGALLFDSGETAEATRLKRTARRRYTRRKNRICYLQEIFSNEMAKVDDSFFHRLEESFLVEEDKKHERHPIFGNIVDEVAYHEKYPTIYHLRKKLVDSTDKADLRLIYLALAHMIKFRGHFLIEGDLNPDNSDVDKLFIQLVQTYNQLFEENPINASGVDAKAILSARLSKSRRLENLIAQLPGEKKNGLFGNLIALSLGLTPNFKSNFDLAEDAKLQLSKDTYDDDLDNLLAQIGDQYADLFLAAKNLSDAILLSDILRVNTEITKAPLSASMIKRYDEHHQDLTLLKALVRQQLPEKYKEIFFDQSKNGYAGYIDGGASQEEFYKFIKPILEKMDGTEELLVKLNREDLLRKQRTFDNGSIPHQIHLGELHAILRRQEDFYPFLKDNREKIEKILTFRIPYYVGPLARGNSRFAWMTRKSEETITPWNFEEVVDKGASAQSFIERMTNFDKNLPNEKVLPKHSLLYEYFTVYNELTKVKYVTEGMRKPAFLSGEQKKAIVDLLFKTNRKVTVKQLKEDYFKKIECFDSVEISGVEDRFNASLGTYHDLLKIIKDKDFLDNEENEDILEDIVLTLTLFEDREMIEERLKTYAHLFDDKVMKQLKRRRYTGWGRLSRKLINGIRDKQSGKTILDFLKSDGFANRNFMQLIHDDSLTFKEDIQKAQVSGQGDSLHEHIANLAGSPAIKKGILQTVKVVDELVKVMGRHKPENIVIEMARENQTTQKGQKNSRERMKRIEEGIKELGSQILKEHPVENTQLQNEKLYLYYLQNGRDMYVDQELDINRLSDYDVDHIVPQSFLKDDSIDNKVLTRSDKARGKSDNVPSEEVVKKMKNYWRQLLNAKLITQRKFDNLTKAERGGLSELDKAGFIKRQLVETRQITKHVAQILDSRMNTKYDENDKLIREVKVITLKSKLVSDFRKDFQFYKVREINNYHHAHDAYLNAVVGTALIKKYPKLESEFVYGDYKVYDVRKMIAKSEQEIGKATAKYFFYSNIMNFFKTEITLANGEIRKRPLIETNGETGEIVWDKGRDFATVRKVLSMPQVNIVKKTEVQTGGFSKESILPKRNSDKLIARKKDWDPKKYGGFDSPTVAYSVLVVAKVEKGKSKKLKSVKELLGITIMERSSFEKNPIDFLEAKGYKEVKKDLIIKLPKYSLFELENGRKRMLASAGELQKGNELALPSKYVNFLYLASHYEKLKGSPEDNEQKQLFVEQHKHYLDEIIEQISEFSKRVILADANLDKVLSAYNKHRDKPIREQAENIIHLFTLTNLGAPAAFKYFDTTIDRKRYTSTKEVLDATLIHQSITGLYETRIDLSQLGGDGGEAAAKGGGPAPGGTLNIEDEHRLHETSKEPDVSLGSTWLSDFPQAWAETGGMGLAVRQAPLIIPLKATSTPVSIKQYPMSQEARLGIKPHIQRLLDQGILVPCQSPWNTPLLPVKKPGTNDYRPVQDLREVNKRVEDIHPTVPNPYNLLSGLPPSHQWYTVLDLKDAFFCLRLHPTSQPLFAFEWRDPEMGISGQLTWTRLPQGFKNSPTLFNEALHRDLADFRIQHPDLILLQYVDDLLLAATSELDCQQGTRALLQTLGNLGYRASAKKAQICQKQVKYLGYLLKEGQRWLTEARKETVMGQPTPKTPRQLREFLGKAGFCRLFIPGFAEMAAPLYPLTKPGTLFNWGPDQQKAYQEIKQALLTAPALGLPDLTKPFELFVDEKQGYAKGVLTQKLGPWRRPVAYLSKKLDPVAAGWPPCLRMVAAIAVLTKDAGKLTMGQPLVILAPHAVEALVKQPPDRWLSNARMTHYQALLLDTDRVQFGPVVALNPATLLPLPEEGLQHNCLDILAEAHGTRPDLTDQPLPDADHTWYTDGSSLLQEGQRKAGAAVTTETEVIWAKALPAGTSAQRAELIALTQALKMAEGKKLNVYTDSRYAFATAHIHGEIYRRRGWLTSEGKEIKNKDEILALLKALFLPKRLSIIHCPGHQKGHSAEARGNRMADQAARKAAITETPDTSTLLAGKRTADGSEFEKRTADGSEFESPKKKAKVE

SEQ ID NO: 2844 - protein, 2105 aa, synthetic construct
MPAAKRVKLDGGDKKYSIGLDIGTNSVGWAVITDEYKVPSKKFKVLGNTDRHSIKKNLIGALLFDSGETAEATRLKRTARRRYTRRKNRICYLQEIFSNEMAKVDDSFFHRLEESFLVEEDKKHERHPIFGNIVDEVAYHEKYPTIYHLRKKLVDSTDKADLRLIYLALAHMIKFRGHFLIEGDLNPDNSDVDKLFIQLVQTYNQLFEENPINASGVDAKAILSARLSKSRRLENLIAQLPGEKKNGLFGNLIALSLGLTPNFKSNFDLAEDAKLQLSKDTYDDDLDNLLAQIGDQYADLFLAAKNLSDAILLSDILRVNTEITKAPLSASMIKRYDEHHQDLTLLKALVRQQLPEKYKEIFFDQSKNGYAGYIDGGASQEEFYKFIKPILEKMDGTEELLVKLNREDLLRKQRTFDNGSIPHQIHLGELHAILRRQEDFYPFLKDNREKIEKILTFRIPYYVGPLARGNSRFAWMTRKSEETITPWNFEEVVDKGASAQSFIERMTNFDKNLPNEKVLPKHSLLYEYFTVYNELTKVKYVTEGMRKPAFLSGEQKKAIVDLLFKTNRKVTVKQLKEDYFKKIECFDSVEISGVEDRFNASLGTYHDLLKIIKDKDFLDNEENEDILEDIVLTLTLFEDREMIEERLKTYAHLFDDKVMKQLKRRRYTGWGRLSRKLINGIRDKQSGKTILDFLKSDGFANRNFMQLIHDDSLTFKEDIQKAQVSGQGDSLHEHIANLAGSPAIKKGILQTVKVVDELVKVMGRHKPENIVIEMARENQTTQKGQKNSRERMKRIEEGIKELGSQILKEHPVENTQLQNEKLYLYYLQNGRDMYVDQELDINRLSDYDVDHIVPQSFLKDDSIDNKVLTRSDKARGKSDNVPSEEVVKKMKNYWRQLLNAKLITQRKFDNLTKAERGGLSELDKAGFIKRQLVETRQITKHVAQILDSRMNTKYDENDKLIREVKVITLKSKLVSDFRKDFQFYKVREINNYHHAHDAYLNAVVGTALIKKYPKLESEFVYGDYKVYDVRKMIAKSEQEIGKATAKYFFYSNIMNFFKTEITLANGEIRKRPLIETNGETGEIVWDKGRDFATVRKVLSMPQVNIVKKTEVQTGGFSKESILPKRNSDKLIARKKDWDPKKYGGFDSPTVAYSVLVVAKVEKGKSKKLKSVKELLGITIMERSSFEKNPIDFLEAKGYKEVKKDLIIKLPKYSLFELENGRKRMLASAGELQKGNELALPSKYVNFLYLASHYEKLKGSPEDNEQKQLFVEQHKHYLDEIIEQISEFSKRVILADANLDKVLSAYNKHRDKPIREQAENIIHLFTLTNLGAPAAFKYFDTTIDRKRYTSTKEVLDATLIHQSITGLYETRIDLSQLGGDGGEAAAKEAAAKEAAAKEAAAKGGTLNIEDEHRLHETSKEPDVSLGSTWLSDFPQAWAETGGMGLAVRQAPLIIPLKATSTPVSIKQYPMSQEARLGIKPHIQRLLDQGILVPCQSPWNTPLLPVKKPGTNDYRPVQDLREVNKRVEDIHPTVPNPYNLLSGLPPSHQWYTVLDLKDAFFCLRLHPTSQPLFAFEWRDPEMGISGQLTWTRLPQGFKNSPTLFNEALHRDLADFRIQHPDLILLQYVDDLLLAATSELDCQQGTRALLQTLGNLGYRASAKKAQICQKQVKYLGYLLKEGQRWLTEARKETVMGQPTPKTPRQLREFLGKAGFCRLFIPGFAEMAAPLYPLTKPGTLFNWGPDQQKAYQEIKQALLTAPALGLPDLTKPFELFVDEKQGYAKGVLTQKLGPWRRPVAYLSKKLDPVAAGWPPCLRMVAAIAVLTKDAGKLTMGQPLVILAPHAVEALVKQPPDRWLSNARMTHYQALLLDTDRVQFGPVVALNPATLLPLPEEGLQHNCLDILAEAHGTRPDLTDQPLPDADHTWYTDGSSLLQEGQRKAGAAVTTETEVIWAKALPAGTSAQRAELIALTQALKMAEGKKLNVYTDSRYAFATAHIHGEIYRRRGWLTSEGKEIKNKDEILALLKALFLPKRLSIIHCPGHQKGHSAEARGNRMADQAARKAAITETPDTSTLLAGKRTADGSEFEKRTADGSEFESPKKKAKVE

SEQ ID NO: 2845 - protein, 2095 aa, synthetic construct
MPAAKRVKLDGGDKKYSIGLDIGTNSVGWAVITDEYKVPSKKFKVLGNTDRHSIKKNLIGALLFDSGETAEATRLKRTARRRYTRRKNRICYLQEIFSNEMAKVDDSFFHRLEESFLVEEDKKHERHPIFGNIVDEVAYHEKYPTIYHLRKKLVDSTDKADLRLIYLALAHMIKFRGHFLIEGDLNPDNSDVDKLFIQLVQTYNQLFEENPINASGVDAKAILSARLSKSRRLENLIAQLPGEKKNGLFGNLIALSLGLTPNFKSNFDLAEDAKLQLSKDTYDDDLDNLLAQIGDQYADLFLAAKNLSDAILLSDILRVNTEITKAPLSASMIKRYDEHHQDLTLLKALVRQQLPEKYKEIFFDQSKNGYAGYIDGGASQEEFYKFIKPILEKMDGTEELLVKLNREDLLRKQRTFDNGSIPHQIHLGELHAILRRQEDFYPFLKDNREKIEKILTFRIPYYVGPLARGNSRFAWMTRKSEETITPWNFEEVVDKGASAQSFIERMTNFDKNLPNEKVLPKHSLLYEYFTVYNELTKVKYVTEGMRKPAFLSGEQKKAIVDLLFKTNRKVTVKQLKEDYFKKIECFDSVEISGVEDRFNASLGTYHDLLKIIKDKDFLDNEENEDILEDIVLTLTLFEDREMIEERLKTYAHLFDDKVMKQLKRRRYTGWGRLSRKLINGIRDKQSGKTILDFLKSDGFANRNFMQLIHDDSLTFKEDIQKAQVSGQGDSLHEHIANLAGSPAIKKGILQTVKVVDELVKVMGRHKPENIVIEMARENQTTQKGQKNSRERMKRIEEGIKELGSQILKEHPVENTQLQNEKLYLYYLQNGRDMYVDQELDINRLSDYDVDHIVPQSFLKDDSIDNKVLTRSDKARGKSDNVPSEEVVKKMKNYWRQLLNAKLITQRKFDNLTKAERGGLSELDKAGFIKRQLVETRQITKHVAQILDSRMNTKYDENDKLIREVKVITLKSKLVSDFRKDFQFYKVREINNYHHAHDAYLNAVVGTALIKKYPKLESEFVYGDYKVYDVRKMIAKSEQEIGKATAKYFFYSNIMNFFKTEITLANGEIRKRPLIETNGETGEIVWDKGRDFATVRKVLSMPQVNIVKKTEVQTGGFSKESILPKRNSDKLIARKKDWDPKKYGGFDSPTVAYSVLVVAKVEKGKSKKLKSVKELLGITIMERSSFEKNPIDFLEAKGYKEVKKDLIIKLPKYSLFELENGRKRMLASAGELQKGNELALPSKYVNFLYLASHYEKLKGSPEDNEQKQLFVEQHKHYLDEIIEQISEFSKRVILADANLDKVLSAYNKHRDKPIREQAENIIHLFTLTNLGAPAAFKYFDTTIDRKRYTSTKEVLDATLIHQSITGLYETRIDLSQLGGDGGEAAAKEAAAKGGTLNIEDEHRLHETSKEPDVSLGSTWLSDFPQAWAETGGMGLAVRQAPLIIPLKATSTPVSIKQYPMSQEARLGIKPHIQRLLDQGILVPCQSPWNTPLLPVKKPGTNDYRPVQDLREVNKRVEDIHPTVPNPYNLLSGLPPSHQWYTVLDLKDAFFCLRLHPTSQPLFAFEWRDPEMGISGQLTWTRLPQGFKNSPTLFNEALHRDLADFRIQHPDLILLQYVDDLLLAATSELDCQQGTRALLQTLGNLGYRASAKKAQICQKQVKYLGYLLKEGQRWLTEARKETVMGQPTPKTPRQLREFLGKAGFCRLFIPGFAEMAAPLYPLTKPGTLFNWGPDQQKAYQEIKQALLTAPALGLPDLTKPFELFVDEKQGYAKGVLTQKLGPWRRPVAYLSKKLDPVAAGWPPCLRMVAAIAVLTKDAGKLTMGQPLVILAPHAVEALVKQPPDRWLSNARMTHYQALLLDTDRVQFGPVVALNPATLLPLPEEGLQHNCLDILAEAHGTRPDLTDQPLPDADHTWYTDGSSLLQEGQRKAGAAVTTETEVIWAKALPAGTSAQRAELIALTQALKMAEGKKLNVYTDSRYAFATAHIHGEIYRRRGWLTSEGKEIKNKDEILALLKALFLPKRLSIIHCPGHQKGHSAEARGNRMADQAARKAAITETPDTSTLLAGKRTADGSEFEKRTADGSEFESPKKKAKVE

SEQ ID NO: 2846 - protein, 2094 aa, synthetic construct
MPAAKRVKLDGGDKKYSIGLDIGTNSVGWAVITDEYKVPSKKFKVLGNTDRHSIKKNLIGALLFDSGETAEATRLKRTARRRYTRRKNRICYLQEIFSNEMAKVDDSFFHRLEESFLVEEDKKHERHPIFGNIVDEVAYHEKYPTIYHLRKKLVDSTDKADLRLIYLALAHMIKFRGHFLIEGDLNPDNSDVDKLFIQLVQTYNQLFEENPINASGVDAKAILSARLSKSRRLENLIAQLPGEKKNGLFGNLIALSLGLTPNFKSNFDLAEDAKLQLSKDTYDDDLDNLLAQIGDQYADLFLAAKNLSDAILLSDILRVNTEITKAPLSASMIKRYDEHHQDLTLLKALVRQQLPEKYKEIFFDQSKNGYAGYIDGGASQEEFYKFIKPILEKMDGTEELLVKLNREDLLRKQRTFDNGSIPHQIHLGELHAILRRQEDFYPFLKDNREKIEKILTFRIPYYVGPLARGNSRFAWMTRKSEETITPWNFEEVVDKGASAQSFIERMTNFDKNLPNEKVLPKHSLLYEYFTVYNELTKVKYVTEGMRKPAFLSGEQKKAIVDLLFKTNRKVTVKQLKEDYFKKIECFDSVEISGVEDRFNASLGTYHDLLKIIKDKDFLDNEENEDILEDIVLTLTLFEDREMIEERLKTYAHLFDDKVMKQLKRRRYTGWGRLSRKLINGIRDKQSGKTILDFLKSDGFANRNFMQLIHDDSLTFKEDIQKAQVSGQGDSLHEHIANLAGSPAIKKGILQTVKVVDELVKVMGRHKPENIVIEMARENQTTQKGQKNSRERMKRIEEGIKELGSQILKEHPVENTQLQNEKLYLYYLQNGRDMYVDQELDINRLSDYDVDHIVPQSFLKDDSIDNKVLTRSDKARGKSDNVPSEEVVKKMKNYWRQLLNAKLITQRKFDNLTKAERGGLSELDKAGFIKRQLVETRQITKHVAQILDSRMNTKYDENDKLIREVKVITLKSKLVSDFRKDFQFYKVREINNYHHAHDAYLNAVVGTALIKKYPKLESEFVYGDYKVYDVRKMIAKSEQEIGKATAKYFFYSNIMNFFKTEITLANGEIRKRPLIETNGETGEIVWDKGRDFATVRKVLSMPQVNIVKKTEVQTGGFSKESILPKRNSDKLIARKKDWDPKKYGGFDSPTVAYSVLVVAKVEKGKSKKLKSVKELLGITIMERSSFEKNPIDFLEAKGYKEVKKDLIIKLPKYSLFELENGRKRMLASAGELQKGNELALPSKYVNFLYLASHYEKLKGSPEDNEQKQLFVEQHKHYLDEIIEQISEFSKRVILADANLDKVLSAYNKHRDKPIREQAENIIHLFTLTNLGAPAAFKYFDTTIDRKRYTSTKEVLDATLIHQSITGLYETRIDLSQLGGDGGGGGGGSGSSGGTLNIEDEHRLHETSKEPDVSLGSTWLSDFPQAWAETGGMGLAVRQAPLIIPLKATSTPVSIKQYPMSQEARLGIKPHIQRLLDQGILVPCQSPWNTPLLPVKKPGTNDYRPVQDLREVNKRVEDIHPTVPNPYNLLSGLPPSHQWYTVLDLKDAFFCLRLHPTSQPLFAFEWRDPEMGISGQLTWTRLPQGFKNSPTLFNEALHRDLADFRIQHPDLILLQYVDDLLLAATSELDCQQGTRALLQTLGNLGYRASAKKAQICQKQVKYLGYLLKEGQRWLTEARKETVMGQPTPKTPRQLREFLGKAGFCRLFIPGFAEMAAPLYPLTKPGTLFNWGPDQQKAYQEIKQALLTAPALGLPDLTKPFELFVDEKQGYAKGVLTQKLGPWRRPVAYLSKKLDPVAAGWPPCLRMVAAIAVLTKDAGKLTMGQPLVILAPHAVEALVKQPPDRWLSNARMTHYQALLLDTDRVQFGPVVALNPATLLPLPEEGLQHNCLDILAEAHGTRPDLTDQPLPDADHTWYTDGSSLLQEGQRKAGAAVTTETEVIWAKALPAGTSAQRAELIALTQALKMAEGKKLNVYTDSRYAFATAHIHGEIYRRRGWLTSEGKEIKNKDEILALLKALFLPKRLSIIHCPGHQKGHSAEARGNRMADQAARKAAITETPDTSTLLAGKRTADGSEFEKRTADGSEFESPKKKAKVE

SEQ ID NO: 2847 - protein, 2094 aa, synthetic construct
MPAAKRVKLDGGDKKYSIGLDIGTNSVGWAVITDEYKVPSKKFKVLGNTDRHSIKKNLIGALLFDSGETAEATRLKRTARRRYTRRKNRICYLQEIFSNEMAKVDDSFFHRLEESFLVEEDKKHERHPIFGNIVDEVAYHEKYPTIYHLRKKLVDSTDKADLRLIYLALAHMIKFRGHFLIEGDLNPDNSDVDKLFIQLVQTYNQLFEENPINASGVDAKAILSARLSKSRRLENLIAQLPGEKKNGLFGNLIALSLGLTPNFKSNFDLAEDAKLQLSKDTYDDDLDNLLAQIGDQYADLFLAAKNLSDAILLSDILRVNTEITKAPLSASMIKRYDEHHQDLTLLKALVRQQLPEKYKEIFFDQSKNGYAGYIDGGASQEEFYKFIKPILEKMDGTEELLVKLNREDLLRKQRTFDNGSIPHQIHLGELHAILRRQEDFYPFLKDNREKIEKILTFRIPYYVGPLARGNSRFAWMTRKSEETITPWNFEEVVDKGASAQSFIERMTNFDKNLPNEKVLPKHSLLYEYFTVYNELTKVKYVTEGMRKPAFLSGEQKKAIVDLLFKTNRKVTVKQLKEDYFKKIECFDSVEISGVEDRFNASLGTYHDLLKIIKDKDFLDNEENEDILEDIVLTLTLFEDREMIEERLKTYAHLFDDKVMKQLKRRRYTGWGRLSRKLINGIRDKQSGKTILDFLKSDGFANRNFMQLIHDDSLTFKEDIQKAQVSGQGDSLHEHIANLAGSPAIKKGILQTVKVVDELVKVMGRHKPENIVIEMARENQTTQKGQKNSRERMKRIEEGIKELGSQILKEHPVENTQLQNEKLYLYYLQNGRDMYVDQELDINRLSDYDVDHIVPQSFLKDDSIDNKVLTRSDKARGKSDNVPSEEVVKKMKNYWRQLLNAKLITQRKFDNLTKAERGGLSELDKAGFIKRQLVETRQITKHVAQILDSRMNTKYDENDKLIREVKVITLKSKLVSDFRKDFQFYKVREINNYHHAHDAYLNAVVGTALIKKYPKLESEFVYGDYKVYDVRKMIAKSEQEIGKATAKYFFYSNIMNFFKTEITLANGEIRKRPLIETNGETGEIVWDKGRDFATVRKVLSMPQVNIVKKTEVQTGGFSKESILPKRNSDKLIARKKDWDPKKYGGFDSPTVAYSVLVVAKVEKGKSKKLKSVKELLGITIMERSSFEKNPIDFLEAKGYKEVKKDLIIKLPKYSLFELENGRKRMLASAGELQKGNELALPSKYVNFLYLASHYEKLKGSPEDNEQKQLFVEQHKHYLDEIIEQISEFSKRVILADANLDKVLSAYNKHRDKPIREQAENIIHLFTLTNLGAPAAFKYFDTTIDRKRYTSTKEVLDATLIHQSITGLYETRIDLSQLGGDGGPAPGSSGGGGGTLNIEDEHRLHETSKEPDVSLGSTWLSDFPQAWAETGGMGLAVRQAPLIIPLKATSTPVSIKQYPMSQEARLGIKPHIQRLLDQGILVPCQSPWNTPLLPVKKPGTNDYRPVQDLREVNKRVEDIHPTVPNPYNLLSGLPPSHQWYTVLDLKDAFFCLRLHPTSQPLFAFEWRDPEMGISGQLTWTRLPQGFKNSPTLFNEALHRDLADFRIQHPDLILLQYVDDLLLAATSELDCQQGTRALLQTLGNLGYRASAKKAQICQKQVKYLGYLLKEGQRWLTEARKETVMGQPTPKTPRQLREFLGKAGFCRLFIPGFAEMAAPLYPLTKPGTLFNWGPDQQKAYQEIKQALLTAPALGLPDLTKPFELFVDEKQGYAKGVLTQKLGPWRRPVAYLSKKLDPVAAGWPPCLRMVAAIAVLTKDAGKLTMGQPLVILAPHAVEALVKQPPDRWLSNARMTHYQALLLDTDRVQFGPVVALNPATLLPLPEEGLQHNCLDILAEAHGTRPDLTDQPLPDADHTWYTDGSSLLQEGQRKAGAAVTTETEVIWAKALPAGTSAQRAELIALTQALKMAEGKKLNVYTDSRYAFATAHIHGEIYRRRGWLTSEGKEIKNKDEILALLKALFLPKRLSIIHCPGHQKGHSAEARGNRMADQAARKAAITETPDTSTLLAGKRTADGSEFEKRTADGSEFESPKKKAKVE

SEQ ID NO: 2848 - protein, 2094 aa, synthetic construct
MPAAKRVKLDGGDKKYSIGLDIGTNSVGWAVITDEYKVPSKKFKVLGNTDRHSIKKNLIGALLFDSGETAEATRLKRTARRRYTRRKNRICYLQEIFSNEMAKVDDSFFHRLEESFLVEEDKKHERHPIFGNIVDEVAYHEKYPTIYHLRKKLVDSTDKADLRLIYLALAHMIKFRGHFLIEGDLNPDNSDVDKLFIQLVQTYNQLFEENPINASGVDAKAILSARLSKSRRLENLIAQLPGEKKNGLFGNLIALSLGLTPNFKSNFDLAEDAKLQLSKDTYDDDLDNLLAQIGDQYADLFLAAKNLSDAILLSDILRVNTEITKAPLSASMIKRYDEHHQDLTLLKALVRQQLPEKYKEIFFDQSKNGYAGYIDGGASQEEFYKFIKPILEKMDGTEELLVKLNREDLLRKQRTFDNGSIPHQIHLGELHAILRRQEDFYPFLKDNREKIEKILTFRIPYYVGPLARGNSRFAWMTRKSEETITPWNFEEVVDKGASAQSFIERMTNFDKNLPNEKVLPKHSLLYEYFTVYNELTKVKYVTEGMRKPAFLSGEQKKAIVDLLFKTNRKVTVKQLKEDYFKKIECFDSVEISGVEDRFNASLGTYHDLLKIIKDKDFLDNEENEDILEDIVLTLTLFEDREMIEERLKTYAHLFDDKVMKQLKRRRYTGWGRLSRKLINGIRDKQSGKTILDFLKSDGFANRNFMQLIHDDSLTFKEDIQKAQVSGQGDSLHEHIANLAGSPAIKKGILQTVKVVDELVKVMGRHKPENIVIEMARENQTTQKGQKNSRERMKRIEEGIKELGSQILKEHPVENTQLQNEKLYLYYLQNGRDMYVDQELDINRLSDYDVDHIVPQSFLKDDSIDNKVLTRSDKARGKSDNVPSEEVVKKMKNYWRQLLNAKLITQRKFDNLTKAERGGLSELDKAGFIKRQLVETRQITKHVAQILDSRMNTKYDENDKLIREVKVITLKSKLVSDFRKDFQFYKVREINNYHHAHDAYLNAVVGTALIKKYPKLESEFVYGDYKVYDVRKMIAKSEQEIGKATAKYFFYSNIMNFFKTEITLANGEIRKRPLIETNGETGEIVWDKGRDFATVRKVLSMPQVNIVKKTEVQTGGFSKESILPKRNSDKLIARKKDWDPKKYGGFDSPTVAYSVLVVAKVEKGKSKKLKSVKELLGITIMERSSFEKNPIDFLEAKGYKEVKKDLIIKLPKYSLFELENGRKRMLASAGELQKGNELALPSKYVNFLYLASHYEKLKGSPEDNEQKQLFVEQHKHYLDEIIEQISEFSKRVILADANLDKVLSAYNKHRDKPIREQAENIIHLFTLTNLGAPAAFKYFDTTIDRKRYTSTKEVLDATLIHQSITGLYETRIDLSQLGGDGGGGGGSSPAPGGTLNIEDEHRLHETSKEPDVSLGSTWLSDFPQAWAETGGMGLAVRQAPLIIPLKATSTPVSIKQYPMSQEARLGIKPHIQRLLDQGILVPCQSPWNTPLLPVKKPGTNDYRPVQDLREVNKRVEDIHPTVPNPYNLLSGLPPSHQWYTVLDLKDAFFCLRLHPTSQPLFAFEWRDPEMGISGQLTWTRLPQGFKNSPTLFNEALHRDLADFRIQHPDLILLQYVDDLLLAATSELDCQQGTRALLQTLGNLGYRASAKKAQICQKQVKYLGYLLKEGQRWLTEARKETVMGQPTPKTPRQLREFLGKAGFCRLFIPGFAEMAAPLYPLTKPGTLFNWGPDQQKAYQEIKQALLTAPALGLPDLTKPFELFVDEKQGYAKGVLTQKLGPWRRPVAYLSKKLDPVAAGWPPCLRMVAAIAVLTKDAGKLTMGQPLVILAPHAVEALVKQPPDRWLSNARMTHYQALLLDTDRVQFGPVVALNPATLLPLPEEGLQHNCLDILAEAHGTRPDLTDQPLPDADHTWYTDGSSLLQEGQRKAGAAVTTETEVIWAKALPAGTSAQRAELIALTQALKMAEGKKLNVYTDSRYAFATAHIHGEIYRRRGWLTSEGKEIKNKDEILALLKALFLPKRLSIIHCPGHQKGHSAEARGNRMADQAARKAAITETPDTSTLLAGKRTADGSEFEKRTADGSEFESPKKKAKVE

SEQ ID NO: 2849 - protein, 2093 aa, synthetic construct
MPAAKRVKLDGGDKKYSIGLDIGTNSVGWAVITDEYKVPSKKFKVLGNTDRHSIKKNLIGALLFDSGETAEATRLKRTARRRYTRRKNRICYLQEIFSNEMAKVDDSFFHRLEESFLVEEDKKHERHPIFGNIVDEVAYHEKYPTIYHLRKKLVDSTDKADLRLIYLALAHMIKFRGHFLIEGDLNPDNSDVDKLFIQLVQTYNQLFEENPINASGVDAKAILSARLSKSRRLENLIAQLPGEKKNGLFGNLIALSLGLTPNFKSNFDLAEDAKLQLSKDTYDDDLDNLLAQIGDQYADLFLAAKNLSDAILLSDILRVNTEITKAPLSASMIKRYDEHHQDLTLLKALVRQQLPEKYKEIFFDQSKNGYAGYIDGGASQEEFYKFIKPILEKMDGTEELLVKLNREDLLRKQRTFDNGSIPHQIHLGELHAILRRQEDFYPFLKDNREKIEKILTFRIPYYVGPLARGNSRFAWMTRKSEETITPWNFEEVVDKGASAQSFIERMTNFDKNLPNEKVLPKHSLLYEYFTVYNELTKVKYVTEGMRKPAFLSGEQKKAIVDLLFKTNRKVTVKQLKEDYFKKIECFDSVEISGVEDRFNASLGTYHDLLKIIKDKDFLDNEENEDILEDIVLTLTLFEDREMIEERLKTYAHLFDDKVMKQLKRRRYTGWGRLSRKLINGIRDKQSGKTILDFLKSDGFANRNFMQLIHDDSLTFKEDIQKAQVSGQGDSLHEHIANLAGSPAIKKGILQTVKVVDELVKVMGRHKPENIVIEMARENQTTQKGQKNSRERMKRIEEGIKELGSQILKEHPVENTQLQNEKLYLYYLQNGRDMYVDQELDINRLSDYDVDHIVPQSFLKDDSIDNKVLTRSDKARGKSDNVPSEEVVKKMKNYWRQLLNAKLITQRKFDNLTKAERGGLSELDKAGFIKRQLVETRQITKHVAQILDSRMNTKYDENDKLIREVKVITLKSKLVSDFRKDFQFYKVREINNYHHAHDAYLNAVVGTALIKKYPKLESEFVYGDYKVYDVRKMIAKSEQEIGKATAKYFFYSNIMNFFKTEITLANGEIRKRPLIETNGETGEIVWDKGRDFATVRKVLSMPQVNIVKKTEVQTGGFSKESILPKRNSDKLIARKKDWDPKKYGGFDSPTVAYSVLVVAKVEKGKSKKLKSVKELLGITIMERSSFEKNPIDFLEAKGYKEVKKDLIIKLPKYSLFELENGRKRMLASAGELQKGNELALPSKYVNFLYLASHYEKLKGSPEDNEQKQLFVEQHKHYLDEIIEQISEFSKRVILADANLDKVLSAYNKHRDKPIREQAENIIHLFTLTNLGAPAAFKYFDTTIDRKRYTSTKEVLDATLIHQSITGLYETRIDLSQLGGDGGGGSEAAAKGGTLNIEDEHRLHETSKEPDVSLGSTWLSDFPQAWAETGGMGLAVRQAPLIIPLKATSTPVSIKQYPMSQEARLGIKPHIQRLLDQGILVPCQSPWNTPLLPVKKPGTNDYRPVQDLREVNKRVEDIHPTVPNPYNLLSGLPPSHQWYTVLDLKDAFFCLRLHPTSQPLFAFEWRDPEMGISGQLTWTRLPQGFKNSPTLFNEALHRDLADFRIQHPDLILLQYVDDLLLAATSELDCQQGTRALLQTLGNLGYRASAKKAQICQKQVKYLGYLLKEGQRWLTEARKETVMGQPTPKTPRQLREFLGKAGFCRLFIPGFAEMAAPLYPLTKPGTLFNWGPDQQKAYQEIKQALLTAPALGLPDLTKPFELFVDEKQGYAKGVLTQKLGPWRRPVAYLSKKLDPVAAGWPPCLRMVAAIAVLTKDAGKLTMGQPLVILAPHAVEALVKQPPDRWLSNARMTHYQALLLDTDRVQFGPVVALNPATLLPLPEEGLQHNCLDILAEAHGTRPDLTDQPLPDADHTWYTDGSSLLQEGQRKAGAAVTTETEVIWAKALPAGTSAQRAELIALTQALKMAEGKKLNVYTDSRYAFATAHIHGEIYRRRGWLTSEGKEIKNKDEILALLKALFLPKRLSIIHCPGHQKGHSAEARGNRMADQAARKAAITETPDTSTLLAGKRTADGSEFEKRTADGSEFESPKKKAKVE

SEQ ID NO: 2850 - protein, 2093 aa, synthetic construct
MPAAKRVKLDGGDKKYSIGLDIGTNSVGWAVITDEYKVPSKKFKVLGNTDRHSIKKNLIGALLFDSGETAEATRLKRTARRRYTRRKNRICYLQEIFSNEMAKVDDSFFHRLEESFLVEEDKKHERHPIFGNIVDEVAYHEKYPTIYHLRKKLVDSTDKADLRLIYLALAHMIKFRGHFLIEGDLNPDNSDVDKLFIQLVQTYNQLFEENPINASGVDAKAILSARLSKSRRLENLIAQLPGEKKNGLFGNLIALSLGLTPNFKSNFDLAEDAKLQLSKDTYDDDLDNLLAQIGDQYADLFLAAKNLSDAILLSDILRVNTEITKAPLSASMIKRYDEHHQDLTLLKALVRQQLPEKYKEIFFDQSKNGYAGYIDGGASQEEFYKFIKPILEKMDGTEELLVKLNREDLLRKQRTFDNGSIPHQIHLGELHAILRRQEDFYPFLKDNREKIEKILTFRIPYYVGPLARGNSRFAWMTRKSEETITPWNFEEVVDKGASAQSFIERMTNFDKNLPNEKVLPKHSLLYEYFTVYNELTKVKYVTEGMRKPAFLSGEQKKAIVDLLFKTNRKVTVKQLKEDYFKKIECFDSVEISGVEDRFNASLGTYHDLLKIIKDKDFLDNEENEDILEDIVLTLTLFEDREMIEERLKTYAHLFDDKVMKQLKRRRYTGWGRLSRKLINGIRDKQSGKTILDFLKSDGFANRNFMQLIHDDSLTFKEDIQKAQVSGQGDSLHEHIANLAGSPAIKKGILQTVKVVDELVKVMGRHKPENIVIEMARENQTTQKGQKNSRERMKRIEEGIKELGSQILKEHPVENTQLQNEKLYLYYLQNGRDMYVDQELDINRLSDYDVDHIVPQSFLKDDSIDNKVLTRSDKARGKSDNVPSEEVVKKMKNYWRQLLNAKLITQRKFDNLTKAERGGLSELDKAGFIKRQLVETRQITKHVAQILDSRMNTKYDENDKLIREVKVITLKSKLVSDFRKDFQFYKVREINNYHHAHDAYLNAVVGTALIKKYPKLESEFVYGDYKVYDVRKMIAKSEQEIGKATAKYFFYSNIMNFFKTEITLANGEIRKRPLIETNGETGEIVWDKGRDFATVRKVLSMPQVNIVKKTEVQTGGFSKESILPKRNSDKLIARKKDWDPKKYGGFDSPTVAYSVLVVAKVEKGKSKKLKSVKELLGITIMERSSFEKNPIDFLEAKGYKEVKKDLIIKLPKYSLFELENGRKRMLASAGELQKGNELALPSKYVNFLYLASHYEKLKGSPEDNEQKQLFVEQHKHYLDEIIEQISEFSKRVILADANLDKVLSAYNKHRDKPIREQAENIIHLFTLTNLGAPAAFKYFDTTIDRKRYTSTKEVLDATLIHQSITGLYETRIDLSQLGGDGGEAAAKPAPGGTLNIEDEHRLHETSKEPDVSLGSTWLSDFPQAWAETGGMGLAVRQAPLIIPLKATSTPVSIKQYPMSQEARLGIKPHIQRLLDQGILVPCQSPWNTPLLPVKKPGTNDYRPVQDLREVNKRVEDIHPTVPNPYNLLSGLPPSHQWYTVLDLKDAFFCLRLHPTSQPLFAFEWRDPEMGISGQLTWTRLPQGFKNSPTLFNEALHRDLADFRIQHPDLILLQYVDDLLLAATSELDCQQGTRALLQTLGNLGYRASAKKAQICQKQVKYLGYLLKEGQRWLTEARKETVMGQPTPKTPRQLREFLGKAGFCRLFIPGFAEMAAPLYPLTKPGTLFNWGPDQQKAYQEIKQALLTAPALGLPDLTKPFELFVDEKQGYAKGVLTQKLGPWRRPVAYLSKKLDPVAAGWPPCLRMVAAIAVLTKDAGKLTMGQPLVILAPHAVEALVKQPPDRWLSNARMTHYQALLLDTDRVQFGPVVALNPATLLPLPEEGLQHNCLDILAEAHGTRPDLTDQPLPDADHTWYTDGSSLLQEGQRKAGAAVTTETEVIWAKALPAGTSAQRAELIALTQALKMAEGKKLNVYTDSRYAFATAHIHGEIYRRRGWLTSEGKEIKNKDEILALLKALFLPKRLSIIHCPGHQKGHSAEARGNRMADQAARKAAITETPDTSTLLAGKRTADGSEFEKRTADGSEFESPKKKAKVE

SEQ ID NO: 2851 - protein, 2096 aa, synthetic construct
MPAAKRVKLDGGDKKYSIGLDIGTNSVGWAVITDEYKVPSKKFKVLGNTDRHSIKKNLIGALLFDSGETAEATRLKRTARRRYTRRKNRICYLQEIFSNEMAKVDDSFFHRLEESFLVEEDKKHERHPIFGNIVDEVAYHEKYPTIYHLRKKLVDSTDKADLRLIYLALAHMIKFRGHFLIEGDLNPDNSDVDKLFIQLVQTYNQLFEENPINASGVDAKAILSARLSKSRRLENLIAQLPGEKKNGLFGNLIALSLGLTPNFKSNFDLAEDAKLQLSKDTYDDDLDNLLAQIGDQYADLFLAAKNLSDAILLSDILRVNTEITKAPLSASMIKRYDEHHQDLTLLKALVRQQLPEKYKEIFFDQSKNGYAGYIDGGASQEEFYKFIKPILEKMDGTEELLVKLNREDLLRKQRTFDNGSIPHQIHLGELHAILRRQEDFYPFLKDNREKIEKILTFRIPYYVGPLARGNSRFAWMTRKSEETITPWNFEEVVDKGASAQSFIERMTNFDKNLPNEKVLPKHSLLYEYFTVYNELTKVKYVTEGMRKPAFLSGEQKKAIVDLLFKTNRKVTVKQLKEDYFKKIECFDSVEISGVEDRFNASLGTYHDLLKIIKDKDFLDNEENEDILEDIVLTLTLFEDREMIEERLKTYAHLFDDKVMKQLKRRRYTGWGRLSRKLINGIRDKQSGKTILDFLKSDGFANRNFMQLIHDDSLTFKEDIQKAQVSGQGDSLHEHIANLAGSPAIKKGILQTVKVVDELVKVMGRHKPENIVIEMARENQTTQKGQKNSRERMKRIEEGIKELGSQILKEHPVENTQLQNEKLYLYYLQNGRDMYVDQELDINRLSDYDVDHIVPQSFLKDDSIDNKVLTRSDKARGKSDNVPSEEVVKKMKNYWRQLLNAKLITQRKFDNLTKAERGGLSELDKAGFIKRQLVETRQITKHVAQILDSRMNTKYDENDKLIREVKVITLKSKLVSDFRKDFQFYKVREINNYHHAHDAYLNAVVGTALIKKYPKLESEFVYGDYKVYDVRKMIAKSEQEIGKATAKYFFYSNIMNFFKTEITLANGEIRKRPLIETNGETGEIVWDKGRDFATVRKVLSMPQVNIVKKTEVQTGGFSKESILPKRNSDKLIARKKDWDPKKYGGFDSPTVAYSVLVVAKVEKGKSKKLKSVKELLGITIMERSSFEKNPIDFLEAKGYKEVKKDLIIKLPKYSLFELENGRKRMLASAGELQKGNELALPSKYVNFLYLASHYEKLKGSPEDNEQKQLFVEQHKHYLDEIIEQISEFSKRVILADANLDKVLSAYNKHRDKPIREQAENIIHLFTLTNLGAPAAFKYFDTTIDRKRYTSTKEVLDATLIHQSITGLYETRIDLSQLGGDGGPAPAPAPAPAPGGTLNIEDEHRLHETSKEPDVSLGSTWLSDFPQAWAETGGMGLAVRQAPLIIPLKATSTPVSIKQYPMSQEARLGIKPHIQRLLDQGILVPCQSPWNTPLLPVKKPGTNDYRPVQDLREVNKRVEDIHPTVPNPYNLLSGLPPSHQWYTVLDLKDAFFCLRLHPTSQPLFAFEWRDPEMGISGQLTWTRLPQGFKNSPTLFNEALHRDLADFRIQHPDLILLQYVDDLLLAATSELDCQQGTRALLQTLGNLGYRASAKKAQICQKQVKYLGYLLKEGQRWLTEARKETVMGQPTPKTPRQLREFLGKAGFCRLFIPGFAEMAAPLYPLTKPGTLFNWGPDQQKAYQEIKQALLTAPALGLPDLTKPFELFVDEKQGYAKGVLTQKLGPWRRPVAYLSKKLDPVAAGWPPCLRMVAAIAVLTKDAGKLTMGQPLVILAPHAVEALVKQPPDRWLSNARMTHYQALLLDTDRVQFGPVVALNPATLLPLPEEGLQHNCLDILAEAHGTRPDLTDQPLPDADHTWYTDGSSLLQEGQRKAGAAVTTETEVIWAKALPAGTSAQRAELIALTQALKMAEGKKLNVYTDSRYAFATAHIHGEIYRRRGWLTSEGKEIKNKDEILALLKALFLPKRLSIIHCPGHQKGHSAEARGNRMADQAARKAAITETPDTSTLLAGKRTADGSEFEKRTADGSEFESPKKKAKVE

SEQ ID NO: 2852 - protein, 2094 aa, synthetic construct
MPAAKRVKLDGGDKKYSIGLDIGTNSVGWAVITDEYKVPSKKFKVLGNTDRHSIKKNLIGALLFDSGETAEATRLKRTARRRYTRRKNRICYLQEIFSNEMAKVDDSFFHRLEESFLVEEDKKHERHPIFGNIVDEVAYHEKYPTIYHLRKKLVDSTDKADLRLIYLALAHMIKFRGHFLIEGDLNPDNSDVDKLFIQLVQTYNQLFEENPINASGVDAKAILSARLSKSRRLENLIAQLPGEKKNGLFGNLIALSLGLTPNFKSNFDLAEDAKLQLSKDTYDDDLDNLLAQIGDQYADLFLAAKNLSDAILLSDILRVNTEITKAPLSASMIKRYDEHHQDLTLLKALVRQQLPEKYKEIFFDQSKNGYAGYIDGGASQEEFYKFIKPILEKMDGTEELLVKLNREDLLRKQRTFDNGSIPHQIHLGELHAILRRQEDFYPFLKDNREKIEKILTFRIPYYVGPLARGNSRFAWMTRKSEETITPWNFEEVVDKGASAQSFIERMTNFDKNLPNEKVLPKHSLLYEYFTVYNELTKVKYVTEGMRKPAFLSGEQKKAIVDLLFKTNRKVTVKQLKEDYFKKIECFDSVEISGVEDRFNASLGTYHDLLKIIKDKDFLDNEENEDILEDIVLTLTLFEDREMIEERLKTYAHLFDDKVMKQLKRRRYTGWGRLSRKLINGIRDKQSGKTILDFLKSDGFANRNFMQLIHDDSLTFKEDIQKAQVSGQGDSLHEHIANLAGSPAIKKGILQTVKVVDELVKVMGRHKPENIVIEMARENQTTQKGQKNSRERMKRIEEGIKELGSQILKEHPVENTQLQNEKLYLYYLQNGRDMYVDQELDINRLSDYDVDHIVPQSFLKDDSIDNKVLTRSDKARGKSDNVPSEEVVKKMKNYWRQLLNAKLITQRKFDNLTKAERGGLSELDKAGFIKRQLVETRQITKHVAQILDSRMNTKYDENDKLIREVKVITLKSKLVSDFRKDFQFYKVREINNYHHAHDAYLNAVVGTALIKKYPKLESEFVYGDYKVYDVRKMIAKSEQEIGKATAKYFFYSNIMNFFKTEITLANGEIRKRPLIETNGETGEIVWDKGRDFATVRKVLSMPQVNIVKKTEVQTGGFSKESILPKRNSDKLIARKKDWDPKKYGGFDSPTVAYSVLVVAKVEKGKSKKLKSVKELLGITIMERSSFEKNPIDFLEAKGYKEVKKDLIIKLPKYSLFELENGRKRMLASAGELQKGNELALPSKYVNFLYLASHYEKLKGSPEDNEQKQLFVEQHKHYLDEIIEQISEFSKRVILADANLDKVLSAYNKHRDKPIREQAENIIHLFTLTNLGAPAAFKYFDTTIDRKRYTSTKEVLDATLIHQSITGLYETRIDLSQLGGDGGGGSPAPGSSGGTLNIEDEHRLHETSKEPDVSLGSTWLSDFPQAWAETGGMGLAVRQAPLIIPLKATSTPVSIKQYPMSQEARLGIKPHIQRLLDQGILVPCQSPWNTPLLPVKKPGTNDYRPVQDLREVNKRVEDIHPTVPNPYNLLSGLPPSHQWYTVLDLKDAFFCLRLHPTSQPLFAFEWRDPEMGISGQLTWTRLPQGFKNSPTLFNEALHRDLADFRIQHPDLILLQYVDDLLLAATSELDCQQGTRALLQTLGNLGYRASAKKAQICQKQVKYLGYLLKEGQRWLTEARKETVMGQPTPKTPRQLREFLGKAGFCRLFIPGFAEMAAPLYPLTKPGTLFNWGPDQQKAYQEIKQALLTAPALGLPDLTKPFELFVDEKQGYAKGVLTQKLGPWRRPVAYLSKKLDPVAAGWPPCLRMVAAIAVLTKDAGKLTMGQPLVILAPHAVEALVKQPPDRWLSNARMTHYQALLLDTDRVQFGPVVALNPATLLPLPEEGLQHNCLDILAEAHGTRPDLTDQPLPDADHTWYTDGSSLLQEGQRKAGAAVTTETEVIWAKALPAGTSAQRAELIALTQALKMAEGKKLNVYTDSRYAFATAHIHGEIYRRRGWLTSEGKEIKNKDEILALLKALFLPKRLSIIHCPGHQKGHSAEARGNRMADQAARKAAITETPDTSTLLAGKRTADGSEFEKRTADGSEFESPKKKAKVE

SEQ ID NO: 2853 - protein, 2091 aa, synthetic construct
MPAAKRVKLDGGDKKYSIGLDIGTNSVGWAVITDEYKVPSKKFKVLGNTDRHSIKKNLIGALLFDSGETAEATRLKRTARRRYTRRKNRICYLQEIFSNEMAKVDDSFFHRLEESFLVEEDKKHERHPIFGNIVDEVAYHEKYPTIYHLRKKLVDSTDKADLRLIYLALAHMIKFRGHFLIEGDLNPDNSDVDKLFIQLVQTYNQLFEENPINASGVDAKAILSARLSKSRRLENLIAQLPGEKKNGLFGNLIALSLGLTPNFKSNFDLAEDAKLQLSKDTYDDDLDNLLAQIGDQYADLFLAAKNLSDAILLSDILRVNTEITKAPLSASMIKRYDEHHQDLTLLKALVRQQLPEKYKEIFFDQSKNGYAGYIDGGASQEEFYKFIKPILEKMDGTEELLVKLNREDLLRKQRTFDNGSIPHQIHLGELHAILRRQEDFYPFLKDNREKIEKILTFRIPYYVGPLARGNSRFAWMTRKSEETITPWNFEEVVDKGASAQSFIERMTNFDKNLPNEKVLPKHSLLYEYFTVYNELTKVKYVTEGMRKPAFLSGEQKKAIVDLLFKTNRKVTVKQLKEDYFKKIECFDSVEISGVEDRFNASLGTYHDLLKIIKDKDFLDNEENEDILEDIVLTLTLFEDREMIEERLKTYAHLFDDKVMKQLKRRRYTGWGRLSRKLINGIRDKQSGKTILDFLKSDGFANRNFMQLIHDDSLTFKEDIQKAQVSGQGDSLHEHIANLAGSPAIKKGILQTVKVVDELVKVMGRHKPENIVIEMARENQTTQKGQKNSRERMKRIEEGIKELGSQILKEHPVENTQLQNEKLYLYYLQNGRDMYVDQELDINRLSDYDVDHIVPQSFLKDDSIDNKVLTRSDKARGKSDNVPSEEVVKKMKNYWRQLLNAKLITQRKFDNLTKAERGGLSELDKAGFIKRQLVETRQITKHVAQILDSRMNTKYDENDKLIREVKVITLKSKLVSDFRKDFQFYKVREINNYHHAHDAYLNAVVGTALIKKYPKLESEFVYGDYKVYDVRKMIAKSEQEIGKATAKYFFYSNIMNFFKTEITLANGEIRKRPLIETNGETGEIVWDKGRDFATVRKVLSMPQVNIVKKTEVQTGGFSKESILPKRNSDKLIARKKDWDPKKYGGFDSPTVAYSVLVVAKVEKGKSKKLKSVKELLGITIMERSSFEKNPIDFLEAKGYKEVKKDLIIKLPKYSLFELENGRKRMLASAGELQKGNELALPSKYVNFLYLASHYEKLKGSPEDNEQKQLFVEQHKHYLDEIIEQISEFSKRVILADANLDKVLSAYNKHRDKPIREQAENIIHLFTLTNLGAPAAFKYFDTTIDRKRYTSTKEVLDATLIHQSITGLYETRIDLSQLGGDGGGGSGGSGGTLNIEDEHRLHETSKEPDVSLGSTWLSDFPQAWAETGGMGLAVRQAPLIIPLKATSTPVSIKQYPMSQEARLGIKPHIQRLLDQGILVPCQSPWNTPLLPVKKPGTNDYRPVQDLREVNKRVEDIHPTVPNPYNLLSGLPPSHQWYTVLDLKDAFFCLRLHPTSQPLFAFEWRDPEMGISGQLTWTRLPQGFKNSPTLFNEALHRDLADFRIQHPDLILLQYVDDLLLAATSELDCQQGTRALLQTLGNLGYRASAKKAQICQKQVKYLGYLLKEGQRWLTEARKETVMGQPTPKTPRQLREFLGKAGFCRLFIPGFAEMAAPLYPLTKPGTLFNWGPDQQKAYQEIKQALLTAPALGLPDLTKPFELFVDEKQGYAKGVLTQKLGPWRRPVAYLSKKLDPVAAGWPPCLRMVAAIAVLTKDAGKLTMGQPLVILAPHAVEALVKQPPDRWLSNARMTHYQALLLDTDRVQFGPVVALNPATLLPLPEEGLQHNCLDILAEAHGTRPDLTDQPLPDADHTWYTDGSSLLQEGQRKAGAAVTTETEVIWAKALPAGTSAQRAELIALTQALKMAEGKKLNVYTDSRYAFATAHIHGEIYRRRGWLTSEGKEIKNKDEILALLKALFLPKRLSIIHCPGHQKGHSAEARGNRMADQAARKAAITETPDTSTLLAGKRTADGSEFEKRTADGSEFESPKKKAKVE

SEQ ID NO: 2854 - protein, 2094 aa, synthetic construct
MPAAKRVKLDGGDKKYSIGLDIGTNSVGWAVITDEYKVPSKKFKVLGNTDRHSIKKNLIGALLFDSGETAEATRLKRTARRRYTRRKNRICYLQEIFSNEMAKVDDSFFHRLEESFLVEEDKKHERHPIFGNIVDEVAYHEKYPTIYHLRKKLVDSTDKADLRLIYLALAHMIKFRGHFLIEGDLNPDNSDVDKLFIQLVQTYNQLFEENPINASGVDAKAILSARLSKSRRLENLIAQLPGEKKNGLFGNLIALSLGLTPNFKSNFDLAEDAKLQLSKDTYDDDLDNLLAQIGDQYADLFLAAKNLSDAILLSDILRVNTEITKAPLSASMIKRYDEHHQDLTLLKALVRQQLPEKYKEIFFDQSKNGYAGYIDGGASQEEFYKFIKPILEKMDGTEELLVKLNREDLLRKQRTFDNGSIPHQIHLGELHAILRRQEDFYPFLKDNREKIEKILTFRIPYYVGPLARGNSRFAWMTRKSEETITPWNFEEVVDKGASAQSFIERMTNFDKNLPNEKVLPKHSLLYEYFTVYNELTKVKYVTEGMRKPAFLSGEQKKAIVDLLFKTNRKVTVKQLKEDYFKKIECFDSVEISGVEDRFNASLGTYHDLLKIIKDKDFLDNEENEDILEDIVLTLTLFEDREMIEERLKTYAHLFDDKVMKQLKRRRYTGWGRLSRKLINGIRDKQSGKTILDFLKSDGFANRNFMQLIHDDSLTFKEDIQKAQVSGQGDSLHEHIANLAGSPAIKKGILQTVKVVDELVKVMGRHKPENIVIEMARENQTTQKGQKNSRERMKRIEEGIKELGSQILKEHPVENTQLQNEKLYLYYLQNGRDMYVDQELDINRLSDYDVDHIVPQSFLKDDSIDNKVLTRSDKARGKSDNVPSEEVVKKMKNYWRQLLNAKLITQRKFDNLTKAERGGLSELDKAGFIKRQLVETRQITKHVAQILDSRMNTKYDENDKLIREVKVITLKSKLVSDFRKDFQFYKVREINNYHHAHDAYLNAVVGTALIKKYPKLESEFVYGDYKVYDVRKMIAKSEQEIGKATAKYFFYSNIMNFFKTEITLANGEIRKRPLIETNGETGEIVWDKGRDFATVRKVLSMPQVNIVKKTEVQTGGFSKESILPKRNSDKLIARKKDWDPKKYGGFDSPTVAYSVLVVAKVEKGKSKKLKSVKELLGITIMERSSFEKNPIDFLEAKGYKEVKKDLIIKLPKYSLFELENGRKRMLASAGELQKGNELALPSKYVNFLYLASHYEKLKGSPEDNEQKQLFVEQHKHYLDEIIEQISEFSKRVILADANLDKVLSAYNKHRDKPIREQAENIIHLFTLTNLGAPAAFKYFDTTIDRKRYTSTKEVLDATLIHQSITGLYETRIDLSQLGGDGGGGGGSSGGSGGTLNIEDEHRLHETSKEPDVSLGSTWLSDFPQAWAETGGMGLAVRQAPLIIPLKATSTPVSIKQYPMSQEARLGIKPHIQRLLDQGILVPCQSPWNTPLLPVKKPGTNDYRPVQDLREVNKRVEDIHPTVPNPYNLLSGLPPSHQWYTVLDLKDAFFCLRLHPTSQPLFAFEWRDPEMGISGQLTWTRLPQGFKNSPTLFNEALHRDLADFRIQHPDLILLQYVDDLLLAATSELDCQQGTRALLQTLGNLGYRASAKKAQICQKQVKYLGYLLKEGQRWLTEARKETVMGQPTPKTPRQLREFLGKAGFCRLFIPGFAEMAAPLYPLTKPGTLFNWGPDQQKAYQEIKQALLTAPALGLPDLTKPFELFVDEKQGYAKGVLTQKLGPWRRPVAYLSKKLDPVAAGWPPCLRMVAAIAVLTKDAGKLTMGQPLVILAPHAVEALVKQPPDRWLSNARMTHYQALLLDTDRVQFGPVVALNPATLLPLPEEGLQHNCLDILAEAHGTRPDLTDQPLPDADHTWYTDGSSLLQEGQRKAGAAVTTETEVIWAKALPAGTSAQRAELIALTQALKMAEGKKLNVYTDSRYAFATAHIHGEIYRRRGWLTSEGKEIKNKDEILALLKALFLPKRLSIIHCPGHQKGHSAEARGNRMADQAARKAAITETPDTSTLLAGKRTADGSEFEKRTADGSEFESPKKKAKVE

SEQ ID NO: 2855 - protein, 2091 aa, synthetic construct
MPAAKRVKLDGGDKKYSIGLDIGTNSVGWAVITDEYKVPSKKFKVLGNTDRHSIKKNLIGALLFDSGETAEATRLKRTARRRYTRRKNRICYLQEIFSNEMAKVDDSFFHRLEESFLVEEDKKHERHPIFGNIVDEVAYHEKYPTIYHLRKKLVDSTDKADLRLIYLALAHMIKFRGHFLIEGDLNPDNSDVDKLFIQLVQTYNQLFEENPINASGVDAKAILSARLSKSRRLENLIAQLPGEKKNGLFGNLIALSLGLTPNFKSNFDLAEDAKLQLSKDTYDDDLDNLLAQIGDQYADLFLAAKNLSDAILLSDILRVNTEITKAPLSASMIKRYDEHHQDLTLLKALVRQQLPEKYKEIFFDQSKNGYAGYIDGGASQEEFYKFIKPILEKMDGTEELLVKLNREDLLRKQRTFDNGSIPHQIHLGELHAILRRQEDFYPFLKDNREKIEKILTFRIPYYVGPLARGNSRFAWMTRKSEETITPWNFEEVVDKGASAQSFIERMTNFDKNLPNEKVLPKHSLLYEYFTVYNELTKVKYVTEGMRKPAFLSGEQKKAIVDLLFKTNRKVTVKQLKEDYFKKIECFDSVEISGVEDRFNASLGTYHDLLKIIKDKDFLDNEENEDILEDIVLTLTLFEDREMIEERLKTYAHLFDDKVMKQLKRRRYTGWGRLSRKLINGIRDKQSGKTILDFLKSDGFANRNFMQLIHDDSLTFKEDIQKAQVSGQGDSLHEHIANLAGSPAIKKGILQTVKVVDELVKVMGRHKPENIVIEMARENQTTQKGQKNSRERMKRIEEGIKELGSQILKEHPVENTQLQNEKLYLYYLQNGRDMYVDQELDINRLSDYDVDHIVPQSFLKDDSIDNKVLTRSDKARGKSDNVPSEEVVKKMKNYWRQLLNAKLITQRKFDNLTKAERGGLSELDKAGFIKRQLVETRQITKHVAQILDSRMNTKYDENDKLIREVKVITLKSKLVSDFRKDFQFYKVREINNYHHAHDAYLNAVVGTALIKKYPKLESEFVYGDYKVYDVRKMIAKSEQEIGKATAKYFFYSNIMNFFKTEITLANGEIRKRPLIETNGETGEIVWDKGRDFATVRKVLSMPQVNIVKKTEVQTGGFSKESILPKRNSDKLIARKKDWDPKKYGGFDSPTVAYSVLVVAKVEKGKSKKLKSVKELLGITIMERSSFEKNPIDFLEAKGYKEVKKDLIIKLPKYSLFELENGRKRMLASAGELQKGNELALPSKYVNFLYLASHYEKLKGSPEDNEQKQLFVEQHKHYLDEIIEQISEFSKRVILADANLDKVLSAYNKHRDKPIREQAENIIHLFTLTNLGAPAAFKYFDTTIDRKRYTSTKEVLDATLIHQSITGLYETRIDLSQLGGDGGGSSGGSGGTLNIEDEHRLHETSKEPDVSLGSTWLSDFPQAWAETGGMGLAVRQAPLIIPLKATSTPVSIKQYPMSQEARLGIKPHIQRLLDQGILVPCQSPWNTPLLPVKKPGTNDYRPVQDLREVNKRVEDIHPTVPNPYNLLSGLPPSHQWYTVLDLKDAFFCLRLHPTSQPLFAFEWRDPEMGISGQLTWTRLPQGFKNSPTLFNEALHRDLADFRIQHPDLILLQYVDDLLLAATSELDCQQGTRALLQTLGNLGYRASAKKAQICQKQVKYLGYLLKEGQRWLTEARKETVMGQPTPKTPRQLREFLGKAGFCRLFIPGFAEMAAPLYPLTKPGTLFNWGPDQQKAYQEIKQALLTAPALGLPDLTKPFELFVDEKQGYAKGVLTQKLGPWRRPVAYLSKKLDPVAAGWPPCLRMVAAIAVLTKDAGKLTMGQPLVILAPHAVEALVKQPPDRWLSNARMTHYQALLLDTDRVQFGPVVALNPATLLPLPEEGLQHNCLDILAEAHGTRPDLTDQPLPDADHTWYTDGSSLLQEGQRKAGAAVTTETEVIWAKALPAGTSAQRAELIALTQALKMAEGKKLNVYTDSRYAFATAHIHGEIYRRRGWLTSEGKEIKNKDEILALLKALFLPKRLSIIHCPGHQKGHSAEARGNRMADQAARKAAITETPDTSTLLAGKRTADGSEFEKRTADGSEFESPKKKAKVE

SEQ ID NO: 2856 - protein, 2093 aa, synthetic construct
MPAAKRVKLDGGDKKYSIGLDIGTNSVGWAVITDEYKVPSKKFKVLGNTDRHSIKKNLIGALLFDSGETAEATRLKRTARRRYTRRKNRICYLQEIFSNEMAKVDDSFFHRLEESFLVEEDKKHERHPIFGNIVDEVAYHEKYPTIYHLRKKLVDSTDKADLRLIYLALAHMIKFRGHFLIEGDLNPDNSDVDKLFIQLVQTYNQLFEENPINASGVDAKAILSARLSKSRRLENLIAQLPGEKKNGLFGNLIALSLGLTPNFKSNFDLAEDAKLQLSKDTYDDDLDNLLAQIGDQYADLFLAAKNLSDAILLSDILRVNTEITKAPLSASMIKRYDEHHQDLTLLKALVRQQLPEKYKEIFFDQSKNGYAGYIDGGASQEEFYKFIKPILEKMDGTEELLVKLNREDLLRKQRTFDNGSIPHQIHLGELHAILRRQEDFYPFLKDNREKIEKILTFRIPYYVGPLARGNSRFAWMTRKSEETITPWNFEEVVDKGASAQSFIERMTNFDKNLPNEKVLPKHSLLYEYFTVYNELTKVKYVTEGMRKPAFLSGEQKKAIVDLLFKTNRKVTVKQLKEDYFKKIECFDSVEISGVEDRFNASLGTYHDLLKIIKDKDFLDNEENEDILEDIVLTLTLFEDREMIEERLKTYAHLFDDKVMKQLKRRRYTGWGRLSRKLINGIRDKQSGKTILDFLKSDGFANRNFMQLIHDDSLTFKEDIQKAQVSGQGDSLHEHIANLAGSPAIKKGILQTVKVVDELVKVMGRHKPENIVIEMARENQTTQKGQKNSRERMKRIEEGIKELGSQILKEHPVENTQLQNEKLYLYYLQNGRDMYVDQELDINRLSDYDVDHIVPQSFLKDDSIDNKVLTRSDKARGKSDNVPSEEVVKKMKNYWRQLLNAKLITQRKFDNLTKAERGGLSELDKAGFIKRQLVETRQITKHVAQILDSRMNTKYDENDKLIREVKVITLKSKLVSDFRKDFQFYKVREINNYHHAHDAYLNAVVGTALIKKYPKLESEFVYGDYKVYDVRKMIAKSEQEIGKATAKYFFYSNIMNFFKTEITLANGEIRKRPLIETNGETGEIVWDKGRDFATVRKVLSMPQVNIVKKTEVQTGGFSKESILPKRNSDKLIARKKDWDPKKYGGFDSPTVAYSVLVVAKVEKGKSKKLKSVKELLGITIMERSSFEKNPIDFLEAKGYKEVKKDLIIKLPKYSLFELENGRKRMLASAGELQKGNELALPSKYVNFLYLASHYEKLKGSPEDNEQKQLFVEQHKHYLDEIIEQISEFSKRVILADANLDKVLSAYNKHRDKPIREQAENIIHLFTLTNLGAPAAFKYFDTTIDRKRYTSTKEVLDATLIHQSITGLYETRIDLSQLGGDGGGGGEAAAKGGTLNIEDEHRLHETSKEPDVSLGSTWLSDFPQAWAETGGMGLAVRQAPLIIPLKATSTPVSIKQYPMSQEARLGIKPHIQRLLDQGILVPCQSPWNTPLLPVKKPGTNDYRPVQDLREVNKRVEDIHPTVPNPYNLLSGLPPSHQWYTVLDLKDAFFCLRLHPTSQPLFAFEWRDPEMGISGQLTWTRLPQGFKNSPTLFNEALHRDLADFRIQHPDLILLQYVDDLLLAATSELDCQQGTRALLQTLGNLGYRASAKKAQICQKQVKYLGYLLKEGQRWLTEARKETVMGQPTPKTPRQLREFLGKAGFCRLFIPGFAEMAAPLYPLTKPGTLFNWGPDQQKAYQEIKQALLTAPALGLPDLTKPFELFVDEKQGYAKGVLTQKLGPWRRPVAYLSKKLDPVAAGWPPCLRMVAAIAVLTKDAGKLTMGQPLVILAPHAVEALVKQPPDRWLSNARMTHYQALLLDTDRVQFGPVVALNPATLLPLPEEGLQHNCLDILAEAHGTRPDLTDQPLPDADHTWYTDGSSLLQEGQRKAGAAVTTETEVIWAKALPAGTSAQRAELIALTQALKMAEGKKLNVYTDSRYAFATAHIHGEIYRRRGWLTSEGKEIKNKDEILALLKALFLPKRLSIIHCPGHQKGHSAEARGNRMADQAARKAAITETPDTSTLLAGKRTADGSEFEKRTADGSEFESPKKKAKVE

SEQ ID NO: 2857 - protein, 2096 aa, synthetic construct
MPAAKRVKLDGGDKKYSIGLDIGTNSVGWAVITDEYKVPSKKFKVLGNTDRHSIKKNLIGALLFDSGETAEATRLKRTARRRYTRRKNRICYLQEIFSNEMAKVDDSFFHRLEESFLVEEDKKHERHPIFGNIVDEVAYHEKYPTIYHLRKKLVDSTDKADLRLIYLALAHMIKFRGHFLIEGDLNPDNSDVDKLFIQLVQTYNQLFEENPINASGVDAKAILSARLSKSRRLENLIAQLPGEKKNGLFGNLIALSLGLTPNFKSNFDLAEDAKLQLSKDTYDDDLDNLLAQIGDQYADLFLAAKNLSDAILLSDILRVNTEITKAPLSASMIKRYDEHHQDLTLLKALVRQQLPEKYKEIFFDQSKNGYAGYIDGGASQEEFYKFIKPILEKMDGTEELLVKLNREDLLRKQRTFDNGSIPHQIHLGELHAILRRQEDFYPFLKDNREKIEKILTFRIPYYVGPLARGNSRFAWMTRKSEETITPWNFEEVVDKGASAQSFIERMTNFDKNLPNEKVLPKHSLLYEYFTVYNELTKVKYVTEGMRKPAFLSGEQKKAIVDLLFKTNRKVTVKQLKEDYFKKIECFDSVEISGVEDRFNASLGTYHDLLKIIKDKDFLDNEENEDILEDIVLTLTLFEDREMIEERLKTYAHLFDDKVMKQLKRRRYTGWGRLSRKLINGIRDKQSGKTILDFLKSDGFANRNFMQLIHDDSLTFKEDIQKAQVSGQGDSLHEHIANLAGSPAIKKGILQTVKVVDELVKVMGRHKPENIVIEMARENQTTQKGQKNSRERMKRIEEGIKELGSQILKEHPVENTQLQNEKLYLYYLQNGRDMYVDQELDINRLSDYDVDHIVPQSFLKDDSIDNKVLTRSDKARGKSDNVPSEEVVKKMKNYWRQLLNAKLITQRKFDNLTKAERGGLSELDKAGFIKRQLVETRQITKHVAQILDSRMNTKYDENDKLIREVKVITLKSKLVSDFRKDFQFYKVREINNYHHAHDAYLNAVVGTALIKKYPKLESEFVYGDYKVYDVRKMIAKSEQEIGKATAKYFFYSNIMNFFKTEITLANGEIRKRPLIETNGETGEIVWDKGRDFATVRKVLSMPQVNIVKKTEVQTGGFSKESILPKRNSDKLIARKKDWDPKKYGGFDSPTVAYSVLVVAKVEKGKSKKLKSVKELLGITIMERSSFEKNPIDFLEAKGYKEVKKDLIIKLPKYSLFELENGRKRMLASAGELQKGNELALPSKYVNFLYLASHYEKLKGSPEDNEQKQLFVEQHKHYLDEIIEQISEFSKRVILADANLDKVLSAYNKHRDKPIREQAENIIHLFTLTNLGAPAAFKYFDTTIDRKRYTSTKEVLDATLIHQSITGLYETRIDLSQLGGDGGGGSEAAAKPAPGGTLNIEDEHRLHETSKEPDVSLGSTWLSDFPQAWAETGGMGLAVRQAPLIIPLKATSTPVSIKQYPMSQEARLGIKPHIQRLLDQGILVPCQSPWNTPLLPVKKPGTNDYRPVQDLREVNKRVEDIHPTVPNPYNLLSGLPPSHQWYTVLDLKDAFFCLRLHPTSQPLFAFEWRDPEMGISGQLTWTRLPQGFKNSPTLFNEALHRDLADFRIQHPDLILLQYVDDLLLAATSELDCQQGTRALLQTLGNLGYRASAKKAQICQKQVKYLGYLLKEGQRWLTEARKETVMGQPTPKTPRQLREFLGKAGFCRLFIPGFAEMAAPLYPLTKPGTLFNWGPDQQKAYQEIKQALLTAPALGLPDLTKPFELFVDEKQGYAKGVLTQKLGPWRRPVAYLSKKLDPVAAGWPPCLRMVAAIAVLTKDAGKLTMGQPLVILAPHAVEALVKQPPDRWLSNARMTHYQALLLDTDRVQFGPVVALNPATLLPLPEEGLQHNCLDILAEAHGTRPDLTDQPLPDADHTWYTDGSSLLQEGQRKAGAAVTTETEVIWAKALPAGTSAQRAELIALTQALKMAEGKKLNVYTDSRYAFATAHIHGEIYRRRGWLTSEGKEIKNKDEILALLKALFLPKRLSIIHCPGHQKGHSAEARGNRMADQAARKAAITETPDTSTLLAGKRTADGSEFEKRTADGSEFESPKKKAKVE

SEQ ID NO: 2858 - protein, 2101 aa, synthetic construct
MPAAKRVKLDGGDKKYSIGLDIGTNSVGWAVITDEYKVPSKKFKVLGNTDRHSIKKNLIGALLFDSGETAEATRLKRTARRRYTRRKNRICYLQEIFSNEMAKVDDSFFHRLEESFLVEEDKKHERHPIFGNIVDEVAYHEKYPTIYHLRKKLVDSTDKADLRLIYLALAHMIKFRGHFLIEGDLNPDNSDVDKLFIQLVQTYNQLFEENPINASGVDAKAILSARLSKSRRLENLIAQLPGEKKNGLFGNLIALSLGLTPNFKSNFDLAEDAKLQLSKDTYDDDLDNLLAQIGDQYADLFLAAKNLSDAILLSDILRVNTEITKAPLSASMIKRYDEHHQDLTLLKALVRQQLPEKYKEIFFDQSKNGYAGYIDGGASQEEFYKFIKPILEKMDGTEELLVKLNREDLLRKQRTFDNGSIPHQIHLGELHAILRRQEDFYPFLKDNREKIEKILTFRIPYYVGPLARGNSRFAWMTRKSEETITPWNFEEVVDKGASAQSFIERMTNFDKNLPNEKVLPKHSLLYEYFTVYNELTKVKYVTEGMRKPAFLSGEQKKAIVDLLFKTNRKVTVKQLKEDYFKKIECFDSVEISGVEDRFNASLGTYHDLLKIIKDKDFLDNEENEDILEDIVLTLTLFEDREMIEERLKTYAHLFDDKVMKQLKRRRYTGWGRLSRKLINGIRDKQSGKTILDFLKSDGFANRNFMQLIHDDSLTFKEDIQKAQVSGQGDSLHEHIANLAGSPAIKKGILQTVKVVDELVKVMGRHKPENIVIEMARENQTTQKGQKNSRERMKRIEEGIKELGSQILKEHPVENTQLQNEKLYLYYLQNGRDMYVDQELDINRLSDYDVDHIVPQSFLKDDSIDNKVLTRSDKARGKSDNVPSEEVVKKMKNYWRQLLNAKLITQRKFDNLTKAERGGLSELDKAGFIKRQLVETRQITKHVAQILDSRMNTKYDENDKLIREVKVITLKSKLVSDFRKDFQFYKVREINNYHHAHDAYLNAVVGTALIKKYPKLESEFVYGDYKVYDVRKMIAKSEQEIGKATAKYFFYSNIMNFFKTEITLANGEIRKRPLIETNGETGEIVWDKGRDFATVRKVLSMPQVNIVKKTEVQTGGFSKESILPKRNSDKLIARKKDWDPKKYGGFDSPTVAYSVLVVAKVEKGKSKKLKSVKELLGITIMERSSFEKNPIDFLEAKGYKEVKKDLIIKLPKYSLFELENGRKRMLASAGELQKGNELALPSKYVNFLYLASHYEKLKGSPEDNEQKQLFVEQHKHYLDEIIEQISEFSKRVILADANLDKVLSAYNKHRDKPIREQAENIIHLFTLTNLGAPAAFKYFDTTIDRKRYTSTKEVLDATLIHQSITGLYETRIDLSQLGGDGGSGSETPGTSESATPESGGTLNIEDEHRLHETSKEPDVSLGSTWLSDFPQAWAETGGMGLAVRQAPLIIPLKATSTPVSIKQYPMSQEARLGIKPHIQRLLDQGILVPCQSPWNTPLLPVKKPGTNDYRPVQDLREVNKRVEDIHPTVPNPYNLLSGLPPSHQWYTVLDLKDAFFCLRLHPTSQPLFAFEWRDPEMGISGQLTWTRLPQGFKNSPTLFNEALHRDLADFRIQHPDLILLQYVDDLLLAATSELDCQQGTRALLQTLGNLGYRASAKKAQICQKQVKYLGYLLKEGQRWLTEARKETVMGQPTPKTPRQLREFLGKAGFCRLFIPGFAEMAAPLYPLTKPGTLFNWGPDQQKAYQEIKQALLTAPALGLPDLTKPFELFVDEKQGYAKGVLTQKLGPWRRPVAYLSKKLDPVAAGWPPCLRMVAAIAVLTKDAGKLTMGQPLVILAPHAVEALVKQPPDRWLSNARMTHYQALLLDTDRVQFGPVVALNPATLLPLPEEGLQHNCLDILAEAHGTRPDLTDQPLPDADHTWYTDGSSLLQEGQRKAGAAVTTETEVIWAKALPAGTSAQRAELIALTQALKMAEGKKLNVYTDSRYAFATAHIHGEIYRRRGWLTSEGKEIKNKDEILALLKALFLPKRLSIIHCPGHQKGHSAEARGNRMADQAARKAAITETPDTSTLLAGKRTADGSEFEKRTADGSEFESPKKKAKVE

SEQ ID NO: 2859 - protein, 2094 aa, synthetic construct
MPAAKRVKLDGGDKKYSIGLDIGTNSVGWAVITDEYKVPSKKFKVLGNTDRHSIKKNLIGALLFDSGETAEATRLKRTARRRYTRRKNRICYLQEIFSNEMAKVDDSFFHRLEESFLVEEDKKHERHPIFGNIVDEVAYHEKYPTIYHLRKKLVDSTDKADLRLIYLALAHMIKFRGHFLIEGDLNPDNSDVDKLFIQLVQTYNQLFEENPINASGVDAKAILSARLSKSRRLENLIAQLPGEKKNGLFGNLIALSLGLTPNFKSNFDLAEDAKLQLSKDTYDDDLDNLLAQIGDQYADLFLAAKNLSDAILLSDILRVNTEITKAPLSASMIKRYDEHHQDLTLLKALVRQQLPEKYKEIFFDQSKNGYAGYIDGGASQEEFYKFIKPILEKMDGTEELLVKLNREDLLRKQRTFDNGSIPHQIHLGELHAILRRQEDFYPFLKDNREKIEKILTFRIPYYVGPLARGNSRFAWMTRKSEETITPWNFEEVVDKGASAQSFIERMTNFDKNLPNEKVLPKHSLLYEYFTVYNELTKVKYVTEGMRKPAFLSGEQKKAIVDLLFKTNRKVTVKQLKEDYFKKIECFDSVEISGVEDRFNASLGTYHDLLKIIKDKDFLDNEENEDILEDIVLTLTLFEDREMIEERLKTYAHLFDDKVMKQLKRRRYTGWGRLSRKLINGIRDKQSGKTILDFLKSDGFANRNFMQLIHDDSLTFKEDIQKAQVSGQGDSLHEHIANLAGSPAIKKGILQTVKVVDELVKVMGRHKPENIVIEMARENQTTQKGQKNSRERMKRIEEGIKELGSQILKEHPVENTQLQNEKLYLYYLQNGRDMYVDQELDINRLSDYDVDHIVPQSFLKDDSIDNKVLTRSDKARGKSDNVPSEEVVKKMKNYWRQLLNAKLITQRKFDNLTKAERGGLSELDKAGFIKRQLVETRQITKHVAQILDSRMNTKYDENDKLIREVKVITLKSKLVSDFRKDFQFYKVREINNYHHAHDAYLNAVVGTALIKKYPKLESEFVYGDYKVYDVRKMIAKSEQEIGKATAKYFFYSNIMNFFKTEITLANGEIRKRPLIETNGETGEIVWDKGRDFATVRKVLSMPQVNIVKKTEVQTGGFSKESILPKRNSDKLIARKKDWDPKKYGGFDSPTVAYSVLVVAKVEKGKSKKLKSVKELLGITIMERSSFEKNPIDFLEAKGYKEVKKDLIIKLPKYSLFELENGRKRMLASAGELQKGNELALPSKYVNFLYLASHYEKLKGSPEDNEQKQLFVEQHKHYLDEIIEQISEFSKRVILADANLDKVLSAYNKHRDKPIREQAENIIHLFTLTNLGAPAAFKYFDTTIDRKRYTSTKEVLDATLIHQSITGLYETRIDLSQLGGDGGGSSGGSGGGGGTLNIEDEHRLHETSKEPDVSLGSTWLSDFPQAWAETGGMGLAVRQAPLIIPLKATSTPVSIKQYPMSQEARLGIKPHIQRLLDQGILVPCQSPWNTPLLPVKKPGTNDYRPVQDLREVNKRVEDIHPTVPNPYNLLSGLPPSHQWYTVLDLKDAFFCLRLHPTSQPLFAFEWRDPEMGISGQLTWTRLPQGFKNSPTLFNEALHRDLADFRIQHPDLILLQYVDDLLLAATSELDCQQGTRALLQTLGNLGYRASAKKAQICQKQVKYLGYLLKEGQRWLTEARKETVMGQPTPKTPRQLREFLGKAGFCRLFIPGFAEMAAPLYPLTKPGTLFNWGPDQQKAYQEIKQALLTAPALGLPDLTKPFELFVDEKQGYAKGVLTQKLGPWRRPVAYLSKKLDPVAAGWPPCLRMVAAIAVLTKDAGKLTMGQPLVILAPHAVEALVKQPPDRWLSNARMTHYQALLLDTDRVQFGPVVALNPATLLPLPEEGLQHNCLDILAEAHGTRPDLTDQPLPDADHTWYTDGSSLLQEGQRKAGAAVTTETEVIWAKALPAGTSAQRAELIALTQALKMAEGKKLNVYTDSRYAFATAHIHGEIYRRRGWLTSEGKEIKNKDEILALLKALFLPKRLSIIHCPGHQKGHSAEARGNRMADQAARKAAITETPDTSTLLAGKRTADGSEFEKRTADGSEFESPKKKAKVE

SEQ ID NO: 2860 - protein, 2096 aa, synthetic construct
MPAAKRVKLDGGDKKYSIGLDIGTNSVGWAVITDEYKVPSKKFKVLGNTDRHSIKKNLIGALLFDSGETAEATRLKRTARRRYTRRKNRICYLQEIFSNEMAKVDDSFFHRLEESFLVEEDKKHERHPIFGNIVDEVAYHEKYPTIYHLRKKLVDSTDKADLRLIYLALAHMIKFRGHFLIEGDLNPDNSDVDKLFIQLVQTYNQLFEENPINASGVDAKAILSARLSKSRRLENLIAQLPGEKKNGLFGNLIALSLGLTPNFKSNFDLAEDAKLQLSKDTYDDDLDNLLAQIGDQYADLFLAAKNLSDAILLSDILRVNTEITKAPLSASMIKRYDEHHQDLTLLKALVRQQLPEKYKEIFFDQSKNGYAGYIDGGASQEEFYKFIKPILEKMDGTEELLVKLNREDLLRKQRTFDNGSIPHQIHLGELHAILRRQEDFYPFLKDNREKIEKILTFRIPYYVGPLARGNSRFAWMTRKSEETITPWNFEEVVDKGASAQSFIERMTNFDKNLPNEKVLPKHSLLYEYFTVYNELTKVKYVTEGMRKPAFLSGEQKKAIVDLLFKTNRKVTVKQLKEDYFKKIECFDSVEISGVEDRFNASLGTYHDLLKIIKDKDFLDNEENEDILEDIVLTLTLFEDREMIEERLKTYAHLFDDKVMKQLKRRRYTGWGRLSRKLINGIRDKQSGKTILDFLKSDGFANRNFMQLIHDDSLTFKEDIQKAQVSGQGDSLHEHIANLAGSPAIKKGILQTVKVVDELVKVMGRHKPENIVIEMARENQTTQKGQKNSRERMKRIEEGIKELGSQILKEHPVENTQLQNEKLYLYYLQNGRDMYVDQELDINRLSDYDVDHIVPQSFLKDDSIDNKVLTRSDKARGKSDNVPSEEVVKKMKNYWRQLLNAKLITQRKFDNLTKAERGGLSELDKAGFIKRQLVETRQITKHVAQILDSRMNTKYDENDKLIREVKVITLKSKLVSDFRKDFQFYKVREINNYHHAHDAYLNAVVGTALIKKYPKLESEFVYGDYKVYDVRKMIAKSEQEIGKATAKYFFYSNIMNFFKTEITLANGEIRKRPLIETNGETGEIVWDKGRDFATVRKVLSMPQVNIVKKTEVQTGGFSKESILPKRNSDKLIARKKDWDPKKYGGFDSPTVAYSVLVVAKVEKGKSKKLKSVKELLGITIMERSSFEKNPIDFLEAKGYKEVKKDLIIKLPKYSLFELENGRKRMLASAGELQKGNELALPSKYVNFLYLASHYEKLKGSPEDNEQKQLFVEQHKHYLDEIIEQISEFSKRVILADANLDKVLSAYNKHRDKPIREQAENIIHLFTLTNLGAPAAFKYFDTTIDRKRYTSTKEVLDATLIHQSITGLYETRIDLSQLGGDGGGSSGGSEAAAKGGTLNIEDEHRLHETSKEPDVSLGSTWLSDFPQAWAETGGMGLAVRQAPLIIPLKATSTPVSIKQYPMSQEARLGIKPHIQRLLDQGILVPCQSPWNTPLLPVKKPGTNDYRPVQDLREVNKRVEDIHPTVPNPYNLLSGLPPSHQWYTVLDLKDAFFCLRLHPTSQPLFAFEWRDPEMGISGQLTWTRLPQGFKNSPTLFNEALHRDLADFRIQHPDLILLQYVDDLLLAATSELDCQQGTRALLQTLGNLGYRASAKKAQICQKQVKYLGYLLKEGQRWLTEARKETVMGQPTPKTPRQLREFLGKAGFCRLFIPGFAEMAAPLYPLTKPGTLFNWGPDQQKAYQEIKQALLTAPALGLPDLTKPFELFVDEKQGYAKGVLTQKLGPWRRPVAYLSKKLDPVAAGWPPCLRMVAAIAVLTKDAGKLTMGQPLVILAPHAVEALVKQPPDRWLSNARMTHYQALLLDTDRVQFGPVVALNPATLLPLPEEGLQHNCLDILAEAHGTRPDLTDQPLPDADHTWYTDGSSLLQEGQRKAGAAVTTETEVIWAKALPAGTSAQRAELIALTQALKMAEGKKLNVYTDSRYAFATAHIHGEIYRRRGWLTSEGKEIKNKDEILALLKALFLPKRLSIIHCPGHQKGHSAEARGNRMADQAARKAAITETPDTSTLLAGKRTADGSEFEKRTADGSEFESPKKKAKVE

SEQ ID NO: 2861 - protein, 2091 aa, synthetic construct
MPAAKRVKLDGGDKKYSIGLDIGTNSVGWAVITDEYKVPSKKFKVLGNTDRHSIKKNLIGALLFDSGETAEATRLKRTARRRYTRRKNRICYLQEIFSNEMAKVDDSFFHRLEESFLVEEDKKHERHPIFGNIVDEVAYHEKYPTIYHLRKKLVDSTDKADLRLIYLALAHMIKFRGHFLIEGDLNPDNSDVDKLFIQLVQTYNQLFEENPINASGVDAKAILSARLSKSRRLENLIAQLPGEKKNGLFGNLIALSLGLTPNFKSNFDLAEDAKLQLSKDTYDDDLDNLLAQIGDQYADLFLAAKNLSDAILLSDILRVNTEITKAPLSASMIKRYDEHHQDLTLLKALVRQQLPEKYKEIFFDQSKNGYAGYIDGGASQEEFYKFIKPILEKMDGTEELLVKLNREDLLRKQRTFDNGSIPHQIHLGELHAILRRQEDFYPFLKDNREKIEKILTFRIPYYVGPLARGNSRFAWMTRKSEETITPWNFEEVVDKGASAQSFIERMTNFDKNLPNEKVLPKHSLLYEYFTVYNELTKVKYVTEGMRKPAFLSGEQKKAIVDLLFKTNRKVTVKQLKEDYFKKIECFDSVEISGVEDRFNASLGTYHDLLKIIKDKDFLDNEENEDILEDIVLTLTLFEDREMIEERLKTYAHLFDDKVMKQLKRRRYTGWGRLSRKLINGIRDKQSGKTILDFLKSDGFANRNFMQLIHDDSLTFKEDIQKAQVSGQGDSLHEHIANLAGSPAIKKGILQTVKVVDELVKVMGRHKPENIVIEMARENQTTQKGQKNSRERMKRIEEGIKELGSQILKEHPVENTQLQNEKLYLYYLQNGRDMYVDQELDINRLSDYDVDHIVPQSFLKDDSIDNKVLTRSDKARGKSDNVPSEEVVKKMKNYWRQLLNAKLITQRKFDNLTKAERGGLSELDKAGFIKRQLVETRQITKHVAQILDSRMNTKYDENDKLIREVKVITLKSKLVSDFRKDFQFYKVREINNYHHAHDAYLNAVVGTALIKKYPKLESEFVYGDYKVYDVRKMIAKSEQEIGKATAKYFFYSNIMNFFKTEITLANGEIRKRPLIETNGETGEIVWDKGRDFATVRKVLSMPQVNIVKKTEVQTGGFSKESILPKRNSDKLIARKKDWDPKKYGGFDSPTVAYSVLVVAKVEKGKSKKLKSVKELLGITIMERSSFEKNPIDFLEAKGYKEVKKDLIIKLPKYSLFELENGRKRMLASAGELQKGNELALPSKYVNFLYLASHYEKLKGSPEDNEQKQLFVEQHKHYLDEIIEQISEFSKRVILADANLDKVLSAYNKHRDKPIREQAENIIHLFTLTNLGAPAAFKYFDTTIDRKRYTSTKEVLDATLIHQSITGLYETRIDLSQLGGDGGGGSGGGGGTLNIEDEHRLHETSKEPDVSLGSTWLSDFPQAWAETGGMGLAVRQAPLIIPLKATSTPVSIKQYPMSQEARLGIKPHIQRLLDQGILVPCQSPWNTPLLPVKKPGTNDYRPVQDLREVNKRVEDIHPTVPNPYNLLSGLPPSHQWYTVLDLKDAFFCLRLHPTSQPLFAFEWRDPEMGISGQLTWTRLPQGFKNSPTLFNEALHRDLADFRIQHPDLILLQYVDDLLLAATSELDCQQGTRALLQTLGNLGYRASAKKAQICQKQVKYLGYLLKEGQRWLTEARKETVMGQPTPKTPRQLREFLGKAGFCRLFIPGFAEMAAPLYPLTKPGTLFNWGPDQQKAYQEIKQALLTAPALGLPDLTKPFELFVDEKQGYAKGVLTQKLGPWRRPVAYLSKKLDPVAAGWPPCLRMVAAIAVLTKDAGKLTMGQPLVILAPHAVEALVKQPPDRWLSNARMTHYQALLLDTDRVQFGPVVALNPATLLPLPEEGLQHNCLDILAEAHGTRPDLTDQPLPDADHTWYTDGSSLLQEGQRKAGAAVTTETEVIWAKALPAGTSAQRAELIALTQALKMAEGKKLNVYTDSRYAFATAHIHGEIYRRRGWLTSEGKEIKNKDEILALLKALFLPKRLSIIHCPGHQKGHSAEARGNRMADQAARKAAITETPDTSTLLAGKRTADGSEFEKRTADGSEFESPKKKAKVE

SEQ ID NO: 2862 - protein, 2116 aa, synthetic construct; identical to SEQ ID NO: 2637

SEQ ID NO: 2863 - protein, 2116 aa, synthetic construct
MPAAKRVKLDGGDKKYSIGLDIGTNSVGWAVITDEYKVPSKKFKVLGNTDRHSIKKNLIGALLFDSGETAEATRLKRTARRRYTRRKNRICYLQEIFSNEMAKVDDSFFHRLEESFLVEEDKKHERHPIFGNIVDEVAYHEKYPTIYHLRKKLVDSTDKADLRLIYLALAHMIKFRGHFLIEGDLNPDNSDVDKLFIQLVQTYNQLFEENPINASGVDAKAILSARLSKSRRLENLIAQLPGEKKNGLFGNLIALSLGLTPNFKSNFDLAEDAKLQLSKDTYDDDLDNLLAQIGDQYADLFLAAKNLSDAILLSDILRVNTEITKAPLSASMIKRYDEHHQDLTLLKALVRQQLPEKYKEIFFDQSKNGYAGYIDGGASQEEFYKFIKPILEKMDGTEELLVKLNREDLLRKQRTFDNGSIPHQIHLGELHAILRRQEDFYPFLKDNREKIEKILTFRIPYYVGPLARGNSRFAWMTRKSEETITPWNFEEVVDKGASAQSFIERMTNFDKNLPNEKVLPKHSLLYEYFTVYNELTKVKYVTEGMRKPAFLSGEQKKAIVDLLFKTNRKVTVKQLKEDYFKKIECFDSVEISGVEDRFNASLGTYHDLLKIIKDKDFLDNEENEDILEDIVLTLTLFEDREMIEERLKTYAHLFDDKVMKQLKRRRYTGWGRLSRKLINGIRDKQSGKTILDFLKSDGFANRNFMQLIHDDSLTFKEDIQKAQVSGQGDSLHEHIANLAGSPAIKKGILQTVKVVDELVKVMGRHKPENIVIEMARENQTTQKGQKNSRERMKRIEEGIKELGSQILKEHPVENTQLQNEKLYLYYLQNGRDMYVDQELDINRLSDYDVDHIVPQSFLKDDSIDNKVLTRSDKARGKSDNVPSEEVVKKMKNYWRQLLNAKLITQRKFDNLTKAERGGLSELDKAGFIKRQLVETRQITKHVAQILDSRMNTKYDENDKLIREVKVITLKSKLVSDFRKDFQFYKVREINNYHHAHDAYLNAVVGTALIKKYPKLESEFVYGDYKVYDVRKMIAKSEQEIGKATAKYFFYSNIMNFFKTEITLANGEIRKRPLIETNGETGEIVWDKGRDFATVRKVLSMPQVNIVKKTEVQTGGFSKESILPKRNSDKLIARKKDWDPKKYGGFDSPTVAYSVLVVAKVEKGKSKKLKSVKELLGITIMERSSFEKNPIDFLEAKGYKEVKKDLIIKLPKYSLFELENGRKRMLASAGELQKGNELALPSKYVNFLYLASHYEKLKGSPEDNEQKQLFVEQHKHYLDEIIEQISEFSKRVILADANLDKVLSAYNKHRDKPIREQAENIIHLFTLTNLGAPAAFKYFDTTIDRKRYTSTKEVLDATLIHQSITGLYETRIDLSQLGGDGGEAAAKGGGGGSGGTLNIEDEYRLHETSKEPDVSLGSTWLSDFPQAWAETGGMGLAVRQAPLIIPLKATSTPVSIKQYPMSQEARLGIKPHIQRLLDQGILVPCQSPWNTPLLPVKKPGTNDYRPVQDLREVNKRVEDIHPTVPNPYNLLSGLPPSHQWYTVLDLKDAFFCLRLHPTSQPLFAFEWRDPEMGISGQLTWTRLPQGFKNSPTLFNEALHRDLADFRIQHPDLILLQYVDDLLLAATSELDCQQGTRALLQTLGNLGYRASAKKAQICQKQVKYLGYLLKEGQRWLTEARKETVMGQPTPKTPRQLREFLGKAGFCRLFIPGFAEMAAPLYPLTKPGTLFNWGPDQQKAYQEIKQALLTAPALGLPDLTKPFELFVDEKQGYAKGVLTQKLGPWRRPVAYLSKKLDPVAAGWPPCLRMVAAIAVLTKDAGKLTMGQPLVILAPHAVEALVKQPPDRWLSNARMTHYQALLLDTDRVQFGPVVALNPATLLPLPEEGLQHNCLDILAEAHGTRPDLTDQPLPDADHTWYTDGSSLLQEGQRKAGAAVTTETEVIWAKALPAGTSAQRAELIALTQALKMAEGKKLNVYTDSRYAFATAHIHGEIYRRRGWLTSEGKEIKNKDEILALLKALFLPKRLSIIHCPGHQKGHSAEARGNRMADQAARKAAITETPDTSTLLIENSSPSGGSKRTADGSEFEAGKRTADGSEFEKRTADGSEFESPKKKAKVE

SEQ ID NO: 2864 - protein, 2108 aa, synthetic construct; identical to SEQ ID NO: 2655

SEQ ID NO: 2865 - protein, 2108 aa, synthetic construct; identical to SEQ ID NO: 2624

SEQ ID NO: 2866 - protein, 2116 aa, synthetic construct; identical to SEQ ID NO: 2692

SEQ ID NO: 2867 - protein, 2117 aa, synthetic construct; identical to SEQ ID NO: 2665

SEQ ID NO: 2868 - protein, 2118 aa, synthetic construct
MPAAKRVKLDGGDKKYSIGLDIGTNSVGWAVITDEYKVPSKKFKVLGNTDRHSIKKNLIGALLFDSGETAEATRLKRTARRRYTRRKNRICYLQEIFSNEMAKVDDSFFHRLEESFLVEEDKKHERHPIFGNIVDEVAYHEKYPTIYHLRKKLVDSTDKADLRLIYLALAHMIKFRGHFLIEGDLNPDNSDVDKLFIQLVQTYNQLFEENPINASGVDAKAILSARLSKSRRLENLIAQLPGEKKNGLFGNLIALSLGLTPNFKSNFDLAEDAKLQLSKDTYDDDLDNLLAQIGDQYADLFLAAKNLSDAILLSDILRVNTEITKAPLSASMIKRYDEHHQDLTLLKALVRQQLPEKYKEIFFDQSKNGYAGYIDGGASQEEFYKFIKPILEKMDGTEELLVKLNREDLLRKQRTFDNGSIPHQIHLGELHAILRRQEDFYPFLKDNREKIEKILTFRIPYYVGPLARGNSRFAWMTRKSEETITPWNFEEVVDKGASAQSFIERMTNFDKNLPNEKVLPKHSLLYEYFTVYNELTKVKYVTEGMRKPAFLSGEQKKAIVDLLFKTNRKVTVKQLKEDYFKKIECFDSVEISGVEDRFNASLGTYHDLLKIIKDKDFLDNEENEDILEDIVLTLTLFEDREMIEERLKTYAHLFDDKVMKQLKRRRYTGWGRLSRKLINGIRDKQSGKTILDFLKSDGFANRNFMQLIHDDSLTFKEDIQKAQVSGQGDSLHEHIANLAGSPAIKKGILQTVKVVDELVKVMGRHKPENIVIEMARENQTTQKGQKNSRERMKRIEEGIKELGSQILKEHPVENTQLQNEKLYLYYLQNGRDMYVDQELDINRLSDYDVDHIVPQSFLKDDSIDNKVLTRSDKARGKSDNVPSEEVVKKMKNYWRQLLNAKLITQRKFDNLTKAERGGLSELDKAGFIKRQLVETRQITKHVAQILDSRMNTKYDENDKLIREVKVITLKSKLVSDFRKDFQFYKVREINNYHHAHDAYLNAVVGTALIKKYPKLESEFVYGDYKVYDVRKMIAKSEQEIGKATAKYFFYSNIMNFFKTEITLANGEIRKRPLIETNGETGEIVWDKGRDFATVRKVLSMPQVNIVKKTEVQTGGFSKESILPKRNSDKLIARKKDWDPKKYGGFDSPTVAYSVLVVAKVEKGKSKKLKSVKELLGITIMERSSFEKNPIDFLEAKGYKEVKKDLIIKLPKYSLFELENGRKRMLASAGELQKGNELALPSKYVNFLYLASHYEKLKGSPEDNEQKQLFVEQHKHYLDEIIEQISEFSKRVILADANLDKVLSAYNKHRDKPIREQAENIIHLFTLTNLGAPAAFKYFDTTIDRKRYTSTKEVLDATLIHQSITGLYETRIDLSQLGGDGGPAPAPAPAPAPAPGGTLNIEDEYRLHETSKEPDVSLGSTWLSDFPQAWAETGGMGLAVRQAPLIIPLKATSTPVSIKQYPMSQEARLGIKPHIQRLLDQGILVPCQSPWNTPLLPVKKPGTNDYRPVQDLREVNKRVEDIHPTVPNPYNLLSGLPPSHQWYTVLDLKDAFFCLRLHPTSQPLFAFEWRDPEMGISGQLTWTRLPQGFKNSPTLFNEALHRDLADFRIQHPDLILLQYVDDLLLAATSELDCQQGTRALLQTLGNLGYRASAKKAQICQKQVKYLGYLLKEGQRWLTEARKETVMGQPTPKTPRQLREFLGKAGFCRLFIPGFAEMAAPLYPLTKPGTLFNWGPDQQKAYQEIKQALLTAPALGLPDLTKPFELFVDEKQGYAKGVLTQKLGPWRRPVAYLSKKLDPVAAGWPPCLRMVAAIAVLTKDAGKLTMGQPLVILAPHAVEALVKQPPDRWLSNARMTHYQALLLDTDRVQFGPVVALNPATLLPLPEEGLQHNCLDILAEAHGTRPDLTDQPLPDADHTWYTDGSSLLQEGQRKAGAAVTTETEVIWAKALPAGTSAQRAELIALTQALKMAEGKKLNVYTDSRYAFATAHIHGEIYRRRGWLTSEGKEIKNKDEILALLKALFLPKRLSIIHCPGHQKGHSAEARGNRMADQAARKAAITETPDTSTLLIENSSPSGGSKRTADGSEFEAGKRTADGSEFEKRTADGSEFESPKKKAKVE

SEQ ID NO: 2869 - protein, 2114 aa, synthetic construct
MPAAKRVKLDGGDKKYSIGLDIGTNSVGWAVITDEYKVPSKKFKVLGNTDRHSIKKNLIGALLFDSGETAEATRLKRTARRRYTRRKNRICYLQEIFSNEMAKVDDSFFHRLEESFLVEEDKKHERHPIFGNIVDEVAYHEKYPTIYHLRKKLVDSTDKADLRLIYLALAHMIKFRGHFLIEGDLNPDNSDVDKLFIQLVQTYNQLFEENPINASGVDAKAILSARLSKSRRLENLIAQLPGEKKNGLFGNLIALSLGLTPNFKSNFDLAEDAKLQLSKDTYDDDLDNLLAQIGDQYADLFLAAKNLSDAILLSDILRVNTEITKAPLSASMIKRYDEHHQDLTLLKALVRQQLPEKYKEIFFDQSKNGYAGYIDGGASQEEFYKFIKPILEKMDGTEELLVKLNREDLLRKQRTFDNGSIPHQIHLGELHAILRRQEDFYPFLKDNREKIEKILTFRIPYYVGPLARGNSRFAWMTRKSEETITPWNFEEVVDKGASAQSFIERMTNFDKNLPNEKVLPKHSLLYEYFTVYNELTKVKYVTEGMRKPAFLSGEQKKAIVDLLFKTNRKVTVKQLKEDYFKKIECFDSVEISGVEDRFNASLGTYHDLLKIIKDKDFLDNEENEDILEDIVLTLTLFEDREMIEERLKTYAHLFDDKVMKQLKRRRYTGWGRLSRKLINGIRDKQSGKTILDFLKSDGFANRNFMQLIHDDSLTFKEDIQKAQVSGQGDSLHEHIANLAGSPAIKKGILQTVKVVDELVKVMGRHKPENIVIEMARENQTTQKGQKNSRERMKRIEEGIKELGSQILKEHPVENTQLQNEKLYLYYLQNGRDMYVDQELDINRLSDYDVDHIVPQSFLKDDSIDNKVLTRSDKARGKSDNVPSEEVVKKMKNYWRQLLNAKLITQRKFDNLTKAERGGLSELDKAGFIKRQLVETRQITKHVAQILDSRMNTKYDENDKLIREVKVITLKSKLVSDFRKDFQFYKVREINNYHHAHDAYLNAVVGTALIKKYPKLESEFVYGDYKVYDVRKMIAKSEQEIGKATAKYFFYSNIMNFFKTEITLANGEIRKRPLIETNGETGEIVWDKGRDFATVRKVLSMPQVNIVKKTEVQTGGFSKESILPKRNSDKLIARKKDWDPKKYGGFDSPTVAYSVLVVAKVEKGKSKKLKSVKELLGITIMERSSFEKNPIDFLEAKGYKEVKKDLIIKLPKYSLFELENGRKRMLASAGELQKGNELALPSKYVNFLYLASHYEKLKGSPEDNEQKQLFVEQHKHYLDEIIEQISEFSKRVILADANLDKVLSAYNKHRDKPIREQAENIIHLFTLTNLGAPAAFKYFDTTIDRKRYTSTKEVLDATLIHQSITGLYETRIDLSQLGGDGGPAPGGGGSSGGTLNIEDEYRLHETSKEPDVSLGSTWLSDFPQAWAETGGMGLAVRQAPLIIPLKATSTPVSIKQYPMSQEARLGIKPHIQRLLDQGILVPCQSPWNTPLLPVKKPGTNDYRPVQDLREVNKRVEDIHPTVPNPYNLLSGLPPSHQWYTVLDLKDAFFCLRLHPTSQPLFAFEWRDPEMGISGQLTWTRLPQGFKNSPTLFNEALHRDLADFRIQHPDLILLQYVDDLLLAATSELDCQQGTRALLQTLGNLGYRASAKKAQICQKQVKYLGYLLKEGQRWLTEARKETVMGQPTPKTPRQLREFLGKAGFCRLFIPGFAEMAAPLYPLTKPGTLFNWGPDQQKAYQEIKQALLTAPALGLPDLTKPFELFVDEKQGYAKGVLTQKLGPWRRPVAYLSKKLDPVAAGWPPCLRMVAAIAVLTKDAGKLTMGQPLVILAPHAVEALVKQPPDRWLSNARMTHYQALLLDTDRVQFGPVVALNPATLLPLPEEGLQHNCLDILAEAHGTRPDLTDQPLPDADHTWYTDGSSLLQEGQRKAGAAVTTETEVIWAKALPAGTSAQRAELIALTQALKMAEGKKLNVYTDSRYAFATAHIHGEIYRRRGWLTSEGKEIKNKDEILALLKALFLPKRLSIIHCPGHQKGHSAEARGNRMADQAARKAAITETPDTSTLLIENSSPSGGSKRTADGSEFEAGKRTADGSEFEKRTADGSEFESPKKKAKVE

SEQ ID NO: 2870 - protein, 2116 aa, synthetic construct; identical to SEQ ID NO: 2677

SEQ ID NO: 2871 - protein, 2111 aa, synthetic construct; identical to SEQ ID NO: 2676

SEQ ID NO: 2872 - protein, 2116 aa, synthetic construct
MPAAKRVKLDGGDKKYSIGLDIGTNSVGWAVITDEYKVPSKKFKVLGNTDRHSIKKNLIGALLFDSGETAEATRLKRTARRRYTRRKNRICYLQEIFSNEMAKVDDSFFHRLEESFLVEEDKKHERHPIFGNIVDEVAYHEKYPTIYHLRKKLVDSTDKADLRLIYLALAHMIKFRGHFLIEGDLNPDNSDVDKLFIQLVQTYNQLFEENPINASGVDAKAILSARLSKSRRLENLIAQLPGEKKNGLFGNLIALSLGLTPNFKSNFDLAEDAKLQLSKDTYDDDLDNLLAQIGDQYADLFLAAKNLSDAILLSDILRVNTEITKAPLSASMIKRYDEHHQDLTLLKALVRQQLPEKYKEIFFDQSKNGYAGYIDGGASQEEFYKFIKPILEKMDGTEELLVKLNREDLLRKQRTFDNGSIPHQIHLGELHAILRRQEDFYPFLKDNREKIEKILTFRIPYYVGPLARGNSRFAWMTRKSEETITPWNFEEVVDKGASAQSFIERMTNFDKNLPNEKVLPKHSLLYEYFTVYNELTKVKYVTEGMRKPAFLSGEQKKAIVDLLFKTNRKVTVKQLKEDYFKKIECFDSVEISGVEDRFNASLGTYHDLLKIIKDKDFLDNEENEDILEDIVLTLTLFEDREMIEERLKTYAHLFDDKVMKQLKRRRYTGWGRLSRKLINGIRDKQSGKTILDFLKSDGFANRNFMQLIHDDSLTFKEDIQKAQVSGQGDSLHEHIANLAGSPAIKKGILQTVKVVDELVKVMGRHKPENIVIEMARENQTTQKGQKNSRERMKRIEEGIKELGSQILKEHPVENTQLQNEKLYLYYLQNGRDMYVDQELDINRLSDYDVDHIVPQSFLKDDSIDNKVLTRSDKARGKSDNVPSEEVVKKMKNYWRQLLNAKLITQRKFDNLTKAERGGLSELDKAGFIKRQLVETRQITKHVAQILDSRMNTKYDENDKLIREVKVITLKSKLVSDFRKDFQFYKVREINNYHHAHDAYLNAVVGTALIKKYPKLESEFVYGDYKVYDVRKMIAKSEQEIGKATAKYFFYSNIMNFFKTEITLANGEIRKRPLIETNGETGEIVWDKGRDFATVRKVLSMPQVNIVKKTEVQTGGFSKESILPKRNSDKLIARKKDWDPKKYGGFDSPTVAYSVLVVAKVEKGKSKKLKSVKELLGITIMERSSFEKNPIDFLEAKGYKEVKKDLIIKLPKYSLFELENGRKRMLASAGELQKGNELALPSKYVNFLYLASHYEKLKGSPEDNEQKQLFVEQHKHYLDEIIEQISEFSKRVILADANLDKVLSAYNKHRDKPIREQAENIIHLFTLTNLGAPAAFKYFDTTIDRKRYTSTKEVLDATLIHQSITGLYETRIDLSQLGGDGGPAPGGGEAAAKGGTLNIEDEYRLHETSKEPDVSLGSTWLSDFPQAWAETGGMGLAVRQAPLIIPLKATSTPVSIKQYPMSQEARLGIKPHIQRLLDQGILVPCQSPWNTPLLPVKKPGTNDYRPVQDLREVNKRVEDIHPTVPNPYNLLSGLPPSHQWYTVLDLKDAFFCLRLHPTSQPLFAFEWRDPEMGISGQLTWTRLPQGFKNSPTLFNEALHRDLADFRIQHPDLILLQYVDDLLLAATSELDCQQGTRALLQTLGNLGYRASAKKAQICQKQVKYLGYLLKEGQRWLTEARKETVMGQPTPKTPRQLREFLGKAGFCRLFIPGFAEMAAPLYPLTKPGTLFNWGPDQQKAYQEIKQALLTAPALGLPDLTKPFELFVDEKQGYAKGVLTQKLGPWRRPVAYLSKKLDPVAAGWPPCLRMVAAIAVLTKDAGKLTMGQPLVILAPHAVEALVKQPPDRWLSNARMTHYQALLLDTDRVQFGPVVALNPATLLPLPEEGLQHNCLDILAEAHGTRPDLTDQPLPDADHTWYTDGSSLLQEGQRKAGAAVTTETEVIWAKALPAGTSAQRAELIALTQALKMAEGKKLNVYTDSRYAFATAHIHGEIYRRRGWLTSEGKEIKNKDEILALLKALFLPKRLSIIHCPGHQKGHSAEARGNRMADQAARKAAITETPDTSTLLIENSSPSGGSKRTADGSEFEAGKRTADGSEFEKRTADGSEFESPKKKAKVE

SEQ ID NO: 2873 - protein, 2116 aa, synthetic construct; identical to SEQ ID NO: 2651

SEQ ID NO: 2874 - protein, 2116 aa, synthetic construct; identical to SEQ ID NO: 2638

SEQ ID NO: 2875 - protein, 2114 aa, synthetic construct; identical to SEQ ID NO: 2685

SEQ ID NO: 2876 - protein, 2114 aa, synthetic construct; identical to SEQ ID NO: 2698

SEQ ID NO: 2877 - protein, 2120 aa, synthetic construct; identical to SEQ ID NO: 2627

SEQ ID NO: 2878 - protein, 2114 aa, synthetic construct; identical to SEQ ID NO: 2649

SEQ ID NO: 2879 - protein, 2116 aa, synthetic construct
MPAAKRVKLDGGDKKYSIGLDIGTNSVGWAVITDEYKVPSKKFKVLGNTDRHSIKKNLIGALLFDSGETAEATRLKRTARRRYTRRKNRICYLQEIFSNEMAKVDDSFFHRLEESFLVEEDKKHERHPIFGNIVDEVAYHEKYPTIYHLRKKLVDSTDKADLRLIYLALAHMIKFRGHFLIEGDLNPDNSDVDKLFIQLVQTYNQLFEENPINASGVDAKAILSARLSKSRRLENLIAQLPGEKKNGLFGNLIALSLGLTPNFKSNFDLAEDAKLQLSKDTYDDDLDNLLAQIGDQYADLFLAAKNLSDAILLSDILRVNTEITKAPLSASMIKRYDEHHQDLTLLKALVRQQLPEKYKEIFFDQSKNGYAGYIDGGASQEEFYKFIKPILEKMDGTEELLVKLNREDLLRKQRTFDNGSIPHQIHLGELHAILRRQEDFYPFLKDNREKIEKILTFRIPYYVGPLARGNSRFAWMTRKSEETITPWNFEEVVDKGASAQSFIERMTNFDKNLPNEKVLPKHSLLYEYFTVYNELTKVKYVTEGMRKPAFLSGEQKKAIVDLLFKTNRKVTVKQLKEDYFKKIECFDSVEISGVEDRFNASLGTYHDLLKIIKDKDFLDNEENEDILEDIVLTLTLFEDREMIEERLKTYAHLFDDKVMKQLKRRRYTGWGRLSRKLINGIRDKQSGKTILDFLKSDGFANRNFMQLIHDDSLTFKEDIQKAQVSGQGDSLHEHIANLAGSPAIKKGILQTVKVVDELVKVMGRHKPENIVIEMARENQTTQKGQKNSRERMKRIEEGIKELGSQILKEHPVENTQLQNEKLYLYYLQNGRDMYVDQELDINRLSDYDVDHIVPQSFLKDDSIDNKVLTRSDKARGKSDNVPSEEVVKKMKNYWRQLLNAKLITQRKFDNLTKAERGGLSELDKAGFIKRQLVETRQITKHVAQILDSRMNTKYDENDKLIREVKVITLKSKLVSDFRKDFQFYKVREINNYHHAHDAYLNAVVGTALIKKYPKLESEFVYGDYKVYDVRKMIAKSEQEIGKATAKYFFYSNIMNFFKTEITLANGEIRKRPLIETNGETGEIVWDKGRDFATVRKVLSMPQVNIVKKTEVQTGGFSKESILPKRNSDKLIARKKDWDPKKYGGFDSPTVAYSVLVVAKVEKGKSKKLKSVKELLGITIMERSSFEKNPIDFLEAKGYKEVKKDLIIKLPKYSLFELENGRKRMLASAGELQKGNELALPSKYVNFLYLASHYEKLKGSPEDNEQKQLFVEQHKHYLDEIIEQISEFSKRVILADANLDKVLSAYNKHRDKPIREQAENIIHLFTLTNLGAPAAFKYFDTTIDRKRYTSTKEVLDATLIHQSITGLYETRIDLSQLGGDGGGGGEAAAKPAPGGTLNIEDEYRLHETSKEPDVSLGSTWLSDFPQAWAETGGMGLAVRQAPLIIPLKATSTPVSIKQYPMSQEARLGIKPHIQRLLDQGILVPCQSPWNTPLLPVKKPGTNDYRPVQDLREVNKRVEDIHPTVPNPYNLLSGLPPSHQWYTVLDLKDAFFCLRLHPTSQPLFAFEWRDPEMGISGQLTWTRLPQGFKNSPTLFNEALHRDLADFRIQHPDLILLQYVDDLLLAATSELDCQQGTRALLQTLGNLGYRASAKKAQICQKQVKYLGYLLKEGQRWLTEARKETVMGQPTPKTPRQLREFLGKAGFCRLFIPGFAEMAAPLYPLTKPGTLFNWGPDQQKAYQEIKQALLTAPALGLPDLTKPFELFVDEKQGYAKGVLTQKLGPWRRPVAYLSKKLDPVAAGWPPCLRMVAAIAVLTKDAGKLTMGQPLVILAPHAVEALVKQPPDRWLSNARMTHYQALLLDTDRVQFGPVVALNPATLLPLPEEGLQHNCLDILAEAHGTRPDLTDQPLPDADHTWYTDGSSLLQEGQRKAGAAVTTETEVIWAKALPAGTSAQRAELIALTQALKMAEGKKLNVYTDSRYAFATAHIHGEIYRRRGWLTSEGKEIKNKDEILALLKALFLPKRLSIIHCPGHQKGHSAEARGNRMADQAARKAAITETPDTSTLLIENSSPSGGSKRTADGSEFEAGKRTADGSEFEKRTADGSEFESPKKKAKVE

SEQ ID NO: 2880 - protein, 2130 aa, synthetic construct; identical to SEQ ID NO: 2678

SEQ ID NO: 2881 - protein, 2110 aa, synthetic construct; identical to SEQ ID NO: 2620

SEQ ID NO: 2882 - protein, 2117 aa, synthetic construct; identical to SEQ ID NO: 2687

SEQ ID NO: 2883 - protein, 2113 aa, synthetic construct
MPAAKRVKLDGGDKKYSIGLDIGTNSVGWAVITDEYKVPSKKFKVLGNTDRHSIKKNLIGALLFDSGETAEATRLKRTARRRYTRRKNRICYLQEIFSNEMAKVDDSFFHRLEESFLVEEDKKHERHPIFGNIVDEVAYHEKYPTIYHLRKKLVDSTDKADLRLIYLALAHMIKFRGHFLIEGDLNPDNSDVDKLFIQLVQTYNQLFEENPINASGVDAKAILSARLSKSRRLENLIAQLPGEKKNGLFGNLIALSLGLTPNFKSNFDLAEDAKLQLSKDTYDDDLDNLLAQIGDQYADLFLAAKNLSDAILLSDILRVNTEITKAPLSASMIKRYDEHHQDLTLLKALVRQQLPEKYKEIFFDQSKNGYAGYIDGGASQEEFYKFIKPILEKMDGTEELLVKLNREDLLRKQRTFDNGSIPHQIHLGELHAILRRQEDFYPFLKDNREKIEKILTFRIPYYVGPLARGNSRFAWMTRKSEETITPWNFEEVVDKGASAQSFIERMTNFDKNLPNEKVLPKHSLLYEYFTVYNELTKVKYVTEGMRKPAFLSGEQKKAIVDLLFKTNRKVTVKQLKEDYFKKIECFDSVEISGVEDRFNASLGTYHDLLKIIKDKDFLDNEENEDILEDIVLTLTLFEDREMIEERLKTYAHLFDDKVMKQLKRRRYTGWGRLSRKLINGIRDKQSGKTILDFLKSDGFANRNFMQLIHDDSLTFKEDIQKAQVSGQGDSLHEHIANLAGSPAIKKGILQTVKVVDELVKVMGRHKPENIVIEMARENQTTQKGQKNSRERMKRIEEGIKELGSQILKEHPVENTQLQNEKLYLYYLQNGRDMYVDQELDINRLSDYDVDHIVPQSFLKDDSIDNKVLTRSDKARGKSDNVPSEEVVKKMKNYWRQLLNAKLITQRKFDNLTKAERGGLSELDKAGFIKRQLVETRQITKHVAQILDSRMNTKYDENDKLIREVKVITLKSKLVSDFRKDFQFYKVREINNYHHAHDAYLNAVVGTALIKKYPKLESEFVYGDYKVYDVRKMIAKSEQEIGKATAKYFFYSNIMNFFKTEITLANGEIRKRPLIETNGETGEIVWDKGRDFATVRKVLSMPQVNIVKKTEVQTGGFSKESILPKRNSDKLIARKKDWDPKKYGGFDSPTVAYSVLVVAKVEKGKSKKLKSVKELLGITIMERSSFEKNPIDFLEAKGYKEVKKDLIIKLPKYSLFELENGRKRMLASAGELQKGNELALPSKYVNFLYLASHYEKLKGSPEDNEQKQLFVEQHKHYLDEIIEQISEFSKRVILADANLDKVLSAYNKHRDKPIREQAENIIHLFTLTNLGAPAAFKYFDTTIDRKRYTSTKEVLDATLIHQSITGLYETRIDLSQLGGDGGPAPEAAAKGGTLNIEDEYRLHETSKEPDVSLGSTWLSDFPQAWAETGGMGLAVRQAPLIIPLKATSTPVSIKQYPMSQEARLGIKPHIQRLLDQGILVPCQSPWNTPLLPVKKPGTNDYRPVQDLREVNKRVEDIHPTVPNPYNLLSGLPPSHQWYTVLDLKDAFFCLRLHPTSQPLFAFEWRDPEMGISGQLTWTRLPQGFKNSPTLFNEALHRDLADFRIQHPDLILLQYVDDLLLAATSELDCQQGTRALLQTLGNLGYRASAKKAQICQKQVKYLGYLLKEGQRWLTEARKETVMGQPTPKTPRQLREFLGKAGFCRLFIPGFAEMAAPLYPLTKPGTLFNWGPDQQKAYQEIKQALLTAPALGLPDLTKPFELFVDEKQGYAKGVLTQKLGPWRRPVAYLSKKLDPVAAGWPPCLRMVAAIAVLTKDAGKLTMGQPLVILAPHAVEALVKQPPDRWLSNARMTHYQALLLDTDRVQFGPVVALNPATLLPLPEEGLQHNCLDILAEAHGTRPDLTDQPLPDADHTWYTDGSSLLQEGQRKAGAAVTTETEVIWAKALPAGTSAQRAELIALTQALKMAEGKKLNVYTDSRYAFATAHIHGEIYRRRGWLTSEGKEIKNKDEILALLKALFLPKRLSIIHCPGHQKGHSAEARGNRMADQAARKAAITETPDTSTLLIENSSPSGGSKRTADGSEFEAGKRTADGSEFEKRTADGSEFESPKKKAKVE

SEQ ID NO: 2884 - protein, 2116 aa, synthetic construct; identical to SEQ ID NO: 2674

SEQ ID NO: 2885 - protein, 2116 aa, synthetic construct; identical to SEQ ID NO: 2688

SEQ ID NO: 2886 - protein, 2111 aa, synthetic construct; identical to SEQ ID NO: 2653

SEQ ID NO: 2887 - protein, 2115 aa, synthetic construct; identical to SEQ ID NO: 2647

SEQ ID NO: 2888 - protein, 2125 aa, synthetic construct; identical to SEQ ID NO: 2610

SEQ ID NO: 2889 - protein, 2116 aa, synthetic construct; identical to SEQ ID NO: 2683

SEQ ID NO: 2890 - protein, 2114 aa, synthetic construct; identical to SEQ ID NO: 2633

SEQ ID NO: 2891 - protein, 2116 aa, synthetic construct; identical to SEQ ID NO: 2641

SEQ ID NO: 2892 - protein, 2138 aa, synthetic construct
MPAAKRVKLDGGDKKYSIGLDIGTNSVGWAVITDEYKVPSKKFKVLGNTDRHSIKKNLIGALLFDSGETAEATRLKRTARRRYTRRKNRICYLQEIFSNEMAKVDDSFFHRLEESFLVEEDKKHERHPIFGNIVDEVAYHEKYPTIYHLRKKLVDSTDKADLRLIYLALAHMIKFRGHFLIEGDLNPDNSDVDKLFIQLVQTYNQLFEENPINASGVDAKAILSARLSKSRRLENLIAQLPGEKKNGLFGNLIALSLGLTPNFKSNFDLAEDAKLQLSKDTYDDDLDNLLAQIGDQYADLFLAAKNLSDAILLSDILRVNTEITKAPLSASMIKRYDEHHQDLTLLKALVRQQLPEKYKEIFFDQSKNGYAGYIDGGASQEEFYKFIKPILEKMDGTEELLVKLNREDLLRKQRTFDNGSIPHQIHLGELHAILRRQEDFYPFLKDNREKIEKILTFRIPYYVGPLARGNSRFAWMTRKSEETITPWNFEEVVDKGASAQSFIERMTNFDKNLPNEKVLPKHSLLYEYFTVYNELTKVKYVTEGMRKPAFLSGEQKKAIVDLLFKTNRKVTVKQLKEDYFKKIECFDSVEISGVEDRFNASLGTYHDLLKIIKDKDFLDNEENEDILEDIVLTLTLFEDREMIEERLKTYAHLFDDKVMKQLKRRRYTGWGRLSRKLINGIRDKQSGKTILDFLKSDGFANRNFMQLIHDDSLTFKEDIQKAQVSGQGDSLHEHIANLAGSPAIKKGILQTVKVVDELVKVMGRHKPENIVIEMARENQTTQKGQKNSRERMKRIEEGIKELGSQILKEHPVENTQLQNEKLYLYYLQNGRDMYVDQELDINRLSDYDVDHIVPQSFLKDDSIDNKVLTRSDKARGKSDNVPSEEVVKKMKNYWRQLLNAKLITQRKFDNLTKAERGGLSELDKAGFIKRQLVETRQITKHVAQILDSRMNTKYDENDKLIREVKVITLKSKLVSDFRKDFQFYKVREINNYHHAHDAYLNAVVGTALIKKYPKLESEFVYGDYKVYDVRKMIAKSEQEIGKATAKYFFYSNIMNFFKTEITLANGEIRKRPLIETNGETGEIVWDKGRDFATVRKVLSMPQVNIVKKTEVQTGGFSKESILPKRNSDKLIARKKDWDPKKYGGFDSPTVAYSVLVVAKVEKGKSKKLKSVKELLGITIMERSSFEKNPIDFLEAKGYKEVKKDLIIKLPKYSLFELENGRKRMLASAGELQKGNELALPSKYVNFLYLASHYEKLKGSPEDNEQKQLFVEQHKHYLDEIIEQISEFSKRVILADANLDKVLSAYNKHRDKPIREQAENIIHLFTLTNLGAPAAFKYFDTTIDRKRYTSTKEVLDATLIHQSITGLYETRIDLSQLGGDGGSGGSSGGSSGSETPGTSESATPESSGGSSGGSSGGTLNIEDEYRLHETSKEPDVSLGSTWLSDFPQAWAETGGMGLAVRQAPLIIPLKATSTPVSIKQYPMSQEARLGIKPHIQRLLDQGILVPCQSPWNTPLLPVKKPGTNDYRPVQDLREVNKRVEDIHPTVPNPYNLLSGLPPSHQWYTVLDLKDAFFCLRLHPTSQPLFAFEWRDPEMGISGQLTWTRLPQGFKNSPTLFNEALHRDLADFRIQHPDLILLQYVDDLLLAATSELDCQQGTRALLQTLGNLGYRASAKKAQICQKQVKYLGYLLKEGQRWLTEARKETVMGQPTPKTPRQLREFLGKAGFCRLFIPGFAEMAAPLYPLTKPGTLFNWGPDQQKAYQEIKQALLTAPALGLPDLTKPFELFVDEKQGYAKGVLTQKLGPWRRPVAYLSKKLDPVAAGWPPCLRMVAAIAVLTKDAGKLTMGQPLVILAPHAVEALVKQPPDRWLSNARMTHYQALLLDTDRVQFGPVVALNPATLLPLPEEGLQHNCLDILAEAHGTRPDLTDQPLPDADHTWYTDGSSLLQEGQRKAGAAVTTETEVIWAKALPAGTSAQRAELIALTQALKMAEGKKLNVYTDSRYAFATAHIHGEIYRRRGWLTSEGKEIKNKDEILALLKALFLPKRLSIIHCPGHQKGHSAEARGNRMADQAARKAAITETPDTSTLLIENSSPSGGSKRTADGSEFEAGKRTADGSEFEKRTADGSEFESPKKKAKVE

SEQ ID NO: 2893 - protein, 2116 aa, synthetic construct; identical to SEQ ID NO: 2701

SEQ ID NO: 2894 - protein, 2114 aa, synthetic construct; identical to SEQ ID NO: 2684

SEQ ID NO: 2895 - protein, 2114 aa, synthetic construct; identical to SEQ ID NO: 2622

SEQ ID NO: 2896 - protein, 2116 aa, synthetic construct; identical to SEQ ID NO: 2645

SEQ ID NO: 2897 - protein, 2116 aa, synthetic construct; identical to SEQ ID NO: 2658

SEQ ID NO: 2898 - protein, 2114 aa, synthetic construct; identical to SEQ ID NO: 2670

SEQ ID NO: 2899 - protein, 2110 aa, synthetic construct
MPAAKRVKLDGGDKKYSIGLDIGTNSVGWAVITDEYKVPSKKFKVLGNTDRHSIKKNLIGALLFDSGETAEATRLKRTARRRYTRRKNRICYLQEIFSNEMAKVDDSFFHRLEESFLVEEDKKHERHPIFGNIVDEVAYHEKYPTIYHLRKKLVDSTDKADLRLIYLALAHMIKFRGHFLIEGDLNPDNSDVDKLFIQLVQTYNQLFEENPINASGVDAKAILSARLSKSRRLENLIAQLPGEKKNGLFGNLIALSLGLTPNFKSNFDLAEDAKLQLSKDTYDDDLDNLLAQIGDQYADLFLAAKNLSDAILLSDILRVNTEITKAPLSASMIKRYDEHHQDLTLLKALVRQQLPEKYKEIFFDQSKNGYAGYIDGGASQEEFYKFIKPILEKMDGTEELLVKLNREDLLRKQRTFDNGSIPHQIHLGELHAILRRQEDFYPFLKDNREKIEKILTFRIPYYVGPLARGNSRFAWMTRKSEETITPWNFEEVVDKGASAQSFIERMTNFDKNLPNEKVLPKHSLLYEYFTVYNELTKVKYVTEGMRKPAFLSGEQKKAIVDLLFKTNRKVTVKQLKEDYFKKIECFDSVEISGVEDRFNASLGTYHDLLKIIKDKDFLDNEENEDILEDIVLTLTLFEDREMIEERLKTYAHLFDDKVMKQLKRRRYTGWGRLSRKLINGIRDKQSGKTILDFLKSDGFANRNFMQLIHDDSLTFKEDIQKAQVSGQGDSLHEHIANLAGSPAIKKGILQTVKVVDELVKVMGRHKPENIVIEMARENQTTQKGQKNSRERMKRIEEGIKELGSQILKEHPVENTQLQNEKLYLYYLQNGRDMYVDQELDINRLSDYDVDHIVPQSFLKDDSIDNKVLTRSDKARGKSDNVPSEEVVKKMKNYWRQLLNAKLITQRKFDNLTKAERGGLSELDKAGFIKRQLVETRQITKHVAQILDSRMNTKYDENDKLIREVKVITLKSKLVSDFRKDFQFYKVREINNYHHAHDAYLNAVVGTALIKKYPKLESEFVYGDYKVYDVRKMIAKSEQEIGKATAKYFFYSNIMNFFKTEITLANGEIRKRPLIETNGETGEIVWDKGRDFATVRKVLSMPQVNIVKKTEVQTGGFSKESILPKRNSDKLIARKKDWDPKKYGGFDSPTVAYSVLVVAKVEKGKSKKLKSVKELLGITIMERSSFEKNPIDFLEAKGYKEVKKDLIIKLPKYSLFELENGRKRMLASAGELQKGNELALPSKYVNFLYLASHYEKLKGSPEDNEQKQLFVEQHKHYLDEIIEQISEFSKRVILADANLDKVLSAYNKHRDKPIREQAENIIHLFTLTNLGAPAAFKYFDTTIDRKRYTSTKEVLDATLIHQSITGLYETRIDLSQLGGDGGGGGGGGGTLNIEDEYRLHETSKEPDVSLGSTWLSDFPQAWAETGGMGLAVRQAPLIIPLKATSTPVSIKQYPMSQEARLGIKPHIQRLLDQGILVPCQSPWNTPLLPVKKPGTNDYRPVQDLREVNKRVEDIHPTVPNPYNLLSGLPPSHQWYTVLDLKDAFFCLRLHPTSQPLFAFEWRDPEMGISGQLTWTRLPQGFKNSPTLFNEALHRDLADFRIQHPDLILLQYVDDLLLAATSELDCQQGTRALLQTLGNLGYRASAKKAQICQKQVKYLGYLLKEGQRWLTEARKETVMGQPTPKTPRQLREFLGKAGFCRLFIPGFAEMAAPLYPLTKPGTLFNWGPDQQKAYQEIKQALLTAPALGLPDLTKPFELFVDEKQGYAKGVLTQKLGPWRRPVAYLSKKLDPVAAGWPPCLRMVAAIAVLTKDAGKLTMGQPLVILAPHAVEALVKQPPDRWLSNARMTHYQALLLDTDRVQFGPVVALNPATLLPLPEEGLQHNCLDILAEAHGTRPDLTDQPLPDADHTWYTDGSSLLQEGQRKAGAAVTTETEVIWAKALPAGTSAQRAELIALTQALKMAEGKKLNVYTDSRYAFATAHIHGEIYRRRGWLTSEGKEIKNKDEILALLKALFLPKRLSIIHCPGHQKGHSAEARGNRMADQAARKAAITETPDTSTLLIENSSPSGGSKRTADGSEFEAGKRTADGSEFEKRTADGSEFESPKKKAKVE

SEQ ID NO: 2900 - protein, 2120 aa, synthetic construct; identical to SEQ ID NO: 2662

SEQ ID NO: 2901 - protein, 2116 aa, synthetic construct; identical to SEQ ID NO: 2629

SEQ ID NO: 2902 - protein, 2117 aa, synthetic construct; identical to SEQ ID NO: 2696

SEQ ID NO: 2903 - protein, 2114 aa, synthetic construct; identical to SEQ ID NO: 2634

SEQ ID NO: 2904 - protein, 2114 aa, synthetic construct; identical to SEQ ID NO: 2618

SEQ ID NO: 2905 - protein, 2111 aa, synthetic construct
MPAAKRVKLDGGDKKYSIGLDIGTNSVGWAVITDEYKVPSKKFKVLGNTDRHSIKKNLIGALLFDSGETAEATRLKRTARRRYTRRKNRICYLQEIFSNEMAKVDDSFFHRLEESFLVEEDKKHERHPIFGNIVDEVAYHEKYPTIYHLRKKLVDSTDKADLRLIYLALAHMIKFRGHFLIEGDLNPDNSDVDKLFIQLVQTYNQLFEENPINASGVDAKAILSARLSKSRRLENLIAQLPGEKKNGLFGNLIALSLGLTPNFKSNFDLAEDAKLQLSKDTYDDDLDNLLAQIGDQYADLFLAAKNLSDAILLSDILRVNTEITKAPLSASMIKRYDEHHQDLTLLKALVRQQLPEKYKEIFFDQSKNGYAGYIDGGASQEEFYKFIKPILEKMDGTEELLVKLNREDLLRKQRTFDNGSIPHQIHLGELHAILRRQEDFYPFLKDNREKIEKILTFRIPYYVGPLARGNSRFAWMTRKSEETITPWNFEEVVDKGASAQSFIERMTNFDKNLPNEKVLPKHSLLYEYFTVYNELTKVKYVTEGMRKPAFLSGEQKKAIVDLLFKTNRKVTVKQLKEDYFKKIECFDSVEISGVEDRFNASLGTYHDLLKIIKDKDFLDNEENEDILEDIVLTLTLFEDREMIEERLKTYAHLFDDKVMKQLKRRRYTGWGRLSRKLINGIRDKQSGKTILDFLKSDGFANRNFMQLIHDDSLTFKEDIQKAQVSGQGDSLHEHIANLAGSPAIKKGILQTVKVVDELVKVMGRHKPENIVIEMARENQTTQKGQKNSRERMKRIEEGIKELGSQILKEHPVENTQLQNEKLYLYYLQNGRDMYVDQELDINRLSDYDVDHIVPQSFLKDDSIDNKVLTRSDKARGKSDNVPSEEVVKKMKNYWRQLLNAKLITQRKFDNLTKAERGGLSELDKAGFIKRQLVETRQITKHVAQILDSRMNTKYDENDKLIREVKVITLKSKLVSDFRKDFQFYKVREINNYHHAHDAYLNAVVGTALIKKYPKLESEFVYGDYKVYDVRKMIAKSEQEIGKATAKYFFYSNIMNFFKTEITLANGEIRKRPLIETNGETGEIVWDKGRDFATVRKVLSMPQVNIVKKTEVQTGGFSKESILPKRNSDKLIARKKDWDPKKYGGFDSPTVAYSVLVVAKVEKGKSKKLKSVKELLGITIMERSSFEKNPIDFLEAKGYKEVKKDLIIKLPKYSLFELENGRKRMLASAGELQKGNELALPSKYVNFLYLASHYEKLKGSPEDNEQKQLFVEQHKHYLDEIIEQISEFSKRVILADANLDKVLSAYNKHRDKPIREQAENIIHLFTLTNLGAPAAFKYFDTTIDRKRYTSTKEVLDATLIHQSITGLYETRIDLSQLGGDGGGSSGSSGGTLNIEDEYRLHETSKEPDVSLGSTWLSDFPQAWAETGGMGLAVRQAPLIIPLKATSTPVSIKQYPMSQEARLGIKPHIQRLLDQGILVPCQSPWNTPLLPVKKPGTNDYRPVQDLREVNKRVEDIHPTVPNPYNLLSGLPPSHQWYTVLDLKDAFFCLRLHPTSQPLFAFEWRDPEMGISGQLTWTRLPQGFKNSPTLFNEALHRDLADFRIQHPDLILLQYVDDLLLAATSELDCQQGTRALLQTLGNLGYRASAKKAQICQKQVKYLGYLLKEGQRWLTEARKETVMGQPTPKTPRQLREFLGKAGFCRLFIPGFAEMAAPLYPLTKPGTLFNWGPDQQKAYQEIKQALLTAPALGLPDLTKPFELFVDEKQGYAKGVLTQKLGPWRRPVAYLSKKLDPVAAGWPPCLRMVAAIAVLTKDAGKLTMGQPLVILAPHAVEALVKQPPDRWLSNARMTHYQALLLDTDRVQFGPVVALNPATLLPLPEEGLQHNCLDILAEAHGTRPDLTDQPLPDADHTWYTDGSSLLQEGQRKAGAAVTTETEVIWAKALPAGTSAQRAELIALTQALKMAEGKKLNVYTDSRYAFATAHIHGEIYRRRGWLTSEGKEIKNKDEILALLKALFLPKRLSIIHCPGHQKGHSAEARGNRMADQAARKAAITETPDTSTLLIENSSPSGGSKRTADGSEFEAGKRTADGSEFEKRTADGSEFESPKKKAKVE

SEQ ID NO: 2906 - protein, 2111 aa, synthetic construct; identical to SEQ ID NO: 2643

SEQ ID NO: 2907 - protein, 2121 aa, synthetic construct; identical to SEQ ID NO: 2663

SEQ ID NO: 2908 - protein, 2113 aa, synthetic construct; identical to SEQ ID NO: 2626

SEQ ID NO: 2909 - protein, 2115 aa, synthetic construct; identical to SEQ ID NO: 2639

SEQ ID NO: 2910 - protein, 2111 aa, synthetic construct; identical to SEQ ID NO: 2671

SEQ ID NO: 2911 - protein, 2111 aa, synthetic construct; identical to SEQ ID NO: 2672

SEQ ID NO: 2912 - protein, 2116 aa, synthetic construct; identical to SEQ ID NO: 2703

SEQ ID NO: 2913 - protein, 2116 aa, synthetic construct; identical to SEQ ID NO: 2660

SEQ ID NO: 2914 - protein, 2111 aa, synthetic construct
MPAAKRVKLDGGDKKYSIGLDIGTNSVGWAVITDEYKVPSKKFKVLGNTDRHSIKKNLIGALLFDSGETAEATRLKRTARRRYTRRKNRICYLQEIFSNEMAKVDDSFFHRLEESFLVEEDKKHERHPIFGNIVDEVAYHEKYPTIYHLRKKLVDSTDKADLRLIYLALAHMIKFRGHFLIEGDLNPDNSDVDKLFIQLVQTYNQLFEENPINASGVDAKAILSARLSKSRRLENLIAQLPGEKKNGLFGNLIALSLGLTPNFKSNFDLAEDAKLQLSKDTYDDDLDNLLAQIGDQYADLFLAAKNLSDAILLSDILRVNTEITKAPLSASMIKRYDEHHQDLTLLKALVRQQLPEKYKEIFFDQSKNGYAGYIDGGASQEEFYKFIKPILEKMDGTEELLVKLNREDLLRKQRTFDNGSIPHQIHLGELHAILRRQEDFYPFLKDNREKIEKILTFRIPYYVGPLARGNSRFAWMTRKSEETITPWNFEEVVDKGASAQSFIERMTNFDKNLPNEKVLPKHSLLYEYFTVYNELTKVKYVTEGMRKPAFLSGEQKKAIVDLLFKTNRKVTVKQLKEDYFKKIECFDSVEISGVEDRFNASLGTYHDLLKIIKDKDFLDNEENEDILEDIVLTLTLFEDREMIEERLKTYAHLFDDKVMKQLKRRRYTGWGRLSRKLINGIRDKQSGKTILDFLKSDGFANRNFMQLIHDDSLTFKEDIQKAQVSGQGDSLHEHIANLAGSPAIKKGILQTVKVVDELVKVMGRHKPENIVIEMARENQTTQKGQKNSRERMKRIEEGIKELGSQILKEHPVENTQLQNEKLYLYYLQNGRDMYVDQELDINRLSDYDVDHIVPQSFLKDDSIDNKVLTRSDKARGKSDNVPSEEVVKKMKNYWRQLLNAKLITQRKFDNLTKAERGGLSELDKAGFIKRQLVETRQITKHVAQILDSRMNTKYDENDKLIREVKVITLKSKLVSDFRKDFQFYKVREINNYHHAHDAYLNAVVGTALIKKYPKLESEFVYGDYKVYDVRKMIAKSEQEIGKATAKYFFYSNIMNFFKTEITLANGEIRKRPLIETNGETGEIVWDKGRDFATVRKVLSMPQVNIVKKTEVQTGGFSKESILPKRNSDKLIARKKDWDPKKYGGFDSPTVAYSVLVVAKVEKGKSKKLKSVKELLGITIMERSSFEKNPIDFLEAKGYKEVKKDLIIKLPKYSLFELENGRKRMLASAGELQKGNELALPSKYVNFLYLASHYEKLKGSPEDNEQKQLFVEQHKHYLDEIIEQISEFSKRVILADANLDKVLSAYNKHRDKPIREQAENIIHLFTLTNLGAPAAFKYFDTTIDRKRYTSTKEVLDATLIHQSITGLYETRIDLSQLGGDGGGGSGSSGGTLNIEDEYRLHETSKEPDVSLGSTWLSDFPQAWAETGGMGLAVRQAPLIIPLKATSTPVSIKQYPMSQEARLGIKPHIQRLLDQGILVPCQSPWNTPLLPVKKPGTNDYRPVQDLREVNKRVEDIHPTVPNPYNLLSGLPPSHQWYTVLDLKDAFFCLRLHPTSQPLFAFEWRDPEMGISGQLTWTRLPQGFKNSPTLFNEALHRDLADFRIQHPDLILLQYVDDLLLAATSELDCQQGTRALLQTLGNLGYRASAKKAQICQKQVKYLGYLLKEGQRWLTEARKETVMGQPTPKTPRQLREFLGKAGFCRLFIPGFAEMAAPLYPLTKPGTLFNWGPDQQKAYQEIKQALLTAPALGLPDLTKPFELFVDEKQGYAKGVLTQKLGPWRRPVAYLSKKLDPVAAGWPPCLRMVAAIAVLTKDAGKLTMGQPLVILAPHAVEALVKQPPDRWLSNARMTHYQALLLDTDRVQFGPVVALNPATLLPLPEEGLQHNCLDILAEAHGTRPDLTDQPLPDADHTWYTDGSSLLQEGQRKAGAAVTTETEVIWAKALPAGTSAQRAELIALTQALKMAEGKKLNVYTDSRYAFATAHIHGEIYRRRGWLTSEGKEIKNKDEILALLKALFLPKRLSIIHCPGHQKGHSAEARGNRMADQAARKAAITETPDTSTLLIENSSPSGGSKRTADGSEFEAGKRTADGSEFEKRTADGSEFESPKKKAKVE

SEQ ID NO: 2915 - protein, 2116 aa, synthetic construct; identical to SEQ ID NO: 2668

SEQ ID NO: 2916 - protein, 2113 aa, synthetic construct
MPAAKRVKLDGGDKKYSIGLDIGTNSVGWAVITDEYKVPSKKFKVLGNTDRHSIKKNLIGALLFDSGETAEATRLKRTARRRYTRRKNRICYLQEIFSNEMAKVDDSFFHRLEESFLVEEDKKHERHPIFGNIVDEVAYHEKYPTIYHLRKKLVDSTDKADLRLIYLALAHMIKFRGHFLIEGDLNPDNSDVDKLFIQLVQTYNQLFEENPINASGVDAKAILSARLSKSRRLENLIAQLPGEKKNGLFGNLIALSLGLTPNFKSNFDLAEDAKLQLSKDTYDDDLDNLLAQIGDQYADLFLAAKNLSDAILLSDILRVNTEITKAPLSASMIKRYDEHHQDLTLLKALVRQQLPEKYKEIFFDQSKNGYAGYIDGGASQEEFYKFIKPILEKMDGTEELLVKLNREDLLRKQRTFDNGSIPHQIHLGELHAILRRQEDFYPFLKDNREKIEKILTFRIPYYVGPLARGNSRFAWMTRKSEETITPWNFEEVVDKGASAQSFIERMTNFDKNLPNEKVLPKHSLLYEYFTVYNELTKVKYVTEGMRKPAFLSGEQKKAIVDLLFKTNRKVTVKQLKEDYFKKIECFDSVEISGVEDRFNASLGTYHDLLKIIKDKDFLDNEENEDILEDIVLTLTLFEDREMIEERLKTYAHLFDDKVMKQLKRRRYTGWGRLSRKLINGIRDKQSGKTILDFLKSDGFANRNFMQLIHDDSLTFKEDIQKAQVSGQGDSLHEHIANLAGSPAIKKGILQTVKVVDELVKVMGRHKPENIVIEMARENQTTQKGQKNSRERMKRIEEGIKELGSQILKEHPVENTQLQNEKLYLYYLQNGRDMYVDQELDINRLSDYDVDHIVPQSFLKDDSIDNKVLTRSDKARGKSDNVPSEEVVKKMKNYWRQLLNAKLITQRKFDNLTKAERGGLSELDKAGFIKRQLVETRQITKHVAQILDSRMNTKYDENDKLIREVKVITLKSKLVSDFRKDFQFYKVREINNYHHAHDAYLNAVVGTALIKKYPKLESEFVYGDYKVYDVRKMIAKSEQEIGKATAKYFFYSNIMNFFKTEITLANGEIRKRPLIETNGETGEIVWDKGRDFATVRKVLSMPQVNIVKKTEVQTGGFSKESILPKRNSDKLIARKKDWDPKKYGGFDSPTVAYSVLVVAKVEKGKSKKLKSVKELLGITIMERSSFEKNPIDFLEAKGYKEVKKDLIIKLPKYSLFELENGRKRMLASAGELQKGNELALPSKYVNFLYLASHYEKLKGSPEDNEQKQLFVEQHKHYLDEIIEQISEFSKRVILADANLDKVLSAYNKHRDKPIREQAENIIHLFTLTNLGAPAAFKYFDTTIDRKRYTSTKEVLDATLIHQSITGLYETRIDLSQLGGDGGGSSEAAAKGGTLNIEDEYRLHETSKEPDVSLGSTWLSDFPQAWAETGGMGLAVRQAPLIIPLKATSTPVSIKQYPMSQEARLGIKPHIQRLLDQGILVPCQSPWNTPLLPVKKPGTNDYRPVQDLREVNKRVEDIHPTVPNPYNLLSGLPPSHQWYTVLDLKDAFFCLRLHPTSQPLFAFEWRDPEMGISGQLTWTRLPQGFKNSPTLFNEALHRDLADFRIQHPDLILLQYVDDLLLAATSELDCQQGTRALLQTLGNLGYRASAKKAQICQKQVKYLGYLLKEGQRWLTEARKETVMGQPTPKTPRQLREFLGKAGFCRLFIPGFAEMAAPLYPLTKPGTLFNWGPDQQKAYQEIKQALLTAPALGLPDLTKPFELFVDEKQGYAKGVLTQKLGPWRRPVAYLSKKLDPVAAGWPPCLRMVAAIAVLTKDAGKLTMGQPLVILAPHAVEALVKQPPDRWLSNARMTHYQALLLDTDRVQFGPVVALNPATLLPLPEEGLQHNCLDILAEAHGTRPDLTDQPLPDADHTWYTDGSSLLQEGQRKAGAAVTTETEVIWAKALPAGTSAQRAELIALTQALKMAEGKKLNVYTDSRYAFATAHIHGEIYRRRGWLTSEGKEIKNKDEILALLKALFLPKRLSIIHCPGHQKGHSAEARGNRMADQAARKAAITETPDTSTLLIENSSPSGGSKRTADGSEFEAGKRTADGSEFEKRTADGSEFESPKKKAKVE

SEQ ID NO: 2917 - protein, 2123 aa, synthetic construct
MPAAKRVKLDGGDKKYSIGLDIGTNSVGWAVITDEYKVPSKKFKVLGNTDRHSIKKNLIGALLFDSGETAEATRLKRTARRRYTRRKNRICYLQEIFSNEMAKVDDSFFHRLEESFLVEEDKKHERHPIFGNIVDEVAYHEKYPTIYHLRKKLVDSTDKADLRLIYLALAHMIKFRGHFLIEGDLNPDNSDVDKLFIQLVQTYNQLFEENPINASGVDAKAILSARLSKSRRLENLIAQLPGEKKNGLFGNLIALSLGLTPNFKSNFDLAEDAKLQLSKDTYDDDLDNLLAQIGDQYADLFLAAKNLSDAILLSDILRVNTEITKAPLSASMIKRYDEHHQDLTLLKALVRQQLPEKYKEIFFDQSKNGYAGYIDGGASQEEFYKFIKPILEKMDGTEELLVKLNREDLLRKQRTFDNGSIPHQIHLGELHAILRRQEDFYPFLKDNREKIEKILTFRIPYYVGPLARGNSRFAWMTRKSEETITPWNFEEVVDKGASAQSFIERMTNFDKNLPNEKVLPKHSLLYEYFTVYNELTKVKYVTEGMRKPAFLSGEQKKAIVDLLFKTNRKVTVKQLKEDYFKKIECFDSVEISGVEDRFNASLGTYHDLLKIIKDKDFLDNEENEDILEDIVLTLTLFEDREMIEERLKTYAHLFDDKVMKQLKRRRYTGWGRLSRKLINGIRDKQSGKTILDFLKSDGFANRNFMQLIHDDSLTFKEDIQKAQVSGQGDSLHEHIANLAGSPAIKKGILQTVKVVDELVKVMGRHKPENIVIEMARENQTTQKGQKNSRERMKRIEEGIKELGSQILKEHPVENTQLQNEKLYLYYLQNGRDMYVDQELDINRLSDYDVDHIVPQSFLKDDSIDNKVLTRSDKARGKSDNVPSEEVVKKMKNYWRQLLNAKLITQRKFDNLTKAERGGLSELDKAGFIKRQLVETRQITKHVAQILDSRMNTKYDENDKLIREVKVITLKSKLVSDFRKDFQFYKVREINNYHHAHDAYLNAVVGTALIKKYPKLESEFVYGDYKVYDVRKMIAKSEQEIGKATAKYFFYSNIMNFFKTEITLANGEIRKRPLIETNGETGEIVWDKGRDFATVRKVLSMPQVNIVKKTEVQTGGFSKESILPKRNSDKLIARKKDWDPKKYGGFDSPTVAYSVLVVAKVEKGKSKKLKSVKELLGITIMERSSFEKNPIDFLEAKGYKEVKKDLIIKLPKYSLFELENGRKRMLASAGELQKGNELALPSKYVNFLYLASHYEKLKGSPEDNEQKQLFVEQHKHYLDEIIEQISEFSKRVILADANLDKVLSAYNKHRDKPIREQAENIIHLFTLTNLGAPAAFKYFDTTIDRKRYTSTKEVLDATLIHQSITGLYETRIDLSQLGGDGGGGSGGSGGSGGSGGSGGSGGTLNIEDEYRLHETSKEPDVSLGSTWLSDFPQAWAETGGMGLAVRQAPLIIPLKATSTPVSIKQYPMSQEARLGIKPHIQRLLDQGILVPCQSPWNTPLLPVKKPGTNDYRPVQDLREVNKRVEDIHPTVPNPYNLLSGLPPSHQWYTVLDLKDAFFCLRLHPTSQPLFAFEWRDPEMGISGQLTWTRLPQGFKNSPTLFNEALHRDLADFRIQHPDLILLQYVDDLLLAATSELDCQQGTRALLQTLGNLGYRASAKKAQICQKQVKYLGYLLKEGQRWLTEARKETVMGQPTPKTPRQLREFLGKAGFCRLFIPGFAEMAAPLYPLTKPGTLFNWGPDQQKAYQEIKQALLTAPALGLPDLTKPFELFVDEKQGYAKGVLTQKLGPWRRPVAYLSKKLDPVAAGWPPCLRMVAAIAVLTKDAGKLTMGQPLVILAPHAVEALVKQPPDRWLSNARMTHYQALLLDTDRVQFGPVVALNPATLLPLPEEGLQHNCLDILAEAHGTRPDLTDQPLPDADHTWYTDGSSLLQEGQRKAGAAVTTETEVIWAKALPAGTSAQRAELIALTQALKMAEGKKLNVYTDSRYAFATAHIHGEIYRRRGWLTSEGKEIKNKDEILALLKALFLPKRLSIIHCPGHQKGHSAEARGNRMADQAARKAAITETPDTSTLLIENSSPSGGSKRTADGSEFEAGKRTADGSEFEKRTADGSEFESPKKKAKVE

SEQ ID NO: 2918 - protein, 2114 aa, synthetic construct
MPAAKRVKLDGGDKKYSIGLDIGTNSVGWAVITDEYKVPSKKFKVLGNTDRHSIKKNLIGALLFDSGETAEATRLKRTARRRYTRRKNRICYLQEIFSNEMAKVDDSFFHRLEESFLVEEDKKHERHPIFGNIVDEVAYHEKYPTIYHLRKKLVDSTDKADLRLIYLALAHMIKFRGHFLIEGDLNPDNSDVDKLFIQLVQTYNQLFEENPINASGVDAKAILSARLSKSRRLENLIAQLPGEKKNGLFGNLIALSLGLTPNFKSNFDLAEDAKLQLSKDTYDDDLDNLLAQIGDQYADLFLAAKNLSDAILLSDILRVNTEITKAPLSASMIKRYDEHHQDLTLLKALVRQQLPEKYKEIFFDQSKNGYAGYIDGGASQEEFYKFIKPILEKMDGTEELLVKLNREDLLRKQRTFDNGSIPHQIHLGELHAILRRQEDFYPFLKDNREKIEKILTFRIPYYVGPLARGNSRFAWMTRKSEETITPWNFEEVVDKGASAQSFIERMTNFDKNLPNEKVLPKHSLLYEYFTVYNELTKVKYVTEGMRKPAFLSGEQKKAIVDLLFKTNRKVTVKQLKEDYFKKIECFDSVEISGVEDRFNASLGTYHDLLKIIKDKDFLDNEENEDILEDIVLTLTLFEDREMIEERLKTYAHLFDDKVMKQLKRRRYTGWGRLSRKLINGIRDKQSGKTILDFLKSDGFANRNFMQLIHDDSLTFKEDIQKAQVSGQGDSLHEHIANLAGSPAIKKGILQTVKVVDELVKVMGRHKPENIVIEMARENQTTQKGQKNSRERMKRIEEGIKELGSQILKEHPVENTQLQNEKLYLYYLQNGRDMYVDQELDINRLSDYDVDHIVPQSFLKDDSIDNKVLTRSDKARGKSDNVPSEEVVKKMKNYWRQLLNAKLITQRKFDNLTKAERGGLSELDKAGFIKRQLVETRQITKHVAQILDSRMNTKYDENDKLIREVKVITLKSKLVSDFRKDFQFYKVREINNYHHAHDAYLNAVVGTALIKKYPKLESEFVYGDYKVYDVRKMIAKSEQEIGKATAKYFFYSNIMNFFKTEITLANGEIRKRPLIETNGETGEIVWDKGRDFATVRKVLSMPQVNIVKKTEVQTGGFSKESILPKRNSDKLIARKKDWDPKKYGGFDSPTVAYSVLVVAKVEKGKSKKLKSVKELLGITIMERSSFEKNPIDFLEAKGYKEVKKDLIIKLPKYSLFELENGRKRMLASAGELQKGNELALPSKYVNFLYLASHYEKLKGSPEDNEQKQLFVEQHKHYLDEIIEQISEFSKRVILADANLDKVLSAYNKHRDKPIREQAENIIHLFTLTNLGAPAAFKYFDTTIDRKRYTSTKEVLDATLIHQSITGLYETRIDLSQLGGDGGGGGGGSPAPGGTLNIEDEYRLHETSKEPDVSLGSTWLSDFPQAWAETGGMGLAVRQAPLIIPLKATSTPVSIKQYPMSQEARLGIKPHIQRLLDQGILVPCQSPWNTPLLPVKKPGTNDYRPVQDLREVNKRVEDIHPTVPNPYNLLSGLPPSHQWYTVLDLKDAFFCLRLHPTSQPLFAFEWRDPEMGISGQLTWTRLPQGFKNSPTLFNEALHRDLADFRIQHPDLILLQYVDDLLLAATSELDCQQGTRALLQTLGNLGYRASAKKAQICQKQVKYLGYLLKEGQRWLTEARKETVMGQPTPKTPRQLREFLGKAGFCRLFIPGFAEMAAPLYPLTKPGTLFNWGPDQQKAYQEIKQALLTAPALGLPDLTKPFELFVDEKQGYAKGVLTQKLGPWRRPVAYLSKKLDPVAAGWPPCLRMVAAIAVLTKDAGKLTMGQPLVILAPHAVEALVKQPPDRWLSNARMTHYQALLLDTDRVQFGPVVALNPATLLPLPEEGLQHNCLDILAEAHGTRPDLTDQPLPDADHTWYTDGSSLLQEGQRKAGAAVTTETEVIWAKALPAGTSAQRAELIALTQALKMAEGKKLNVYTDSRYAFATAHIHGEIYRRRGWLTSEGKEIKNKDEILALLKALFLPKRLSIIHCPGHQKGHSAEARGNRMADQAARKAAITETPDTSTLLIENSSPSGGSKRTADGSEFEAGKRTADGSEFEKRTADGSEFESPKKKAKVE

SEQ ID NO: 2919 - protein, 2116 aa, synthetic construct; identical to SEQ ID NO: 2690

SEQ ID NO: 2920 - protein, 2116 aa, synthetic construct; identical to SEQ ID NO: 2648

SEQ ID NO: 2921 - protein, 2114 aa, synthetic construct; identical to SEQ ID NO: 2616

SEQ ID NO: 2922 - protein, 2116 aa, synthetic construct; identical to SEQ ID NO: 2666

SEQ ID NO: 2923 - protein, 2111 aa, synthetic construct
MPAAKRVKLDGGDKKYSIGLDIGTNSVGWAVITDEYKVPSKKFKVLGNTDRHSIKKNLIGALLFDSGETAEATRLKRTARRRYTRRKNRICYLQEIFSNEMAKVDDSFFHRLEESFLVEEDKKHERHPIFGNIVDEVAYHEKYPTIYHLRKKLVDSTDKADLRLIYLALAHMIKFRGHFLIEGDLNPDNSDVDKLFIQLVQTYNQLFEENPINASGVDAKAILSARLSKSRRLENLIAQLPGEKKNGLFGNLIALSLGLTPNFKSNFDLAEDAKLQLSKDTYDDDLDNLLAQIGDQYADLFLAAKNLSDAILLSDILRVNTEITKAPLSASMIKRYDEHHQDLTLLKALVRQQLPEKYKEIFFDQSKNGYAGYIDGGASQEEFYKFIKPILEKMDGTEELLVKLNREDLLRKQRTFDNGSIPHQIHLGELHAILRRQEDFYPFLKDNREKIEKILTFRIPYYVGPLARGNSRFAWMTRKSEETITPWNFEEVVDKGASAQSFIERMTNFDKNLPNEKVLPKHSLLYEYFTVYNELTKVKYVTEGMRKPAFLSGEQKKAIVDLLFKTNRKVTVKQLKEDYFKKIECFDSVEISGVEDRFNASLGTYHDLLKIIKDKDFLDNEENEDILEDIVLTLTLFEDREMIEERLKTYAHLFDDKVMKQLKRRRYTGWGRLSRKLINGIRDKQSGKTILDFLKSDGFANRNFMQLIHDDSLTFKEDIQKAQVSGQGDSLHEHIANLAGSPAIKKGILQTVKVVDELVKVMGRHKPENIVIEMARENQTTQKGQKNSRERMKRIEEGIKELGSQILKEHPVENTQLQNEKLYLYYLQNGRDMYVDQELDINRLSDYDVDHIVPQSFLKDDSIDNKVLTRSDKARGKSDNVPSEEVVKKMKNYWRQLLNAKLITQRKFDNLTKAERGGLSELDKAGFIKRQLVETRQITKHVAQILDSRMNTKYDENDKLIREVKVITLKSKLVSDFRKDFQFYKVREINNYHHAHDAYLNAVVGTALIKKYPKLESEFVYGDYKVYDVRKMIAKSEQEIGKATAKYFFYSNIMNFFKTEITLANGEIRKRPLIETNGETGEIVWDKGRDFATVRKVLSMPQVNIVKKTEVQTGGFSKESILPKRNSDKLIARKKDWDPKKYGGFDSPTVAYSVLVVAKVEKGKSKKLKSVKELLGITIMERSSFEKNPIDFLEAKGYKEVKKDLIIKLPKYSLFELENGRKRMLASAGELQKGNELALPSKYVNFLYLASHYEKLKGSPEDNEQKQLFVEQHKHYLDEIIEQISEFSKRVILADANLDKVLSAYNKHRDKPIREQAENIIHLFTLTNLGAPAAFKYFDTTIDRKRYTSTKEVLDATLIHQSITGLYETRIDLSQLGGDGGPAPGGGGGTLNIEDEYRLHETSKEPDVSLGSTWLSDFPQAWAETGGMGLAVRQAPLIIPLKATSTPVSIKQYPMSQEARLGIKPHIQRLLDQGILVPCQSPWNTPLLPVKKPGTNDYRPVQDLREVNKRVEDIHPTVPNPYNLLSGLPPSHQWYTVLDLKDAFFCLRLHPTSQPLFAFEWRDPEMGISGQLTWTRLPQGFKNSPTLFNEALHRDLADFRIQHPDLILLQYVDDLLLAATSELDCQQGTRALLQTLGNLGYRASAKKAQICQKQVKYLGYLLKEGQRWLTEARKETVMGQPTPKTPRQLREFLGKAGFCRLFIPGFAEMAAPLYPLTKPGTLFNWGPDQQKAYQEIKQALLTAPALGLPDLTKPFELFVDEKQGYAKGVLTQKLGPWRRPVAYLSKKLDPVAAGWPPCLRMVAAIAVLTKDAGKLTMGQPLVILAPHAVEALVKQPPDRWLSNARMTHYQALLLDTDRVQFGPVVALNPATLLPLPEEGLQHNCLDILAEAHGTRPDLTDQPLPDADHTWYTDGSSLLQEGQRKAGAAVTTETEVIWAKALPAGTSAQRAELIALTQALKMAEGKKLNVYTDSRYAFATAHIHGEIYRRRGWLTSEGKEIKNKDEILALLKALFLPKRLSIIHCPGHQKGHSAEARGNRMADQAARKAAITETPDTSTLLIENSSPSGGSKRTADGSEFEAGKRTADGSEFEKRTADGSEFESPKKKAKVE

SEQ ID NO: 2924 - protein, 2116 aa, synthetic construct
MPAAKRVKLDGGDKKYSIGLDIGTNSVGWAVITDEYKVPSKKFKVLGNTDRHSIKKNLIGALLFDSGETAEATRLKRTARRRYTRRKNRICYLQEIFSNEMAKVDDSFFHRLEESFLVEEDKKHERHPIFGNIVDEVAYHEKYPTIYHLRKKLVDSTDKADLRLIYLALAHMIKFRGHFLIEGDLNPDNSDVDKLFIQLVQTYNQLFEENPINASGVDAKAILSARLSKSRRLENLIAQLPGEKKNGLFGNLIALSLGLTPNFKSNFDLAEDAKLQLSKDTYDDDLDNLLAQIGDQYADLFLAAKNLSDAILLSDILRVNTEITKAPLSASMIKRYDEHHQDLTLLKALVRQQLPEKYKEIFFDQSKNGYAGYIDGGASQEEFYKFIKPILEKMDGTEELLVKLNREDLLRKQRTFDNGSIPHQIHLGELHAILRRQEDFYPFLKDNREKIEKILTFRIPYYVGPLARGNSRFAWMTRKSEETITPWNFEEVVDKGASAQSFIERMTNFDKNLPNEKVLPKHSLLYEYFTVYNELTKVKYVTEGMRKPAFLSGEQKKAIVDLLFKTNRKVTVKQLKEDYFKKIECFDSVEISGVEDRFNASLGTYHDLLKIIKDKDFLDNEENEDILEDIVLTLTLFEDREMIEERLKTYAHLFDDKVMKQLKRRRYTGWGRLSRKLINGIRDKQSGKTILDFLKSDGFANRNFMQLIHDDSLTFKEDIQKAQVSGQGDSLHEHIANLAGSPAIKKGILQTVKVVDELVKVMGRHKPENIVIEMARENQTTQKGQKNSRERMKRIEEGIKELGSQILKEHPVENTQLQNEKLYLYYLQNGRDMYVDQELDINRLSDYDVDHIVPQSFLKDDSIDNKVLTRSDKARGKSDNVPSEEVVKKMKNYWRQLLNAKLITQRKFDNLTKAERGGLSELDKAGFIKRQLVETRQITKHVAQILDSRMNTKYDENDKLIREVKVITLKSKLVSDFRKDFQFYKVREINNYHHAHDAYLNAVVGTALIKKYPKLESEFVYGDYKVYDVRKMIAKSEQEIGKATAKYFFYSNIMNFFKTEITLANGEIRKRPLIETNGETGEIVWDKGRDFATVRKVLSMPQVNIVKKTEVQTGGFSKESILPKRNSDKLIARKKDWDPKKYGGFDSPTVAYSVLVVAKVEKGKSKKLKSVKELLGITIMERSSFEKNPIDFLEAKGYKEVKKDLIIKLPKYSLFELENGRKRMLASAGELQKGNELALPSKYVNFLYLASHYEKLKGSPEDNEQKQLFVEQHKHYLDEIIEQISEFSKRVILADANLDKVLSAYNKHRDKPIREQAENIIHLFTLTNLGAPAAFKYFDTTIDRKRYTSTKEVLDATLIHQSITGLYETRIDLSQLGGDGGPAPEAAAKGGSGGTLNIEDEYRLHETSKEPDVSLGSTWLSDFPQAWAETGGMGLAVRQAPLIIPLKATSTPVSIKQYPMSQEARLGIKPHIQRLLDQGILVPCQSPWNTPLLPVKKPGTNDYRPVQDLREVNKRVEDIHPTVPNPYNLLSGLPPSHQWYTVLDLKDAFFCLRLHPTSQPLFAFEWRDPEMGISGQLTWTRLPQGFKNSPTLFNEALHRDLADFRIQHPDLILLQYVDDLLLAATSELDCQQGTRALLQTLGNLGYRASAKKAQICQKQVKYLGYLLKEGQRWLTEARKETVMGQPTPKTPRQLREFLGKAGFCRLFIPGFAEMAAPLYPLTKPGTLFNWGPDQQKAYQEIKQALLTAPALGLPDLTKPFELFVDEKQGYAKGVLTQKLGPWRRPVAYLSKKLDPVAAGWPPCLRMVAAIAVLTKDAGKLTMGQPLVILAPHAVEALVKQPPDRWLSNARMTHYQALLLDTDRVQFGPVVALNPATLLPLPEEGLQHNCLDILAEAHGTRPDLTDQPLPDADHTWYTDGSSLLQEGQRKAGAAVTTETEVIWAKALPAGTSAQRAELIALTQALKMAEGKKLNVYTDSRYAFATAHIHGEIYRRRGWLTSEGKEIKNKDEILALLKALFLPKRLSIIHCPGHQKGHSAEARGNRMADQAARKAAITETPDTSTLLIENSSPSGGSKRTADGSEFEAGKRTADGSEFEKRTADGSEFESPKKKAKVE

SEQ ID NO: 2925 - protein, 2116 aa, synthetic construct; identical to SEQ ID NO: 2628

SEQ ID NO: 2926 - protein, 2116 aa, synthetic construct; identical to SEQ ID NO: 2640

SEQ ID NO: 2927 - protein, 2109 aa, synthetic construct
MPAAKRVKLDGGDKKYSIGLDIGTNSVGWAVITDEYKVPSKKFKVLGNTDRHSIKKNLIGALLFDSGETAEATRLKRTARRRYTRRKNRICYLQEIFSNEMAKVDDSFFHRLEESFLVEEDKKHERHPIFGNIVDEVAYHEKYPTIYHLRKKLVDSTDKADLRLIYLALAHMIKFRGHFLIEGDLNPDNSDVDKLFIQLVQTYNQLFEENPINASGVDAKAILSARLSKSRRLENLIAQLPGEKKNGLFGNLIALSLGLTPNFKSNFDLAEDAKLQLSKDTYDDDLDNLLAQIGDQYADLFLAAKNLSDAILLSDILRVNTEITKAPLSASMIKRYDEHHQDLTLLKALVRQQLPEKYKEIFFDQSKNGYAGYIDGGASQEEFYKFIKPILEKMDGTEELLVKLNREDLLRKQRTFDNGSIPHQIHLGELHAILRRQEDFYPFLKDNREKIEKILTFRIPYYVGPLARGNSRFAWMTRKSEETITPWNFEEVVDKGASAQSFIERMTNFDKNLPNEKVLPKHSLLYEYFTVYNELTKVKYVTEGMRKPAFLSGEQKKAIVDLLFKTNRKVTVKQLKEDYFKKIECFDSVEISGVEDRFNASLGTYHDLLKIIKDKDFLDNEENEDILEDIVLTLTLFEDREMIEERLKTYAHLFDDKVMKQLKRRRYTGWGRLSRKLINGIRDKQSGKTILDFLKSDGFANRNFMQLIHDDSLTFKEDIQKAQVSGQGDSLHEHIANLAGSPAIKKGILQTVKVVDELVKVMGRHKPENIVIEMARENQTTQKGQKNSRERMKRIEEGIKELGSQILKEHPVENTQLQNEKLYLYYLQNGRDMYVDQELDINRLSDYDVDHIVPQSFLKDDSIDNKVLTRSDKARGKSDNVPSEEVVKKMKNYWRQLLNAKLITQRKFDNLTKAERGGLSELDKAGFIKRQLVETRQITKHVAQILDSRMNTKYDENDKLIREVKVITLKSKLVSDFRKDFQFYKVREINNYHHAHDAYLNAVVGTALIKKYPKLESEFVYGDYKVYDVRKMIAKSEQEIGKATAKYFFYSNIMNFFKTEITLANGEIRKRPLIETNGETGEIVWDKGRDFATVRKVLSMPQVNIVKKTEVQTGGFSKESILPKRNSDKLIARKKDWDPKKYGGFDSPTVAYSVLVVAKVEKGKSKKLKSVKELLGITIMERSSFEKNPIDFLEAKGYKEVKKDLIIKLPKYSLFELENGRKRMLASAGELQKGNELALPSKYVNFLYLASHYEKLKGSPEDNEQKQLFVEQHKHYLDEIIEQISEFSKRVILADANLDKVLSAYNKHRDKPIREQAENIIHLFTLTNLGAPAAFKYFDTTIDRKRYTSTKEVLDATLIHQSITGLYETRIDLSQLGGDGGGGGGGGTLNIEDEYRLHETSKEPDVSLGSTWLSDFPQAWAETGGMGLAVRQAPLIIPLKATSTPVSIKQYPMSQEARLGIKPHIQRLLDQGILVPCQSPWNTPLLPVKKPGTNDYRPVQDLREVNKRVEDIHPTVPNPYNLLSGLPPSHQWYTVLDLKDAFFCLRLHPTSQPLFAFEWRDPEMGISGQLTWTRLPQGFKNSPTLFNEALHRDLADFRIQHPDLILLQYVDDLLLAATSELDCQQGTRALLQTLGNLGYRASAKKAQICQKQVKYLGYLLKEGQRWLTEARKETVMGQPTPKTPRQLREFLGKAGFCRLFIPGFAEMAAPLYPLTKPGTLFNWGPDQQKAYQEIKQALLTAPALGLPDLTKPFELFVDEKQGYAKGVLTQKLGPWRRPVAYLSKKLDPVAAGWPPCLRMVAAIAVLTKDAGKLTMGQPLVILAPHAVEALVKQPPDRWLSNARMTHYQALLLDTDRVQFGPVVALNPATLLPLPEEGLQHNCLDILAEAHGTRPDLTDQPLPDADHTWYTDGSSLLQEGQRKAGAAVTTETEVIWAKALPAGTSAQRAELIALTQALKMAEGKKLNVYTDSRYAFATAHIHGEIYRRRGWLTSEGKEIKNKDEILALLKALFLPKRLSIIHCPGHQKGHSAEARGNRMADQAARKAAITETPDTSTLLIENSSPSGGSKRTADGSEFEAGKRTADGSEFEKRTADGSEFESPKKKAKVE

SEQ ID NO: 2928 - protein, 2116 aa, synthetic construct
MPAAKRVKLDGGDKKYSIGLDIGTNSVGWAVITDEYKVPSKKFKVLGNTDRHSIKKNLIGALLFDSGETAEATRLKRTARRRYTRRKNRICYLQEIFSNEMAKVDDSFFHRLEESFLVEEDKKHERHPIFGNIVDEVAYHEKYPTIYHLRKKLVDSTDKADLRLIYLALAHMIKFRGHFLIEGDLNPDNSDVDKLFIQLVQTYNQLFEENPINASGVDAKAILSARLSKSRRLENLIAQLPGEKKNGLFGNLIALSLGLTPNFKSNFDLAEDAKLQLSKDTYDDDLDNLLAQIGDQYADLFLAAKNLSDAILLSDILRVNTEITKAPLSASMIKRYDEHHQDLTLLKALVRQQLPEKYKEIFFDQSKNGYAGYIDGGASQEEFYKFIKPILEKMDGTEELLVKLNREDLLRKQRTFDNGSIPHQIHLGELHAILRRQEDFYPFLKDNREKIEKILTFRIPYYVGPLARGNSRFAWMTRKSEETITPWNFEEVVDKGASAQSFIERMTNFDKNLPNEKVLPKHSLLYEYFTVYNELTKVKYVTEGMRKPAFLSGEQKKAIVDLLFKTNRKVTVKQLKEDYFKKIECFDSVEISGVEDRFNASLGTYHDLLKIIKDKDFLDNEENEDILEDIVLTLTLFEDREMIEERLKTYAHLFDDKVMKQLKRRRYTGWGRLSRKLINGIRDKQSGKTILDFLKSDGFANRNFMQLIHDDSLTFKEDIQKAQVSGQGDSLHEHIANLAGSPAIKKGILQTVKVVDELVKVMGRHKPENIVIEMARENQTTQKGQKNSRERMKRIEEGIKELGSQILKEHPVENTQLQNEKLYLYYLQNGRDMYVDQELDINRLSDYDVDHIVPQSFLKDDSIDNKVLTRSDKARGKSDNVPSEEVVKKMKNYWRQLLNAKLITQRKFDNLTKAERGGLSELDKAGFIKRQLVETRQITKHVAQILDSRMNTKYDENDKLIREVKVITLKSKLVSDFRKDFQFYKVREINNYHHAHDAYLNAVVGTALIKKYPKLESEFVYGDYKVYDVRKMIAKSEQEIGKATAKYFFYSNIMNFFKTEITLANGEIRKRPLIETNGETGEIVWDKGRDFATVRKVLSMPQVNIVKKTEVQTGGFSKESILPKRNSDKLIARKKDWDPKKYGGFDSPTVAYSVLVVAKVEKGKSKKLKSVKELLGITIMERSSFEKNPIDFLEAKGYKEVKKDLIIKLPKYSLFELENGRKRMLASAGELQKGNELALPSKYVNFLYLASHYEKLKGSPEDNEQKQLFVEQHKHYLDEIIEQISEFSKRVILADANLDKVLSAYNKHRDKPIREQAENIIHLFTLTNLGAPAAFKYFDTTIDRKRYTSTKEVLDATLIHQSITGLYETRIDLSQLGGDGGGGGGGSEAAAKGGTLNIEDEYRLHETSKEPDVSLGSTWLSDFPQAWAETGGMGLAVRQAPLIIPLKATSTPVSIKQYPMSQEARLGIKPHIQRLLDQGILVPCQSPWNTPLLPVKKPGTNDYRPVQDLREVNKRVEDIHPTVPNPYNLLSGLPPSHQWYTVLDLKDAFFCLRLHPTSQPLFAFEWRDPEMGISGQLTWTRLPQGFKNSPTLFNEALHRDLADFRIQHPDLILLQYVDDLLLAATSELDCQQGTRALLQTLGNLGYRASAKKAQICQKQVKYLGYLLKEGQRWLTEARKETVMGQPTPKTPRQLREFLGKAGFCRLFIPGFAEMAAPLYPLTKPGTLFNWGPDQQKAYQEIKQALLTAPALGLPDLTKPFELFVDEKQGYAKGVLTQKLGPWRRPVAYLSKKLDPVAAGWPPCLRMVAAIAVLTKDAGKLTMGQPLVILAPHAVEALVKQPPDRWLSNARMTHYQALLLDTDRVQFGPVVALNPATLLPLPEEGLQHNCLDILAEAHGTRPDLTDQPLPDADHTWYTDGSSLLQEGQRKAGAAVTTETEVIWAKALPAGTSAQRAELIALTQALKMAEGKKLNVYTDSRYAFATAHIHGEIYRRRGWLTSEGKEIKNKDEILALLKALFLPKRLSIIHCPGHQKGHSAEARGNRMADQAARKAAITETPDTSTLLIENSSPSGGSKRTADGSEFEAGKRTADGSEFEKRTADGSEFESPKKKAKVE

SEQ ID NO: 2929 - protein, 2113 aa, synthetic construct; identical to SEQ ID NO: 2700

SEQ ID NO: 2930 - protein, 2114 aa, synthetic construct; identical to SEQ ID NO: 2656

SEQ ID NO: 2931 - protein, 2116 aa, synthetic construct; identical to SEQ ID NO: 2652

SEQ ID NO: 2932 - protein, 2120 aa, synthetic construct; identical to SEQ ID NO: 2623

SEQ ID NO: 2933 - protein, 2113 aa, synthetic construct; identical to SEQ ID NO: 2657

SEQ ID NO: 2934 - protein, 2111 aa, synthetic construct; identical to SEQ ID NO: 2693

SEQ ID NO: 2935 - protein, 2108 aa, synthetic construct; identical to SEQ ID NO: 2646

SEQ ID NO: 2936 - protein, 2111 aa, synthetic construct
MPAAKRVKLDGGDKKYSIGLDIGTNSVGWAVITDEYKVPSKKFKVLGNTDRHSIKKNLIGALLFDSGETAEATRLKRTARRRYTRRKNRICYLQEIFSNEMAKVDDSFFHRLEESFLVEEDKKHERHPIFGNIVDEVAYHEKYPTIYHLRKKLVDSTDKADLRLIYLALAHMIKFRGHFLIEGDLNPDNSDVDKLFIQLVQTYNQLFEENPINASGVDAKAILSARLSKSRRLENLIAQLPGEKKNGLFGNLIALSLGLTPNFKSNFDLAEDAKLQLSKDTYDDDLDNLLAQIGDQYADLFLAAKNLSDAILLSDILRVNTEITKAPLSASMIKRYDEHHQDLTLLKALVRQQLPEKYKEIFFDQSKNGYAGYIDGGASQEEFYKFIKPILEKMDGTEELLVKLNREDLLRKQRTFDNGSIPHQIHLGELHAILRRQEDFYPFLKDNREKIEKILTFRIPYYVGPLARGNSRFAWMTRKSEETITPWNFEEVVDKGASAQSFIERMTNFDKNLPNEKVLPKHSLLYEYFTVYNELTKVKYVTEGMRKPAFLSGEQKKAIVDLLFKTNRKVTVKQLKEDYFKKIECFDSVEISGVEDRFNASLGTYHDLLKIIKDKDFLDNEENEDILEDIVLTLTLFEDREMIEERLKTYAHLFDDKVMKQLKRRRYTGWGRLSRKLINGIRDKQSGKTILDFLKSDGFANRNFMQLIHDDSLTFKEDIQKAQVSGQGDSLHEHIANLAGSPAIKKGILQTVKVVDELVKVMGRHKPENIVIEMARENQTTQKGQKNSRERMKRIEEGIKELGSQILKEHPVENTQLQNEKLYLYYLQNGRDMYVDQELDINRLSDYDVDHIVPQSFLKDDSIDNKVLTRSDKARGKSDNVPSEEVVKKMKNYWRQLLNAKLITQRKFDNLTKAERGGLSELDKAGFIKRQLVETRQITKHVAQILDSRMNTKYDENDKLIREVKVITLKSKLVSDFRKDFQFYKVREINNYHHAHDAYLNAVVGTALIKKYPKLESEFVYGDYKVYDVRKMIAKSEQEIGKATAKYFFYSNIMNFFKTEITLANGEIRKRPLIETNGETGEIVWDKGRDFATVRKVLSMPQVNIVKKTEVQTGGFSKESILPKRNSDKLIARKKDWDPKKYGGFDSPTVAYSVLVVAKVEKGKSKKLKSVKELLGITIMERSSFEKNPIDFLEAKGYKEVKKDLIIKLPKYSLFELENGRKRMLASAGELQKGNELALPSKYVNFLYLASHYEKLKGSPEDNEQKQLFVEQHKHYLDEIIEQISEFSKRVILADANLDKVLSAYNKHRDKPIREQAENIIHLFTLTNLGAPAAFKYFDTTIDRKRYTSTKEVLDATLIHQSITGLYETRIDLSQLGGDGGPAPGSSGGTLNIEDEYRLHETSKEPDVSLGSTWLSDFPQAWAETGGMGLAVRQAPLIIPLKATSTPVSIKQYPMSQEARLGIKPHIQRLLDQGILVPCQSPWNTPLLPVKKPGTNDYRPVQDLREVNKRVEDIHPTVPNPYNLLSGLPPSHQWYTVLDLKDAFFCLRLHPTSQPLFAFEWRDPEMGISGQLTWTRLPQGFKNSPTLFNEALHRDLADFRIQHPDLILLQYVDDLLLAATSELDCQQGTRALLQTLGNLGYRASAKKAQICQKQVKYLGYLLKEGQRWLTEARKETVMGQPTPKTPRQLREFLGKAGFCRLFIPGFAEMAAPLYPLTKPGTLFNWGPDQQKAYQEIKQALLTAPALGLPDLTKPFELFVDEKQGYAKGVLTQKLGPWRRPVAYLSKKLDPVAAGWPPCLRMVAAIAVLTKDAGKLTMGQPLVILAPHAVEALVKQPPDRWLSNARMTHYQALLLDTDRVQFGPVVALNPATLLPLPEEGLQHNCLDILAEAHGTRPDLTDQPLPDADHTWYTDGSSLLQEGQRKAGAAVTTETEVIWAKALPAGTSAQRAELIALTQALKMAEGKKLNVYTDSRYAFATAHIHGEIYRRRGWLTSEGKEIKNKDEILALLKALFLPKRLSIIHCPGHQKGHSAEARGNRMADQAARKAAITETPDTSTLLIENSSPSGGSKRTADGSEFEAGKRTADGSEFEKRTADGSEFESPKKKAKVE

SEQ ID NO: 2937 - protein, 2120 aa, synthetic construct; identical to SEQ ID NO: 2636

SEQ ID NO: 2938 - protein, 2116 aa, synthetic construct; identical to SEQ ID NO: 2661

SEQ ID NO: 2939 - protein, 2120 aa, synthetic construct; identical to SEQ ID NO: 2680

SEQ ID NO: 2940 - protein, 2116 aa, synthetic construct
MPAAKRVKLDGGDKKYSIGLDIGTNSVGWAVITDEYKVPSKKFKVLGNTDRHSIKKNLIGALLFDSGETAEATRLKRTARRRYTRRKNRICYLQEIFSNEMAKVDDSFFHRLEESFLVEEDKKHERHPIFGNIVDEVAYHEKYPTIYHLRKKLVDSTDKADLRLIYLALAHMIKFRGHFLIEGDLNPDNSDVDKLFIQLVQTYNQLFEENPINASGVDAKAILSARLSKSRRLENLIAQLPGEKKNGLFGNLIALSLGLTPNFKSNFDLAEDAKLQLSKDTYDDDLDNLLAQIGDQYADLFLAAKNLSDAILLSDILRVNTEITKAPLSASMIKRYDEHHQDLTLLKALVRQQLPEKYKEIFFDQSKNGYAGYIDGGASQEEFYKFIKPILEKMDGTEELLVKLNREDLLRKQRTFDNGSIPHQIHLGELHAILRRQEDFYPFLKDNREKIEKILTFRIPYYVGPLARGNSRFAWMTRKSEETITPWNFEEVVDKGASAQSFIERMTNFDKNLPNEKVLPKHSLLYEYFTVYNELTKVKYVTEGMRKPAFLSGEQKKAIVDLLFKTNRKVTVKQLKEDYFKKIECFDSVEISGVEDRFNASLGTYHDLLKIIKDKDFLDNEENEDILEDIVLTLTLFEDREMIEERLKTYAHLFDDKVMKQLKRRRYTGWGRLSRKLINGIRDKQSGKTILDFLKSDGFANRNFMQLIHDDSLTFKEDIQKAQVSGQGDSLHEHIANLAGSPAIKKGILQTVKVVDELVKVMGRHKPENIVIEMARENQTTQKGQKNSRERMKRIEEGIKELGSQILKEHPVENTQLQNEKLYLYYLQNGRDMYVDQELDINRLSDYDVDHIVPQSFLKDDSIDNKVLTRSDKARGKSDNVPSEEVVKKMKNYWRQLLNAKLITQRKFDNLTKAERGGLSELDKAGFIKRQLVETRQITKHVAQILDSRMNTKYDENDKLIREVKVITLKSKLVSDFRKDFQFYKVREINNYHHAHDAYLNAVVGTALIKKYPKLESEFVYGDYKVYDVRKMIAKSEQEIGKATAKYFFYSNIMNFFKTEITLANGEIRKRPLIETNGETGEIVWDKGRDFATVRKVLSMPQVNIVKKTEVQTGGFSKESILPKRNSDKLIARKKDWDPKKYGGFDSPTVAYSVLVVAKVEKGKSKKLKSVKELLGITIMERSSFEKNPIDFLEAKGYKEVKKDLIIKLPKYSLFELENGRKRMLASAGELQKGNELALPSKYVNFLYLASHYEKLKGSPEDNEQKQLFVEQHKHYLDEIIEQISEFSKRVILADANLDKVLSAYNKHRDKPIREQAENIIHLFTLTNLGAPAAFKYFDTTIDRKRYTSTKEVLDATLIHQSITGLYETRIDLSQLGGDGGGGGPAPEAAAKGGTLNIEDEYRLHETSKEPDVSLGSTWLSDFPQAWAETGGMGLAVRQAPLIIPLKATSTPVSIKQYPMSQEARLGIKPHIQRLLDQGILVPCQSPWNTPLLPVKKPGTNDYRPVQDLREVNKRVEDIHPTVPNPYNLLSGLPPSHQWYTVLDLKDAFFCLRLHPTSQPLFAFEWRDPEMGISGQLTWTRLPQGFKNSPTLFNEALHRDLADFRIQHPDLILLQYVDDLLLAATSELDCQQGTRALLQTLGNLGYRASAKKAQICQKQVKYLGYLLKEGQRWLTEARKETVMGQPTPKTPRQLREFLGKAGFCRLFIPGFAEMAAPLYPLTKPGTLFNWGPDQQKAYQEIKQALLTAPALGLPDLTKPFELFVDEKQGYAKGVLTQKLGPWRRPVAYLSKKLDPVAAGWPPCLRMVAAIAVLTKDAGKLTMGQPLVILAPHAVEALVKQPPDRWLSNARMTHYQALLLDTDRVQFGPVVALNPATLLPLPEEGLQHNCLDILAEAHGTRPDLTDQPLPDADHTWYTDGSSLLQEGQRKAGAAVTTETEVIWAKALPAGTSAQRAELIALTQALKMAEGKKLNVYTDSRYAFATAHIHGEIYRRRGWLTSEGKEIKNKDEILALLKALFLPKRLSIIHCPGHQKGHSAEARGNRMADQAARKAAITETPDTSTLLIENSSPSGGSKRTADGSEFEAGKRTADGSEFEKRTADGSEFESPKKKAKVE

SEQ ID NO: 2941 - protein, 2120 aa, synthetic construct; identical to SEQ ID NO: 2669

SEQ ID NO: 2942 - protein, 2116 aa, synthetic construct; identical to SEQ ID NO: 2695

SEQ ID NO: 2943 - protein, 2123 aa, synthetic construct; identical to SEQ ID NO: 2612

SEQ ID NO: 2944 - protein, 2110 aa, synthetic construct; identical to SEQ ID NO: 2691

SEQ ID NO: 2945 - protein, 2113 aa, synthetic construct; identical to SEQ ID NO: 2659

SEQ ID NO: 2946 - protein, 2114 aa, synthetic construct; identical to SEQ ID NO: 2694

SEQ ID NO: 2947 - protein, 2111 aa, synthetic construct; identical to SEQ ID NO: 2682

SEQ ID NO: 2948 - protein, 2114 aa, synthetic construct; identical to SEQ ID NO: 2675

SEQ ID NO: 2949 - protein, 2116 aa, synthetic construct; identical to SEQ ID NO: 2686

SEQ ID NO: 2950 - protein, 2114 aa, synthetic construct; identical to SEQ ID NO: 2632

SEQ ID NO: 2951 - protein, 2113 aa, synthetic construct; identical to SEQ ID NO: 2625

SEQ ID NO: 2952 - protein, 2114 aa, synthetic construct; identical to SEQ ID NO: 2699

SEQ ID NO: 2953 - protein, 2113 aa, synthetic construct
MPAAKRVKLDGGDKKYSIGLDIGTNSVGWAVITDEYKVPSKKFKVLGNTDRHSIKKNLIGALLFDSGETAEATRLKRTARRRYTRRKNRICYLQEIFSNEMAKVDDSFFHRLEESFLVEEDKKHERHPIFGNIVDEVAYHEKYPTIYHLRKKLVDSTDKADLRLIYLALAHMIKFRGHFLIEGDLNPDNSDVDKLFIQLVQTYNQLFEENPINASGVDAKAILSARLSKSRRLENLIAQLPGEKKNGLFGNLIALSLGLTPNFKSNFDLAEDAKLQLSKDTYDDDLDNLLAQIGDQYADLFLAAKNLSDAILLSDILRVNTEITKAPLSASMIKRYDEHHQDLTLLKALVRQQLPEKYKEIFFDQSKNGYAGYIDGGASQEEFYKFIKPILEKMDGTEELLVKLNREDLLRKQRTFDNGSIPHQIHLGELHAILRRQEDFYPFLKDNREKIEKILTFRIPYYVGPLARGNSRFAWMTRKSEETITPWNFEEVVDKGASAQSFIERMTNFDKNLPNEKVLPKHSLLYEYFTVYNELTKVKYVTEGMRKPAFLSGEQKKAIVDLLFKTNRKVTVKQLKEDYFKKIECFDSVEISGVEDRFNASLGTYHDLLKIIKDKDFLDNEENEDILEDIVLTLTLFEDREMIEERLKTYAHLFDDKVMKQLKRRRYTGWGRLSRKLINGIRDKQSGKTILDFLKSDGFANRNFMQLIHDDSLTFKEDIQKAQVSGQGDSLHEHIANLAGSPAIKKGILQTVKVVDELVKVMGRHKPENIVIEMARENQTTQKGQKNSRERMKRIEEGIKELGSQILKEHPVENTQLQNEKLYLYYLQNGRDMYVDQELDINRLSDYDVDHIVPQSFLKDDSIDNKVLTRSDKARGKSDNVPSEEVVKKMKNYWRQLLNAKLITQRKFDNLTKAERGGLSELDKAGFIKRQLVETRQITKHVAQILDSRMNTKYDENDKLIREVKVITLKSKLVSDFRKDFQFYKVREINNYHHAHDAYLNAVVGTALIKKYPKLESEFVYGDYKVYDVRKMIAKSEQEIGKATAKYFFYSNIMNFFKTEITLANGEIRKRPLIETNGETGEIVWDKGRDFATVRKVLSMPQVNIVKKTEVQTGGFSKESILPKRNSDKLIARKKDWDPKKYGGFDSPTVAYSVLVVAKVEKGKSKKLKSVKELLGITIMERSSFEKNPIDFLEAKGYKEVKKDLIIKLPKYSLFELENGRKRMLASAGELQKGNELALPSKYVNFLYLASHYEKLKGSPEDNEQKQLFVEQHKHYLDEIIEQISEFSKRVILADANLDKVLSAYNKHRDKPIREQAENIIHLFTLTNLGAPAAFKYFDTTIDRKRYTSTKEVLDATLIHQSITGLYETRIDLSQLGGDGGGGGEAAAKGGTLNIEDEYRLHETSKEPDVSLGSTWLSDFPQAWAETGGMGLAVRQAPLIIPLKATSTPVSIKQYPMSQEARLGIKPHIQRLLDQGILVPCQSPWNTPLLPVKKPGTNDYRPVQDLREVNKRVEDIHPTVPNPYNLLSGLPPSHQWYTVLDLKDAFFCLRLHPTSQPLFAFEWRDPEMGISGQLTWTRLPQGFKNSPTLFNEALHRDLADFRIQHPDLILLQYVDDLLLAATSELDCQQGTRALLQTLGNLGYRASAKKAQICQKQVKYLGYLLKEGQRWLTEARKETVMGQPTPKTPRQLREFLGKAGFCRLFIPGFAEMAAPLYPLTKPGTLFNWGPDQQKAYQEIKQALLTAPALGLPDLTKPFELFVDEKQGYAKGVLTQKLGPWRRPVAYLSKKLDPVAAGWPPCLRMVAAIAVLTKDAGKLTMGQPLVILAPHAVEALVKQPPDRWLSNARMTHYQALLLDTDRVQFGPVVALNPATLLPLPEEGLQHNCLDILAEAHGTRPDLTDQPLPDADHTWYTDGSSLLQEGQRKAGAAVTTETEVIWAKALPAGTSAQRAELIALTQALKMAEGKKLNVYTDSRYAFATAHIHGEIYRRRGWLTSEGKEIKNKDEILALLKALFLPKRLSIIHCPGHQKGHSAEARGNRMADQAARKAAITETPDTSTLLIENSSPSGGSKRTADGSEFEAGKRTADGSEFEKRTADGSEFESPKKKAKVE

SEQ ID NO: 2954 - protein, 2114 aa, synthetic construct
MPAAKRVKLDGGDKKYSIGLDIGTNSVGWAVITDEYKVPSKKFKVLGNTDRHSIKKNLIGALLFDSGETAEATRLKRTARRRYTRRKNRICYLQEIFSNEMAKVDDSFFHRLEESFLVEEDKKHERHPIFGNIVDEVAYHEKYPTIYHLRKKLVDSTDKADLRLIYLALAHMIKFRGHFLIEGDLNPDNSDVDKLFIQLVQTYNQLFEENPINASGVDAKAILSARLSKSRRLENLIAQLPGEKKNGLFGNLIALSLGLTPNFKSNFDLAEDAKLQLSKDTYDDDLDNLLAQIGDQYADLFLAAKNLSDAILLSDILRVNTEITKAPLSASMIKRYDEHHQDLTLLKALVRQQLPEKYKEIFFDQSKNGYAGYIDGGASQEEFYKFIKPILEKMDGTEELLVKLNREDLLRKQRTFDNGSIPHQIHLGELHAILRRQEDFYPFLKDNREKIEKILTFRIPYYVGPLARGNSRFAWMTRKSEETITPWNFEEVVDKGASAQSFIERMTNFDKNLPNEKVLPKHSLLYEYFTVYNELTKVKYVTEGMRKPAFLSGEQKKAIVDLLFKTNRKVTVKQLKEDYFKKIECFDSVEISGVEDRFNASLGTYHDLLKIIKDKDFLDNEENEDILEDIVLTLTLFEDREMIEERLKTYAHLFDDKVMKQLKRRRYTGWGRLSRKLINGIRDKQSGKTILDFLKSDGFANRNFMQLIHDDSLTFKEDIQKAQVSGQGDSLHEHIANLAGSPAIKKGILQTVKVVDELVKVMGRHKPENIVIEMARENQTTQKGQKNSRERMKRIEEGIKELGSQILKEHPVENTQLQNEKLYLYYLQNGRDMYVDQELDINRLSDYDVDHIVPQSFLKDDSIDNKVLTRSDKARGKSDNVPSEEVVKKMKNYWRQLLNAKLITQRKFDNLTKAERGGLSELDKAGFIKRQLVETRQITKHVAQILDSRMNTKYDENDKLIREVKVITLKSKLVSDFRKDFQFYKVREINNYHHAHDAYLNAVVGTALIKKYPKLESEFVYGDYKVYDVRKMIAKSEQEIGKATAKYFFYSNIMNFFKTEITLANGEIRKRPLIETNGETGEIVWDKGRDFATVRKVLSMPQVNIVKKTEVQTGGFSKESILPKRNSDKLIARKKDWDPKKYGGFDSPTVAYSVLVVAKVEKGKSKKLKSVKELLGITIMERSSFEKNPIDFLEAKGYKEVKKDLIIKLPKYSLFELENGRKRMLASAGELQKGNELALPSKYVNFLYLASHYEKLKGSPEDNEQKQLFVEQHKHYLDEIIEQISEFSKRVILADANLDKVLSAYNKHRDKPIREQAENIIHLFTLTNLGAPAAFKYFDTTIDRKRYTSTKEVLDATLIHQSITGLYETRIDLSQLGGDGGGSSGGGPAPGGTLNIEDEYRLHETSKEPDVSLGSTWLSDFPQAWAETGGMGLAVRQAPLIIPLKATSTPVSIKQYPMSQEARLGIKPHIQRLLDQGILVPCQSPWNTPLLPVKKPGTNDYRPVQDLREVNKRVEDIHPTVPNPYNLLSGLPPSHQWYTVLDLKDAFFCLRLHPTSQPLFAFEWRDPEMGISGQLTWTRLPQGFKNSPTLFNEALHRDLADFRIQHPDLILLQYVDDLLLAATSELDCQQGTRALLQTLGNLGYRASAKKAQICQKQVKYLGYLLKEGQRWLTEARKETVMGQPTPKTPRQLREFLGKAGFCRLFIPGFAEMAAPLYPLTKPGTLFNWGPDQQKAYQEIKQALLTAPALGLPDLTKPFELFVDEKQGYAKGVLTQKLGPWRRPVAYLSKKLDPVAAGWPPCLRMVAAIAVLTKDAGKLTMGQPLVILAPHAVEALVKQPPDRWLSNARMTHYQALLLDTDRVQFGPVVALNPATLLPLPEEGLQHNCLDILAEAHGTRPDLTDQPLPDADHTWYTDGSSLLQEGQRKAGAAVTTETEVIWAKALPAGTSAQRAELIALTQALKMAEGKKLNVYTDSRYAFATAHIHGEIYRRRGWLTSEGKEIKNKDEILALLKALFLPKRLSIIHCPGHQKGHSAEARGNRMADQAARKAAITETPDTSTLLIENSSPSGGSKRTADGSEFEAGKRTADGSEFEKRTADGSEFESPKKKAKVE

SEQ ID NO: 2955 - protein, 2114 aa, synthetic construct; identical to SEQ ID NO: 2689

SEQ ID NO: 2956 - protein, 1999 aa, synthetic construct
MPAAKRVKLDGGDKKYSIGLDIGTNSVGWAVITDEYKVPSKKFKVLGNTDRHSIKKNLIGALLFDSGETAEATRLKRTARRRYTRRKNRICYLQEIFSNEMAKVDDSFFHRLEESFLVEEDKKHERHPIFGNIVDEVAYHEKYPTIYHLRKKLVDSTDKADLRLIYLALAHMIKFRGHFLIEGDLNPDNSDVDKLFIQLVQTYNQLFEENPINASGVDAKAILSARLSKSRRLENLIAQLPGEKKNGLFGNLIALSLGLTPNFKSNFDLAEDAKLQLSKDTYDDDLDNLLAQIGDQYADLFLAAKNLSDAILLSDILRVNTEITKAPLSASMIKRYDEHHQDLTLLKALVRQQLPEKYKEIFFDQSKNGYAGYIDGGASQEEFYKFIKPILEKMDGTEELLVKLNREDLLRKQRTFDNGSIPHQIHLGELHAILRRQEDFYPFLKDNREKIEKILTFRIPYYVGPLARGNSRFAWMTRKSEETITPWNFEEVVDKGASAQSFIERMTNFDKNLPNEKVLPKHSLLYEYFTVYNELTKVKYVTEGMRKPAFLSGEQKKAIVDLLFKTNRKVTVKQLKEDYFKKIECFDSVEISGVEDRFNASLGTYHDLLKIIKDKDFLDNEENEDILEDIVLTLTLFEDREMIEERLKTYAHLFDDKVMKQLKRRRYTGWGRLSRKLINGIRDKQSGKTILDFLKSDGFANRNFMQLIHDDSLTFKEDIQKAQVSGQGDSLHEHIANLAGSPAIKKGILQTVKVVDELVKVMGRHKPENIVIEMARENQTTQKGQKNSRERMKRIEEGIKELGSQILKEHPVENTQLQNEKLYLYYLQNGRDMYVDQELDINRLSDYDVDHIVPQSFLKDDSIDNKVLTRSDKARGKSDNVPSEEVVKKMKNYWRQLLNAKLITQRKFDNLTKAERGGLSELDKAGFIKRQLVETRQITKHVAQILDSRMNTKYDENDKLIREVKVITLKSKLVSDFRKDFQFYKVREINNYHHAHDAYLNAVVGTALIKKYPKLESEFVYGDYKVYDVRKMIAKSEQEIGKATAKYFFYSNIMNFFKTEITLANGEIRKRPLIETNGETGEIVWDKGRDFATVRKVLSMPQVNIVKKTEVQTGGFSKESILPKRNSDKLIARKKDWDPKKYGGFDSPTVAYSVLVVAKVEKGKSKKLKSVKELLGITIMERSSFEKNPIDFLEAKGYKEVKKDLIIKLPKYSLFELENGRKRMLASAGELQKGNELALPSKYVNFLYLASHYEKLKGSPEDNEQKQLFVEQHKHYLDEIIEQISEFSKRVILADANLDKVLSAYNKHRDKPIREQAENIIHLFTLTNLGAPAAFKYFDTTIDRKRYTSTKEVLDATLIHQSITGLYETRIDLSQLGGDGGGGGGSSGGSGGGVLDAPPSHIGLEHLPPPPEVPQFPLNLERLQALQDLVHRSLEAGYISPWDGPGNNPVFPVRKPNGAWRFVHDLRVTNALTKPIPALSPGPPDLTAIPTHLPHIICLDLKDAFFQIPVEDRFRSYFAFTLPTPGGLQPHRRFAWRVLPQGFINSPALFQRALQEPLRQVSAAFSQSLLVSYMDDILYVSPTEEQRLQCYQTMAAHLRDLGFQVASEKTRQTPSPVPFLGQMVHERMVTYQSLPTLQISSPISLHQLQTVLGDLQWVSRGTPTTRRPLQLLYSSLKPIDDPRAIIHLSPEQQQGIAELRQALSHNARSRYNEQEPLLAYVHLTRAGSTLVLFQKGAQFPLAYFQTPLTDNQASPWGLLLLLGCQYLQAQALSSYAKTILKYYHNLPKTSLDNWIQSSEDPRVQELLQLWPQISSQGIQPPGPWKTLVTRAEVFLTPQFSPEPIPAALCLFSDGAARRGAYCLWKDHLLDFQAVPAPESAQKGELAGLLAGLAAAPPEPLNIWVDSKYLYSLLRTLVLGAWLQPDPVPSYALLYKSLLRHPAIFVGHVRSHSSASHPIASLNNYVDQLAGKRTADGSEFEKRTADGSEFESPKKKAKVE

SEQ ID NO: 2957 - protein, 2131 aa, synthetic construct
MPAAKRVKLDGGDKKYSIGLDIGTNSVGWAVITDEYKVPSKKFKVLGNTDRHSIKKNLIGALLFDSGETAEATRLKRTARRRYTRRKNRICYLQEIFSNEMAKVDDSFFHRLEESFLVEEDKKHERHPIFGNIVDEVAYHEKYPTIYHLRKKLVDSTDKADLRLIYLALAHMIKFRGHFLIEGDLNPDNSDVDKLFIQLVQTYNQLFEENPINASGVDAKAILSARLSKSRRLENLIAQLPGEKKNGLFGNLIALSLGLTPNFKSNFDLAEDAKLQLSKDTYDDDLDNLLAQIGDQYADLFLAAKNLSDAILLSDILRVNTEITKAPLSASMIKRYDEHHQDLTLLKALVRQQLPEKYKEIFFDQSKNGYAGYIDGGASQEEFYKFIKPILEKMDGTEELLVKLNREDLLRKQRTFDNGSIPHQIHLGELHAILRRQEDFYPFLKDNREKIEKILTFRIPYYVGPLARGNSRFAWMTRKSEETITPWNFEEVVDKGASAQSFIERMTNFDKNLPNEKVLPKHSLLYEYFTVYNELTKVKYVTEGMRKPAFLSGEQKKAIVDLLFKTNRKVTVKQLKEDYFKKIECFDSVEISGVEDRFNASLGTYHDLLKIIKDKDFLDNEENEDILEDIVLTLTLFEDREMIEERLKTYAHLFDDKVMKQLKRRRYTGWGRLSRKLINGIRDKQSGKTILDFLKSDGFANRNFMQLIHDDSLTFKEDIQKAQVSGQGDSLHEHIANLAGSPAIKKGILQTVKVVDELVKVMGRHKPENIVIEMARENQTTQKGQKNSRERMKRIEEGIKELGSQILKEHPVENTQLQNEKLYLYYLQNGRDMYVDQELDINRLSDYDVDHIVPQSFLKDDSIDNKVLTRSDKARGKSDNVPSEEVVKKMKNYWRQLLNAKLITQRKFDNLTKAERGGLSELDKAGFIKRQLVETRQITKHVAQILDSRMNTKYDENDKLIREVKVITLKSKLVSDFRKDFQFYKVREINNYHHAHDAYLNAVVGTALIKKYPKLESEFVYGDYKVYDVRKMIAKSEQEIGKATAKYFFYSNIMNFFKTEITLANGEIRKRPLIETNGETGEIVWDKGRDFATVRKVLSMPQVNIVKKTEVQTGGFSKESILPKRNSDKLIARKKDWDPKKYGGFDSPTVAYSVLVVAKVEKGKSKKLKSVKELLGITIMERSSFEKNPIDFLEAKGYKEVKKDLIIKLPKYSLFELENGRKRMLASAGELQKGNELALPSKYVNFLYLASHYEKLKGSPEDNEQKQLFVEQHKHYLDEIIEQISEFSKRVILADANLDKVLSAYNKHRDKPIREQAENIIHLFTLTNLGAPAAFKYFDTTIDRKRYTSTKEVLDATLIHQSITGLYETRIDLSQLGGDGGAEAAAKEAAAKEAAAKEAAAKALEAEAAAKEAAAKEAAAKEAAAKAGGTLNIEDEHRLHETSKEPDVSLGSTWLSDFPQAWAETGGMGLAVRQAPLIIPLKATSTPVSIKQYPMSQEARLGIKPHIQRLLDQGILVPCQSPWNTPLLPVKKPGTNDYRPVQDLREVNKRVEDIHPTVPNPYNLLSGLPPSHQWYTVLDLKDAFFCLRLHPTSQPLFAFEWRDPEMGISGQLTWTRLPQGFKNSPTLFDEALHRDLADFRIQHPDLILLQYVDDLLLAATSELDCQQGTRALLQTLGNLGYRASAKKAQICQKQVKYLGYLLKEGQRWLTEARKETVMGQPTPKTPRQLREFLGTAGFCRLWIPGFAEMAAPLYPLTKTGTLFNWGPDQQKAYQEIKQALLTAPALGLPDLTKPFELFVDEKQGYAKGVLTQKLGPWRRPVAYLSKKLDPVAAGWPPCLRMVAAIAVLTKDAGKLTMGQPLVILAPHAVEALVKQPPDRWLSNARMTHYQALLLDTDRVQFGPVVALNPATLLPLPEEGLQHNCLDILAEAHGTRPDLTDQPLPDADHTWYTDGSSLLQEGQRKAGAAVTTETEVIWAKALPAGTSAQRAELIALTQALKMAEGKKLNVYTDSRYAFATAHIHGEIYRRRGLLTSEGKEIKNKDEILALLKALFLPKRLSIIHCPGHQKGHSAEARGNRMADQAARKAAITETPDTSTLLAGKRTADGSEFEKRTADGSEFESPKKKAKVE

SEQ ID NO: 2958 - protein, 2101 aa, synthetic construct
MPAAKRVKLDGGDKKYSIGLDIGTNSVGWAVITDEYKVPSKKFKVLGNTDRHSIKKNLIGALLFDSGETAEATRLKRTARRRYTRRKNRICYLQEIFSNEMAKVDDSFFHRLEESFLVEEDKKHERHPIFGNIVDEVAYHEKYPTIYHLRKKLVDSTDKADLRLIYLALAHMIKFRGHFLIEGDLNPDNSDVDKLFIQLVQTYNQLFEENPINASGVDAKAILSARLSKSRRLENLIAQLPGEKKNGLFGNLIALSLGLTPNFKSNFDLAEDAKLQLSKDTYDDDLDNLLAQIGDQYADLFLAAKNLSDAILLSDILRVNTEITKAPLSASMIKRYDEHHQDLTLLKALVRQQLPEKYKEIFFDQSKNGYAGYIDGGASQEEFYKFIKPILEKMDGTEELLVKLNREDLLRKQRTFDNGSIPHQIHLGELHAILRRQEDFYPFLKDNREKIEKILTFRIPYYVGPLARGNSRFAWMTRKSEETITPWNFEEVVDKGASAQSFIERMTNFDKNLPNEKVLPKHSLLYEYFTVYNELTKVKYVTEGMRKPAFLSGEQKKAIVDLLFKTNRKVTVKQLKEDYFKKIECFDSVEISGVEDRFNASLGTYHDLLKIIKDKDFLDNEENEDILEDIVLTLTLFEDREMIEERLKTYAHLFDDKVMKQLKRRRYTGWGRLSRKLINGIRDKQSGKTILDFLKSDGFANRNFMQLIHDDSLTFKEDIQKAQVSGQGDSLHEHIANLAGSPAIKKGILQTVKVVDELVKVMGRHKPENIVIEMARENQTTQKGQKNSRERMKRIEEGIKELGSQILKEHPVENTQLQNEKLYLYYLQNGRDMYVDQELDINRLSDYDVDHIVPQSFLKDDSIDNKVLTRSDKARGKSDNVPSEEVVKKMKNYWRQLLNAKLITQRKFDNLTKAERGGLSELDKAGFIKRQLVETRQITKHVAQILDSRMNTKYDENDKLIREVKVITLKSKLVSDFRKDFQFYKVREINNYHHAHDAYLNAVVGTALIKKYPKLESEFVYGDYKVYDVRKMIAKSEQEIGKATAKYFFYSNIMNFFKTEITLANGEIRKRPLIETNGETGEIVWDKGRDFATVRKVLSMPQVNIVKKTEVQTGGFSKESILPKRNSDKLIARKKDWDPKKYGGFDSPTVAYSVLVVAKVEKGKSKKLKSVKELLGITIMERSSFEKNPIDFLEAKGYKEVKKDLIIKLPKYSLFELENGRKRMLASAGELQKGNELALPSKYVNFLYLASHYEKLKGSPEDNEQKQLFVEQHKHYLDEIIEQISEFSKRVILADANLDKVLSAYNKHRDKPIREQAENIIHLFTLTNLGAPAAFKYFDTTIDRKRYTSTKEVLDATLIHQSITGLYETRIDLSQLGGDGGSGSETPGTSESATPESGGTLNIEDEHRLHETSKEPDVSLGSTWLSDFPQAWAETGGMGLAVRQAPLIIPLKATSTPVSIKQYPMSQEARLGIKPHIQRLLDQGILVPCQSPWNTPLLPVKKPGTNDYRPVQDLREVNKRVEDIHPTVPNPYNLLSGLPPSHQWYTVLDLKDAFFCLRLHPTSQPLFAFEWRDPEMGISGQLTWTRLPQGFKNSPTLFDEALHRDLADFRIQHPDLILLQYVDDLLLAATSELDCQQGTRALLQTLGNLGYRASAKKAQICQKQVKYLGYLLKEGQRWLTEARKETVMGQPTPKTPRQLREFLGTAGFCRLWIPGFAEMAAPLYPLTKTGTLFNWGPDQQKAYQEIKQALLTAPALGLPDLTKPFELFVDEKQGYAKGVLTQKLGPWRRPVAYLSKKLDPVAAGWPPCLRMVAAIAVLTKDAGKLTMGQPLVILAPHAVEALVKQPPDRWLSNARMTHYQALLLDTDRVQFGPVVALNPATLLPLPEEGLQHNCLDILAEAHGTRPDLTDQPLPDADHTWYTDGSSLLQEGQRKAGAAVTTETEVIWAKALPAGTSAQRAELIALTQALKMAEGKKLNVYTDSRYAFATAHIHGEIYRRRGLLTSEGKEIKNKDEILALLKALFLPKRLSIIHCPGHQKGHSAEARGNRMADQAARKAAITETPDTSTLLAGKRTADGSEFEKRTADGSEFESPKKKAKVE

SEQ ID NO: 2959 - protein, 2096 aa, synthetic construct
MPAAKRVKLDGGDKKYSIGLDIGTNSVGWAVITDEYKVPSKKFKVLGNTDRHSIKKNLIGALLFDSGETAEATRLKRTARRRYTRRKNRICYLQEIFSNEMAKVDDSFFHRLEESFLVEEDKKHERHPIFGNIVDEVAYHEKYPTIYHLRKKLVDSTDKADLRLIYLALAHMIKFRGHFLIEGDLNPDNSDVDKLFIQLVQTYNQLFEENPINASGVDAKAILSARLSKSRRLENLIAQLPGEKKNGLFGNLIALSLGLTPNFKSNFDLAEDAKLQLSKDTYDDDLDNLLAQIGDQYADLFLAAKNLSDAILLSDILRVNTEITKAPLSASMIKRYDEHHQDLTLLKALVRQQLPEKYKEIFFDQSKNGYAGYIDGGASQEEFYKFIKPILEKMDGTEELLVKLNREDLLRKQRTFDNGSIPHQIHLGELHAILRRQEDFYPFLKDNREKIEKILTFRIPYYVGPLARGNSRFAWMTRKSEETITPWNFEEVVDKGASAQSFIERMTNFDKNLPNEKVLPKHSLLYEYFTVYNELTKVKYVTEGMRKPAFLSGEQKKAIVDLLFKTNRKVTVKQLKEDYFKKIECFDSVEISGVEDRFNASLGTYHDLLKIIKDKDFLDNEENEDILEDIVLTLTLFEDREMIEERLKTYAHLFDDKVMKQLKRRRYTGWGRLSRKLINGIRDKQSGKTILDFLKSDGFANRNFMQLIHDDSLTFKEDIQKAQVSGQGDSLHEHIANLAGSPAIKKGILQTVKVVDELVKVMGRHKPENIVIEMARENQTTQKGQKNSRERMKRIEEGIKELGSQILKEHPVENTQLQNEKLYLYYLQNGRDMYVDQELDINRLSDYDVDHIVPQSFLKDDSIDNKVLTRSDKARGKSDNVPSEEVVKKMKNYWRQLLNAKLITQRKFDNLTKAERGGLSELDKAGFIKRQLVETRQITKHVAQILDSRMNTKYDENDKLIREVKVITLKSKLVSDFRKDFQFYKVREINNYHHAHDAYLNAVVGTALIKKYPKLESEFVYGDYKVYDVRKMIAKSEQEIGKATAKYFFYSNIMNFFKTEITLANGEIRKRPLIETNGETGEIVWDKGRDFATVRKVLSMPQVNIVKKTEVQTGGFSKESILPKRNSDKLIARKKDWDPKKYGGFDSPTVAYSVLVVAKVEKGKSKKLKSVKELLGITIMERSSFEKNPIDFLEAKGYKEVKKDLIIKLPKYSLFELENGRKRMLASAGELQKGNELALPSKYVNFLYLASHYEKLKGSPEDNEQKQLFVEQHKHYLDEIIEQISEFSKRVILADANLDKVLSAYNKHRDKPIREQAENIIHLFTLTNLGAPAAFKYFDTTIDRKRYTSTKEVLDATLIHQSITGLYETRIDLSQLGGDGGEAAAKGGSGGGGGTLNIEDEHRLHETSKEPDVSLGSTWLSDFPQAWAETGGMGLAVRQAPLIIPLKATSTPVSIKQYPMSQEARLGIKPHIQRLLDQGILVPCQSPWNTPLLPVKKPGTNDYRPVQDLREVNKRVEDIHPTVPNPYNLLSGLPPSHQWYTVLDLKDAFFCLRLHPTSQPLFAFEWRDPEMGISGQLTWTRLPQGFKNSPTLFDEALHRDLADFRIQHPDLILLQYVDDLLLAATSELDCQQGTRALLQTLGNLGYRASAKKAQICQKQVKYLGYLLKEGQRWLTEARKETVMGQPTPKTPRQLREFLGTAGFCRLWIPGFAEMAAPLYPLTKTGTLFNWGPDQQKAYQEIKQALLTAPALGLPDLTKPFELFVDEKQGYAKGVLTQKLGPWRRPVAYLSKKLDPVAAGWPPCLRMVAAIAVLTKDAGKLTMGQPLVILAPHAVEALVKQPPDRWLSNARMTHYQALLLDTDRVQFGPVVALNPATLLPLPEEGLQHNCLDILAEAHGTRPDLTDQPLPDADHTWYTDGSSLLQEGQRKAGAAVTTETEVIWAKALPAGTSAQRAELIALTQALKMAEGKKLNVYTDSRYAFATAHIHGEIYRRRGLLTSEGKEIKNKDEILALLKALFLPKRLSIIHCPGHQKGHSAEARGNRMADQAARKAAITETPDTSTLLAGKRTADGSEFEKRTADGSEFESPKKKAKVE

SEQ ID NO: 2960 - protein, 2096 aa, synthetic construct
MPAAKRVKLDGGDKKYSIGLDIGTNSVGWAVITDEYKVPSKKFKVLGNTDRHSIKKNLIGALLFDSGETAEATRLKRTARRRYTRRKNRICYLQEIFSNEMAKVDDSFFHRLEESFLVEEDKKHERHPIFGNIVDEVAYHEKYPTIYHLRKKLVDSTDKADLRLIYLALAHMIKFRGHFLIEGDLNPDNSDVDKLFIQLVQTYNQLFEENPINASGVDAKAILSARLSKSRRLENLIAQLPGEKKNGLFGNLIALSLGLTPNFKSNFDLAEDAKLQLSKDTYDDDLDNLLAQIGDQYADLFLAAKNLSDAILLSDILRVNTEITKAPLSASMIKRYDEHHQDLTLLKALVRQQLPEKYKEIFFDQSKNGYAGYIDGGASQEEFYKFIKPILEKMDGTEELLVKLNREDLLRKQRTFDNGSIPHQIHLGELHAILRRQEDFYPFLKDNREKIEKILTFRIPYYVGPLARGNSRFAWMTRKSEETITPWNFEEVVDKGASAQSFIERMTNFDKNLPNEKVLPKHSLLYEYFTVYNELTKVKYVTEGMRKPAFLSGEQKKAIVDLLFKTNRKVTVKQLKEDYFKKIECFDSVEISGVEDRFNASLGTYHDLLKIIKDKDFLDNEENEDILEDIVLTLTLFEDREMIEERLKTYAHLFDDKVMKQLKRRRYTGWGRLSRKLINGIRDKQSGKTILDFLKSDGFANRNFMQLIHDDSLTFKEDIQKAQVSGQGDSLHEHIANLAGSPAIKKGILQTVKVVDELVKVMGRHKPENIVIEMARENQTTQKGQKNSRERMKRIEEGIKELGSQILKEHPVENTQLQNEKLYLYYLQNGRDMYVDQELDINRLSDYDVDHIVPQSFLKDDSIDNKVLTRSDKARGKSDNVPSEEVVKKMKNYWRQLLNAKLITQRKFDNLTKAERGGLSELDKAGFIKRQLVETRQITKHVAQILDSRMNTKYDENDKLIREVKVITLKSKLVSDFRKDFQFYKVREINNYHHAHDAYLNAVVGTALIKKYPKLESEFVYGDYKVYDVRKMIAKSEQEIGKATAKYFFYSNIMNFFKTEITLANGEIRKRPLIETNGETGEIVWDKGRDFATVRKVLSMPQVNIVKKTEVQTGGFSKESILPKRNSDKLIARKKDWDPKKYGGFDSPTVAYSVLVVAKVEKGKSKKLKSVKELLGITIMERSSFEKNPIDFLEAKGYKEVKKDLIIKLPKYSLFELENGRKRMLASAGELQKGNELALPSKYVNFLYLASHYEKLKGSPEDNEQKQLFVEQHKHYLDEIIEQISEFSKRVILADANLDKVLSAYNKHRDKPIREQAENIIHLFTLTNLGAPAAFKYFDTTIDRKRYTSTKEVLDATLIHQSITGLYETRIDLSQLGGDGGGGSEAAAKGSSGGTLNIEDEHRLHETSKEPDVSLGSTWLSDFPQAWAETGGMGLAVRQAPLIIPLKATSTPVSIKQYPMSQEARLGIKPHIQRLLDQGILVPCQSPWNTPLLPVKKPGTNDYRPVQDLREVNKRVEDIHPTVPNPYNLLSGLPPSHQWYTVLDLKDAFFCLRLHPTSQPLFAFEWRDPEMGISGQLTWTRLPQGFKNSPTLFDEALHRDLADFRIQHPDLILLQYVDDLLLAATSELDCQQGTRALLQTLGNLGYRASAKKAQICQKQVKYLGYLLKEGQRWLTEARKETVMGQPTPKTPRQLREFLGTAGFCRLWIPGFAEMAAPLYPLTKTGTLFNWGPDQQKAYQEIKQALLTAPALGLPDLTKPFELFVDEKQGYAKGVLTQKLGPWRRPVAYLSKKLDPVAAGWPPCLRMVAAIAVLTKDAGKLTMGQPLVILAPHAVEALVKQPPDRWLSNARMTHYQALLLDTDRVQFGPVVALNPATLLPLPEEGLQHNCLDILAEAHGTRPDLTDQPLPDADHTWYTDGSSLLQEGQRKAGAAVTTETEVIWAKALPAGTSAQRAELIALTQALKMAEGKKLNVYTDSRYAFATAHIHGEIYRRRGLLTSEGKEIKNKDEILALLKALFLPKRLSIIHCPGHQKGHSAEARGNRMADQAARKAAITETPDTSTLLAGKRTADGSEFEKRTADGSEFESPKKKAKVE

SEQ ID NO: 2961 - protein, 2096 aa, synthetic construct
MPAAKRVKLDGGDKKYSIGLDIGTNSVGWAVITDEYKVPSKKFKVLGNTDRHSIKKNLIGALLFDSGETAEATRLKRTARRRYTRRKNRICYLQEIFSNEMAKVDDSFFHRLEESFLVEEDKKHERHPIFGNIVDEVAYHEKYPTIYHLRKKLVDSTDKADLRLIYLALAHMIKFRGHFLIEGDLNPDNSDVDKLFIQLVQTYNQLFEENPINASGVDAKAILSARLSKSRRLENLIAQLPGEKKNGLFGNLIALSLGLTPNFKSNFDLAEDAKLQLSKDTYDDDLDNLLAQIGDQYADLFLAAKNLSDAILLSDILRVNTEITKAPLSASMIKRYDEHHQDLTLLKALVRQQLPEKYKEIFFDQSKNGYAGYIDGGASQEEFYKFIKPILEKMDGTEELLVKLNREDLLRKQRTFDNGSIPHQIHLGELHAILRRQEDFYPFLKDNREKIEKILTFRIPYYVGPLARGNSRFAWMTRKSEETITPWNFEEVVDKGASAQSFIERMTNFDKNLPNEKVLPKHSLLYEYFTVYNELTKVKYVTEGMRKPAFLSGEQKKAIVDLLFKTNRKVTVKQLKEDYFKKIECFDSVEISGVEDRFNASLGTYHDLLKIIKDKDFLDNEENEDILEDIVLTLTLFEDREMIEERLKTYAHLFDDKVMKQLKRRRYTGWGRLSRKLINGIRDKQSGKTILDFLKSDGFANRNFMQLIHDDSLTFKEDIQKAQVSGQGDSLHEHIANLAGSPAIKKGILQTVKVVDELVKVMGRHKPENIVIEMARENQTTQKGQKNSRERMKRIEEGIKELGSQILKEHPVENTQLQNEKLYLYYLQNGRDMYVDQELDINRLSDYDVDHIVPQSFLKDDSIDNKVLTRSDKARGKSDNVPSEEVVKKMKNYWRQLLNAKLITQRKFDNLTKAERGGLSELDKAGFIKRQLVETRQITKHVAQILDSRMNTKYDENDKLIREVKVITLKSKLVSDFRKDFQFYKVREINNYHHAHDAYLNAVVGTALIKKYPKLESEFVYGDYKVYDVRKMIAKSEQEIGKATAKYFFYSNIMNFFKTEITLANGEIRKRPLIETNGETGEIVWDKGRDFATVRKVLSMPQVNIVKKTEVQTGGFSKESILPKRNSDKLIARKKDWDPKKYGGFDSPTVAYSVLVVAKVEKGKSKKLKSVKELLGITIMERSSFEKNPIDFLEAKGYKEVKKDLIIKLPKYSLFELENGRKRMLASAGELQKGNELALPSKYVNFLYLASHYEKLKGSPEDNEQKQLFVEQHKHYLDEIIEQISEFSKRVILADANLDKVLSAYNKHRDKPIREQAENIIHLFTLTNLGAPAAFKYFDTTIDRKRYTSTKEVLDATLIHQSITGLYETRIDLSQLGGDGGPAPGGSEAAAKGGTLNIEDEHRLHETSKEPDVSLGSTWLSDFPQAWAETGGMGLAVRQAPLIIPLKATSTPVSIKQYPMSQEARLGIKPHIQRLLDQGILVPCQSPWNTPLLPVKKPGTNDYRPVQDLREVNKRVEDIHPTVPNPYNLLSGLPPSHQWYTVLDLKDAFFCLRLHPTSQPLFAFEWRDPEMGISGQLTWTRLPQGFKNSPTLFDEALHRDLADFRIQHPDLILLQYVDDLLLAATSELDCQQGTRALLQTLGNLGYRASAKKAQICQKQVKYLGYLLKEGQRWLTEARKETVMGQPTPKTPRQLREFLGTAGFCRLWIPGFAEMAAPLYPLTKTGTLFNWGPDQQKAYQEIKQALLTAPALGLPDLTKPFELFVDEKQGYAKGVLTQKLGPWRRPVAYLSKKLDPVAAGWPPCLRMVAAIAVLTKDAGKLTMGQPLVILAPHAVEALVKQPPDRWLSNARMTHYQALLLDTDRVQFGPVVALNPATLLPLPEEGLQHNCLDILAEAHGTRPDLTDQPLPDADHTWYTDGSSLLQEGQRKAGAAVTTETEVIWAKALPAGTSAQRAELIALTQALKMAEGKKLNVYTDSRYAFATAHIHGEIYRRRGLLTSEGKEIKNKDEILALLKALFLPKRLSIIHCPGHQKGHSAEARGNRMADQAARKAAITETPDTSTLLAGKRTADGSEFEKRTADGSEFESPKKKAKVE

SEQ ID NO: 2962 - protein, 2093 aa, synthetic construct
MPAAKRVKLDGGDKKYSIGLDIGTNSVGWAVITDEYKVPSKKFKVLGNTDRHSIKKNLIGALLFDSGETAEATRLKRTARRRYTRRKNRICYLQEIFSNEMAKVDDSFFHRLEESFLVEEDKKHERHPIFGNIVDEVAYHEKYPTIYHLRKKLVDSTDKADLRLIYLALAHMIKFRGHFLIEGDLNPDNSDVDKLFIQLVQTYNQLFEENPINASGVDAKAILSARLSKSRRLENLIAQLPGEKKNGLFGNLIALSLGLTPNFKSNFDLAEDAKLQLSKDTYDDDLDNLLAQIGDQYADLFLAAKNLSDAILLSDILRVNTEITKAPLSASMIKRYDEHHQDLTLLKALVRQQLPEKYKEIFFDQSKNGYAGYIDGGASQEEFYKFIKPILEKMDGTEELLVKLNREDLLRKQRTFDNGSIPHQIHLGELHAILRRQEDFYPFLKDNREKIEKILTFRIPYYVGPLARGNSRFAWMTRKSEETITPWNFEEVVDKGASAQSFIERMTNFDKNLPNEKVLPKHSLLYEYFTVYNELTKVKYVTEGMRKPAFLSGEQKKAIVDLLFKTNRKVTVKQLKEDYFKKIECFDSVEISGVEDRFNASLGTYHDLLKIIKDKDFLDNEENEDILEDIVLTLTLFEDREMIEERLKTYAHLFDDKVMKQLKRRRYTGWGRLSRKLINGIRDKQSGKTILDFLKSDGFANRNFMQLIHDDSLTFKEDIQKAQVSGQGDSLHEHIANLAGSPAIKKGILQTVKVVDELVKVMGRHKPENIVIEMARENQTTQKGQKNSRERMKRIEEGIKELGSQILKEHPVENTQLQNEKLYLYYLQNGRDMYVDQELDINRLSDYDVDHIVPQSFLKDDSIDNKVLTRSDKARGKSDNVPSEEVVKKMKNYWRQLLNAKLITQRKFDNLTKAERGGLSELDKAGFIKRQLVETRQITKHVAQILDSRMNTKYDENDKLIREVKVITLKSKLVSDFRKDFQFYKVREINNYHHAHDAYLNAVVGTALIKKYPKLESEFVYGDYKVYDVRKMIAKSEQEIGKATAKYFFYSNIMNFFKTEITLANGEIRKRPLIETNGETGEIVWDKGRDFATVRKVLSMPQVNIVKKTEVQTGGFSKESILPKRNSDKLIARKKDWDPKKYGGFDSPTVAYSVLVVAKVEKGKSKKLKSVKELLGITIMERSSFEKNPIDFLEAKGYKEVKKDLIIKLPKYSLFELENGRKRMLASAGELQKGNELALPSKYVNFLYLASHYEKLKGSPEDNEQKQLFVEQHKHYLDEIIEQISEFSKRVILADANLDKVLSAYNKHRDKPIREQAENIIHLFTLTNLGAPAAFKYFDTTIDRKRYTSTKEVLDATLIHQSITGLYETRIDLSQLGGDGGGGSEAAAKGGTLNIEDEHRLHETSKEPDVSLGSTWLSDFPQAWAETGGMGLAVRQAPLIIPLKATSTPVSIKQYPMSQEARLGIKPHIQRLLDQGILVPCQSPWNTPLLPVKKPGTNDYRPVQDLREVNKRVEDIHPTVPNPYNLLSGLPPSHQWYTVLDLKDAFFCLRLHPTSQPLFAFEWRDPEMGISGQLTWTRLPQGFKNSPTLFDEALHRDLADFRIQHPDLILLQYVDDLLLAATSELDCQQGTRALLQTLGNLGYRASAKKAQICQKQVKYLGYLLKEGQRWLTEARKETVMGQPTPKTPRQLREFLGTAGFCRLWIPGFAEMAAPLYPLTKTGTLFNWGPDQQKAYQEIKQALLTAPALGLPDLTKPFELFVDEKQGYAKGVLTQKLGPWRRPVAYLSKKLDPVAAGWPPCLRMVAAIAVLTKDAGKLTMGQPLVILAPHAVEALVKQPPDRWLSNARMTHYQALLLDTDRVQFGPVVALNPATLLPLPEEGLQHNCLDILAEAHGTRPDLTDQPLPDADHTWYTDGSSLLQEGQRKAGAAVTTETEVIWAKALPAGTSAQRAELIALTQALKMAEGKKLNVYTDSRYAFATAHIHGEIYRRRGLLTSEGKEIKNKDEILALLKALFLPKRLSIIHCPGHQKGHSAEARGNRMADQAARKAAITETPDTSTLLAGKRTADGSEFEKRTADGSEFESPKKKAKVE

SEQ ID NO: 2963 - protein, 2088 aa, synthetic construct
MPAAKRVKLDGGDKKYSIGLDIGTNSVGWAVITDEYKVPSKKFKVLGNTDRHSIKKNLIGALLFDSGETAEATRLKRTARRRYTRRKNRICYLQEIFSNEMAKVDDSFFHRLEESFLVEEDKKHERHPIFGNIVDEVAYHEKYPTIYHLRKKLVDSTDKADLRLIYLALAHMIKFRGHFLIEGDLNPDNSDVDKLFIQLVQTYNQLFEENPINASGVDAKAILSARLSKSRRLENLIAQLPGEKKNGLFGNLIALSLGLTPNFKSNFDLAEDAKLQLSKDTYDDDLDNLLAQIGDQYADLFLAAKNLSDAILLSDILRVNTEITKAPLSASMIKRYDEHHQDLTLLKALVRQQLPEKYKEIFFDQSKNGYAGYIDGGASQEEFYKFIKPILEKMDGTEELLVKLNREDLLRKQRTFDNGSIPHQIHLGELHAILRRQEDFYPFLKDNREKIEKILTFRIPYYVGPLARGNSRFAWMTRKSEETITPWNFEEVVDKGASAQSFIERMTNFDKNLPNEKVLPKHSLLYEYFTVYNELTKVKYVTEGMRKPAFLSGEQKKAIVDLLFKTNRKVTVKQLKEDYFKKIECFDSVEISGVEDRFNASLGTYHDLLKIIKDKDFLDNEENEDILEDIVLTLTLFEDREMIEERLKTYAHLFDDKVMKQLKRRRYTGWGRLSRKLINGIRDKQSGKTILDFLKSDGFANRNFMQLIHDDSLTFKEDIQKAQVSGQGDSLHEHIANLAGSPAIKKGILQTVKVVDELVKVMGRHKPENIVIEMARENQTTQKGQKNSRERMKRIEEGIKELGSQILKEHPVENTQLQNEKLYLYYLQNGRDMYVDQELDINRLSDYDVDHIVPQSFLKDDSIDNKVLTRSDKARGKSDNVPSEEVVKKMKNYWRQLLNAKLITQRKFDNLTKAERGGLSELDKAGFIKRQLVETRQITKHVAQILDSRMNTKYDENDKLIREVKVITLKSKLVSDFRKDFQFYKVREINNYHHAHDAYLNAVVGTALIKKYPKLESEFVYGDYKVYDVRKMIAKSEQEIGKATAKYFFYSNIMNFFKTEITLANGEIRKRPLIETNGETGEIVWDKGRDFATVRKVLSMPQVNIVKKTEVQTGGFSKESILPKRNSDKLIARKKDWDPKKYGGFDSPTVAYSVLVVAKVEKGKSKKLKSVKELLGITIMERSSFEKNPIDFLEAKGYKEVKKDLIIKLPKYSLFELENGRKRMLASAGELQKGNELALPSKYVNFLYLASHYEKLKGSPEDNEQKQLFVEQHKHYLDEIIEQISEFSKRVILADANLDKVLSAYNKHRDKPIREQAENIIHLFTLTNLGAPAAFKYFDTTIDRKRYTSTKEVLDATLIHQSITGLYETRIDLSQLGGDGGGSSGGTLNIEDEHRLHETSKEPDVSLGSTWLSDFPQAWAETGGMGLAVRQAPLIIPLKATSTPVSIKQYPMSQEARLGIKPHIQRLLDQGILVPCQSPWNTPLLPVKKPGTNDYRPVQDLREVNKRVEDIHPTVPNPYNLLSGLPPSHQWYTVLDLKDAFFCLRLHPTSQPLFAFEWRDPEMGISGQLTWTRLPQGFKNSPTLFDEALHRDLADFRIQHPDLILLQYVDDLLLAATSELDCQQGTRALLQTLGNLGYRASAKKAQICQKQVKYLGYLLKEGQRWLTEARKETVMGQPTPKTPRQLREFLGTAGFCRLWIPGFAEMAAPLYPLTKTGTLFNWGPDQQKAYQEIKQALLTAPALGLPDLTKPFELFVDEKQGYAKGVLTQKLGPWRRPVAYLSKKLDPVAAGWPPCLRMVAAIAVLTKDAGKLTMGQPLVILAPHAVEALVKQPPDRWLSNARMTHYQALLLDTDRVQFGPVVALNPATLLPLPEEGLQHNCLDILAEAHGTRPDLTDQPLPDADHTWYTDGSSLLQEGQRKAGAAVTTETEVIWAKALPAGTSAQRAELIALTQALKMAEGKKLNVYTDSRYAFATAHIHGEIYRRRGLLTSEGKEIKNKDEILALLKALFLPKRLSIIHCPGHQKGHSAEARGNRMADQAARKAAITETPDTSTLLAGKRTADGSEFEKRTADGSEFESPKKKAKVE

SEQ ID NO: 2964 - protein, 2094 aa, synthetic construct
MPAAKRVKLDGGDKKYSIGLDIGTNSVGWAVITDEYKVPSKKFKVLGNTDRHSIKKNLIGALLFDSGETAEATRLKRTARRRYTRRKNRICYLQEIFSNEMAKVDDSFFHRLEESFLVEEDKKHERHPIFGNIVDEVAYHEKYPTIYHLRKKLVDSTDKADLRLIYLALAHMIKFRGHFLIEGDLNPDNSDVDKLFIQLVQTYNQLFEENPINASGVDAKAILSARLSKSRRLENLIAQLPGEKKNGLFGNLIALSLGLTPNFKSNFDLAEDAKLQLSKDTYDDDLDNLLAQIGDQYADLFLAAKNLSDAILLSDILRVNTEITKAPLSASMIKRYDEHHQDLTLLKALVRQQLPEKYKEIFFDQSKNGYAGYIDGGASQEEFYKFIKPILEKMDGTEELLVKLNREDLLRKQRTFDNGSIPHQIHLGELHAILRRQEDFYPFLKDNREKIEKILTFRIPYYVGPLARGNSRFAWMTRKSEETITPWNFEEVVDKGASAQSFIERMTNFDKNLPNEKVLPKHSLLYEYFTVYNELTKVKYVTEGMRKPAFLSGEQKKAIVDLLFKTNRKVTVKQLKEDYFKKIECFDSVEISGVEDRFNASLGTYHDLLKIIKDKDFLDNEENEDILEDIVLTLTLFEDREMIEERLKTYAHLFDDKVMKQLKRRRYTGWGRLSRKLINGIRDKQSGKTILDFLKSDGFANRNFMQLIHDDSLTFKEDIQKAQVSGQGDSLHEHIANLAGSPAIKKGILQTVKVVDELVKVMGRHKPENIVIEMARENQTTQKGQKNSRERMKRIEEGIKELGSQILKEHPVENTQLQNEKLYLYYLQNGRDMYVDQELDINRLSDYDVDHIVPQSFLKDDSIDNKVLTRSDKARGKSDNVPSEEVVKKMKNYWRQLLNAKLITQRKFDNLTKAERGGLSELDKAGFIKRQLVETRQITKHVAQILDSRMNTKYDENDKLIREVKVITLKSKLVSDFRKDFQFYKVREINNYHHAHDAYLNAVVGTALIKKYPKLESEFVYGDYKVYDVRKMIAKSEQEIGKATAKYFFYSNIMNFFKTEITLANGEIRKRPLIETNGETGEIVWDKGRDFATVRKVLSMPQVNIVKKTEVQTGGFSKESILPKRNSDKLIARKKDWDPKKYGGFDSPTVAYSVLVVAKVEKGKSKKLKSVKELLGITIMERSSFEKNPIDFLEAKGYKEVKKDLIIKLPKYSLFELENGRKRMLASAGELQKGNELALPSKYVNFLYLASHYEKLKGSPEDNEQKQLFVEQHKHYLDEIIEQISEFSKRVILADANLDKVLSAYNKHRDKPIREQAENIIHLFTLTNLGAPAAFKYFDTTIDRKRYTSTKEVLDATLIHQSITGLYETRIDLSQLGGDGGGGSGSSPAPGGTLNIEDEHRLHETSKEPDVSLGSTWLSDFPQAWAETGGMGLAVRQAPLIIPLKATSTPVSIKQYPMSQEARLGIKPHIQRLLDQGILVPCQSPWNTPLLPVKKPGTNDYRPVQDLREVNKRVEDIHPTVPNPYNLLSGLPPSHQWYTVLDLKDAFFCLRLHPTSQPLFAFEWRDPEMGISGQLTWTRLPQGFKNSPTLFDEALHRDLADFRIQHPDLILLQYVDDLLLAATSELDCQQGTRALLQTLGNLGYRASAKKAQICQKQVKYLGYLLKEGQRWLTEARKETVMGQPTPKTPRQLREFLGTAGFCRLWIPGFAEMAAPLYPLTKTGTLFNWGPDQQKAYQEIKQALLTAPALGLPDLTKPFELFVDEKQGYAKGVLTQKLGPWRRPVAYLSKKLDPVAAGWPPCLRMVAAIAVLTKDAGKLTMGQPLVILAPHAVEALVKQPPDRWLSNARMTHYQALLLDTDRVQFGPVVALNPATLLPLPEEGLQHNCLDILAEAHGTRPDLTDQPLPDADHTWYTDGSSLLQEGQRKAGAAVTTETEVIWAKALPAGTSAQRAELIALTQALKMAEGKKLNVYTDSRYAFATAHIHGEIYRRRGLLTSEGKEIKNKDEILALLKALFLPKRLSIIHCPGHQKGHSAEARGNRMADQAARKAAITETPDTSTLLAGKRTADGSEFEKRTADGSEFESPKKKAKVE

SEQ ID NO: 2965 - protein, 2103 aa, synthetic construct
MPAAKRVKLDGGDKKYSIGLDIGTNSVGWAVITDEYKVPSKKFKVLGNTDRHSIKKNLIGALLFDSGETAEATRLKRTARRRYTRRKNRICYLQEIFSNEMAKVDDSFFHRLEESFLVEEDKKHERHPIFGNIVDEVAYHEKYPTIYHLRKKLVDSTDKADLRLIYLALAHMIKFRGHFLIEGDLNPDNSDVDKLFIQLVQTYNQLFEENPINASGVDAKAILSARLSKSRRLENLIAQLPGEKKNGLFGNLIALSLGLTPNFKSNFDLAEDAKLQLSKDTYDDDLDNLLAQIGDQYADLFLAAKNLSDAILLSDILRVNTEITKAPLSASMIKRYDEHHQDLTLLKALVRQQLPEKYKEIFFDQSKNGYAGYIDGGASQEEFYKFIKPILEKMDGTEELLVKLNREDLLRKQRTFDNGSIPHQIHLGELHAILRRQEDFYPFLKDNREKIEKILTFRIPYYVGPLARGNSRFAWMTRKSEETITPWNFEEVVDKGASAQSFIERMTNFDKNLPNEKVLPKHSLLYEYFTVYNELTKVKYVTEGMRKPAFLSGEQKKAIVDLLFKTNRKVTVKQLKEDYFKKIECFDSVEISGVEDRFNASLGTYHDLLKIIKDKDFLDNEENEDILEDIVLTLTLFEDREMIEERLKTYAHLFDDKVMKQLKRRRYTGWGRLSRKLINGIRDKQSGKTILDFLKSDGFANRNFMQLIHDDSLTFKEDIQKAQVSGQGDSLHEHIANLAGSPAIKKGILQTVKVVDELVKVMGRHKPENIVIEMARENQTTQKGQKNSRERMKRIEEGIKELGSQILKEHPVENTQLQNEKLYLYYLQNGRDMYVDQELDINRLSDYDVDHIVPQSFLKDDSIDNKVLTRSDKARGKSDNVPSEEVVKKMKNYWRQLLNAKLITQRKFDNLTKAERGGLSELDKAGFIKRQLVETRQITKHVAQILDSRMNTKYDENDKLIREVKVITLKSKLVSDFRKDFQFYKVREINNYHHAHDAYLNAVVGTALIKKYPKLESEFVYGDYKVYDVRKMIAKSEQEIGKATAKYFFYSNIMNFFKTEITLANGEIRKRPLIETNGETGEIVWDKGRDFATVRKVLSMPQVNIVKKTEVQTGGFSKESILPKRNSDKLIARKKDWDPKKYGGFDSPTVAYSVLVVAKVEKGKSKKLKSVKELLGITIMERSSFEKNPIDFLEAKGYKEVKKDLIIKLPKYSLFELENGRKRMLASAGELQKGNELALPSKYVNFLYLASHYEKLKGSPEDNEQKQLFVEQHKHYLDEIIEQISEFSKRVILADANLDKVLSAYNKHRDKPIREQAENIIHLFTLTNLGAPAAFKYFDTTIDRKRYTSTKEVLDATLIHQSITGLYETRIDLSQLGGDGGGSSGSSGSSGSSGSSGSSGGTLNIEDEHRLHETSKEPDVSLGSTWLSDFPQAWAETGGMGLAVRQAPLIIPLKATSTPVSIKQYPMSQEARLGIKPHIQRLLDQGILVPCQSPWNTPLLPVKKPGTNDYRPVQDLREVNKRVEDIHPTVPNPYNLLSGLPPSHQWYTVLDLKDAFFCLRLHPTSQPLFAFEWRDPEMGISGQLTWTRLPQGFKNSPTLFNEALHRDLADFRIQHPDLILLQYVDDLLLAATSELDCQQGTRALLQTLGNLGYRASAKKAQICQKQVKYLGYLLKEGQRWLTEARKETVMGQPTPKTPRQLREFLGTAGFCRLWIPGFAEMAAPLYPLTKPGTLFNWGPDQQKAYQEIKQALLTAPALGLPDLTKPFELFVDEKQGYAKGVLTQKLGPWRRPVAYLSKKLDPVAAGWPPCLRMVAAIAVLTKDAGKLTMGQPLVILAPHAVEALVKQPPDRWLSNARMTHYQALLLDTDRVQFGPVVALNPATLLPLPEEGLQHNCLDILAEAHGTRPDLTDQPLPDADHTWYTDGSSLLQEGQRKAGAAVTTETEVIWAKALPAGTSAQRAELIALTQALKMAEGKKLNVYTDSRYAFATAHIHGEIYRRRGWLTSEGKEIKNKDEILALLKALFLPKRLSIIHCPGHQKGHSAEARGNRMADQAARKAAITETPDTSTLLAGKRTADGSEFEKRTADGSEFESPKKKAKVE

SEQ ID NO: 2966 - protein, 2096 aa, synthetic construct; identical to SEQ ID NO: 2713

SEQ ID NO: 2967 - protein, 2091 aa, synthetic construct
MPAAKRVKLDGGDKKYSIGLDIGTNSVGWAVITDEYKVPSKKFKVLGNTDRHSIKKNLIGALLFDSGETAEATRLKRTARRRYTRRKNRICYLQEIFSNEMAKVDDSFFHRLEESFLVEEDKKHERHPIFGNIVDEVAYHEKYPTIYHLRKKLVDSTDKADLRLIYLALAHMIKFRGHFLIEGDLNPDNSDVDKLFIQLVQTYNQLFEENPINASGVDAKAILSARLSKSRRLENLIAQLPGEKKNGLFGNLIALSLGLTPNFKSNFDLAEDAKLQLSKDTYDDDLDNLLAQIGDQYADLFLAAKNLSDAILLSDILRVNTEITKAPLSASMIKRYDEHHQDLTLLKALVRQQLPEKYKEIFFDQSKNGYAGYIDGGASQEEFYKFIKPILEKMDGTEELLVKLNREDLLRKQRTFDNGSIPHQIHLGELHAILRRQEDFYPFLKDNREKIEKILTFRIPYYVGPLARGNSRFAWMTRKSEETITPWNFEEVVDKGASAQSFIERMTNFDKNLPNEKVLPKHSLLYEYFTVYNELTKVKYVTEGMRKPAFLSGEQKKAIVDLLFKTNRKVTVKQLKEDYFKKIECFDSVEISGVEDRFNASLGTYHDLLKIIKDKDFLDNEENEDILEDIVLTLTLFEDREMIEERLKTYAHLFDDKVMKQLKRRRYTGWGRLSRKLINGIRDKQSGKTILDFLKSDGFANRNFMQLIHDDSLTFKEDIQKAQVSGQGDSLHEHIANLAGSPAIKKGILQTVKVVDELVKVMGRHKPENIVIEMARENQTTQKGQKNSRERMKRIEEGIKELGSQILKEHPVENTQLQNEKLYLYYLQNGRDMYVDQELDINRLSDYDVDHIVPQSFLKDDSIDNKVLTRSDKARGKSDNVPSEEVVKKMKNYWRQLLNAKLITQRKFDNLTKAERGGLSELDKAGFIKRQLVETRQITKHVAQILDSRMNTKYDENDKLIREVKVITLKSKLVSDFRKDFQFYKVREINNYHHAHDAYLNAVVGTALIKKYPKLESEFVYGDYKVYDVRKMIAKSEQEIGKATAKYFFYSNIMNFFKTEITLANGEIRKRPLIETNGETGEIVWDKGRDFATVRKVLSMPQVNIVKKTEVQTGGFSKESILPKRNSDKLIARKKDWDPKKYGGFDSPTVAYSVLVVAKVEKGKSKKLKSVKELLGITIMERSSFEKNPIDFLEAKGYKEVKKDLIIKLPKYSLFELENGRKRMLASAGELQKGNELALPSKYVNFLYLASHYEKLKGSPEDNEQKQLFVEQHKHYLDEIIEQISEFSKRVILADANLDKVLSAYNKHRDKPIREQAENIIHLFTLTNLGAPAAFKYFDTTIDRKRYTSTKEVLDATLIHQSITGLYETRIDLSQLGGDGGGSSGGGGGTLNIEDEHRLHETSKEPDVSLGSTWLSDFPQAWAETGGMGLAVRQAPLIIPLKATSTPVSIKQYPMSQEARLGIKPHIQRLLDQGILVPCQSPWNTPLLPVKKPGTNDYRPVQDLREVNKRVEDIHPTVPNPYNLLSGLPPSHQWYTVLDLKDAFFCLRLHPTSQPLFAFEWRDPEMGISGQLTWTRLPQGFKNSPTLFNEALHRDLADFRIQHPDLILLQYVDDLLLAATSELDCQQGTRALLQTLGNLGYRASAKKAQICQKQVKYLGYLLKEGQRWLTEARKETVMGQPTPKTPRQLREFLGTAGFCRLWIPGFAEMAAPLYPLTKPGTLFNWGPDQQKAYQEIKQALLTAPALGLPDLTKPFELFVDEKQGYAKGVLTQKLGPWRRPVAYLSKKLDPVAAGWPPCLRMVAAIAVLTKDAGKLTMGQPLVILAPHAVEALVKQPPDRWLSNARMTHYQALLLDTDRVQFGPVVALNPATLLPLPEEGLQHNCLDILAEAHGTRPDLTDQPLPDADHTWYTDGSSLLQEGQRKAGAAVTTETEVIWAKALPAGTSAQRAELIALTQALKMAEGKKLNVYTDSRYAFATAHIHGEIYRRRGWLTSEGKEIKNKDEILALLKALFLPKRLSIIHCPGHQKGHSAEARGNRMADQAARKAAITETPDTSTLLAGKRTADGSEFEKRTADGSEFESPKKKAKVE

SEQ ID NO: 2968 - protein, 2105 aa, synthetic construct; identical to SEQ ID NO: 2771

SEQ ID NO: 2969 - protein, 2096 aa, synthetic construct; identical to SEQ ID NO: 2753

SEQ ID NO: 2970 - protein, 2096 aa, synthetic construct
MPAAKRVKLDGGDKKYSIGLDIGTNSVGWAVITDEYKVPSKKFKVLGNTDRHSIKKNLIGALLFDSGETAEATRLKRTARRRYTRRKNRICYLQEIFSNEMAKVDDSFFHRLEESFLVEEDKKHERHPIFGNIVDEVAYHEKYPTIYHLRKKLVDSTDKADLRLIYLALAHMIKFRGHFLIEGDLNPDNSDVDKLFIQLVQTYNQLFEENPINASGVDAKAILSARLSKSRRLENLIAQLPGEKKNGLFGNLIALSLGLTPNFKSNFDLAEDAKLQLSKDTYDDDLDNLLAQIGDQYADLFLAAKNLSDAILLSDILRVNTEITKAPLSASMIKRYDEHHQDLTLLKALVRQQLPEKYKEIFFDQSKNGYAGYIDGGASQEEFYKFIKPILEKMDGTEELLVKLNREDLLRKQRTFDNGSIPHQIHLGELHAILRRQEDFYPFLKDNREKIEKILTFRIPYYVGPLARGNSRFAWMTRKSEETITPWNFEEVVDKGASAQSFIERMTNFDKNLPNEKVLPKHSLLYEYFTVYNELTKVKYVTEGMRKPAFLSGEQKKAIVDLLFKTNRKVTVKQLKEDYFKKIECFDSVEISGVEDRFNASLGTYHDLLKIIKDKDFLDNEENEDILEDIVLTLTLFEDREMIEERLKTYAHLFDDKVMKQLKRRRYTGWGRLSRKLINGIRDKQSGKTILDFLKSDGFANRNFMQLIHDDSLTFKEDIQKAQVSGQGDSLHEHIANLAGSPAIKKGILQTVKVVDELVKVMGRHKPENIVIEMARENQTTQKGQKNSRERMKRIEEGIKELGSQILKEHPVENTQLQNEKLYLYYLQNGRDMYVDQELDINRLSDYDVDHIVPQSFLKDDSIDNKVLTRSDKARGKSDNVPSEEVVKKMKNYWRQLLNAKLITQRKFDNLTKAERGGLSELDKAGFIKRQLVETRQITKHVAQILDSRMNTKYDENDKLIREVKVITLKSKLVSDFRKDFQFYKVREINNYHHAHDAYLNAVVGTALIKKYPKLESEFVYGDYKVYDVRKMIAKSEQEIGKATAKYFFYSNIMNFFKTEITLANGEIRKRPLIETNGETGEIVWDKGRDFATVRKVLSMPQVNIVKKTEVQTGGFSKESILPKRNSDKLIARKKDWDPKKYGGFDSPTVAYSVLVVAKVEKGKSKKLKSVKELLGITIMERSSFEKNPIDFLEAKGYKEVKKDLIIKLPKYSLFELENGRKRMLASAGELQKGNELALPSKYVNFLYLASHYEKLKGSPEDNEQKQLFVEQHKHYLDEIIEQISEFSKRVILADANLDKVLSAYNKHRDKPIREQAENIIHLFTLTNLGAPAAFKYFDTTIDRKRYTSTKEVLDATLIHQSITGLYETRIDLSQLGGDGGPAPAPAPAPAPGGTLNIEDEHRLHETSKEPDVSLGSTWLSDFPQAWAETGGMGLAVRQAPLIIPLKATSTPVSIKQYPMSQEARLGIKPHIQRLLDQGILVPCQSPWNTPLLPVKKPGTNDYRPVQDLREVNKRVEDIHPTVPNPYNLLSGLPPSHQWYTVLDLKDAFFCLRLHPTSQPLFAFEWRDPEMGISGQLTWTRLPQGFKNSPTLFNEALHRDLADFRIQHPDLILLQYVDDLLLAATSELDCQQGTRALLQTLGNLGYRASAKKAQICQKQVKYLGYLLKEGQRWLTEARKETVMGQPTPKTPRQLREFLGTAGFCRLWIPGFAEMAAPLYPLTKPGTLFNWGPDQQKAYQEIKQALLTAPALGLPDLTKPFELFVDEKQGYAKGVLTQKLGPWRRPVAYLSKKLDPVAAGWPPCLRMVAAIAVLTKDAGKLTMGQPLVILAPHAVEALVKQPPDRWLSNARMTHYQALLLDTDRVQFGPVVALNPATLLPLPEEGLQHNCLDILAEAHGTRPDLTDQPLPDADHTWYTDGSSLLQEGQRKAGAAVTTETEVIWAKALPAGTSAQRAELIALTQALKMAEGKKLNVYTDSRYAFATAHIHGEIYRRRGWLTSEGKEIKNKDEILALLKALFLPKRLSIIHCPGHQKGHSAEARGNRMADQAARKAAITETPDTSTLLAGKRTADGSEFEKRTADGSEFESPKKKAKVE

SEQ ID NO: 2971 - protein, 2093 aa, synthetic construct; identical to SEQ ID NO: 2724

SEQ ID NO: 2972 - protein, 2131 aa, synthetic construct; identical to SEQ ID NO: 2711

SEQ ID NO: 2973 - protein, 2088 aa, synthetic construct
MPAAKRVKLDGGDKKYSIGLDIGTNSVGWAVITDEYKVPSKKFKVLGNTDRHSIKKNLIGALLFDSGETAEATRLKRTARRRYTRRKNRICYLQEIFSNEMAKVDDSFFHRLEESFLVEEDKKHERHPIFGNIVDEVAYHEKYPTIYHLRKKLVDSTDKADLRLIYLALAHMIKFRGHFLIEGDLNPDNSDVDKLFIQLVQTYNQLFEENPINASGVDAKAILSARLSKSRRLENLIAQLPGEKKNGLFGNLIALSLGLTPNFKSNFDLAEDAKLQLSKDTYDDDLDNLLAQIGDQYADLFLAAKNLSDAILLSDILRVNTEITKAPLSASMIKRYDEHHQDLTLLKALVRQQLPEKYKEIFFDQSKNGYAGYIDGGASQEEFYKFIKPILEKMDGTEELLVKLNREDLLRKQRTFDNGSIPHQIHLGELHAILRRQEDFYPFLKDNREKIEKILTFRIPYYVGPLARGNSRFAWMTRKSEETITPWNFEEVVDKGASAQSFIERMTNFDKNLPNEKVLPKHSLLYEYFTVYNELTKVKYVTEGMRKPAFLSGEQKKAIVDLLFKTNRKVTVKQLKEDYFKKIECFDSVEISGVEDRFNASLGTYHDLLKIIKDKDFLDNEENEDILEDIVLTLTLFEDREMIEERLKTYAHLFDDKVMKQLKRRRYTGWGRLSRKLINGIRDKQSGKTILDFLKSDGFANRNFMQLIHDDSLTFKEDIQKAQVSGQGDSLHEHIANLAGSPAIKKGILQTVKVVDELVKVMGRHKPENIVIEMARENQTTQKGQKNSRERMKRIEEGIKELGSQILKEHPVENTQLQNEKLYLYYLQNGRDMYVDQELDINRLSDYDVDHIVPQSFLKDDSIDNKVLTRSDKARGKSDNVPSEEVVKKMKNYWRQLLNAKLITQRKFDNLTKAERGGLSELDKAGFIKRQLVETRQITKHVAQILDSRMNTKYDENDKLIREVKVITLKSKLVSDFRKDFQFYKVREINNYHHAHDAYLNAVVGTALIKKYPKLESEFVYGDYKVYDVRKMIAKSEQEIGKATAKYFFYSNIMNFFKTEITLANGEIRKRPLIETNGETGEIVWDKGRDFATVRKVLSMPQVNIVKKTEVQTGGFSKESILPKRNSDKLIARKKDWDPKKYGGFDSPTVAYSVLVVAKVEKGKSKKLKSVKELLGITIMERSSFEKNPIDFLEAKGYKEVKKDLIIKLPKYSLFELENGRKRMLASAGELQKGNELALPSKYVNFLYLASHYEKLKGSPEDNEQKQLFVEQHKHYLDEIIEQISEFSKRVILADANLDKVLSAYNKHRDKPIREQAENIIHLFTLTNLGAPAAFKYFDTTIDRKRYTSTKEVLDATLIHQSITGLYETRIDLSQLGGDGGPAPGGTLNIEDEHRLHETSKEPDVSLGSTWLSDFPQAWAETGGMGLAVRQAPLIIPLKATSTPVSIKQYPMSQEARLGIKPHIQRLLDQGILVPCQSPWNTPLLPVKKPGTNDYRPVQDLREVNKRVEDIHPTVPNPYNLLSGLPPSHQWYTVLDLKDAFFCLRLHPTSQPLFAFEWRDPEMGISGQLTWTRLPQGFKNSPTLFNEALHRDLADFRIQHPDLILLQYVDDLLLAATSELDCQQGTRALLQTLGNLGYRASAKKAQICQKQVKYLGYLLKEGQRWLTEARKETVMGQPTPKTPRQLREFLGTAGFCRLWIPGFAEMAAPLYPLTKPGTLFNWGPDQQKAYQEIKQALLTAPALGLPDLTKPFELFVDEKQGYAKGVLTQKLGPWRRPVAYLSKKLDPVAAGWPPCLRMVAAIAVLTKDAGKLTMGQPLVILAPHAVEALVKQPPDRWLSNARMTHYQALLLDTDRVQFGPVVALNPATLLPLPEEGLQHNCLDILAEAHGTRPDLTDQPLPDADHTWYTDGSSLLQEGQRKAGAAVTTETEVIWAKALPAGTSAQRAELIALTQALKMAEGKKLNVYTDSRYAFATAHIHGEIYRRRGWLTSEGKEIKNKDEILALLKALFLPKRLSIIHCPGHQKGHSAEARGNRMADQAARKAAITETPDTSTLLAGKRTADGSEFEKRTADGSEFESPKKKAKVE

SEQ ID NO: 2974 - protein, 2098 aa, synthetic construct
MPAAKRVKLDGGDKKYSIGLDIGTNSVGWAVITDEYKVPSKKFKVLGNTDRHSIKKNLIGALLFDSGETAEATRLKRTARRRYTRRKNRICYLQEIFSNEMAKVDDSFFHRLEESFLVEEDKKHERHPIFGNIVDEVAYHEKYPTIYHLRKKLVDSTDKADLRLIYLALAHMIKFRGHFLIEGDLNPDNSDVDKLFIQLVQTYNQLFEENPINASGVDAKAILSARLSKSRRLENLIAQLPGEKKNGLFGNLIALSLGLTPNFKSNFDLAEDAKLQLSKDTYDDDLDNLLAQIGDQYADLFLAAKNLSDAILLSDILRVNTEITKAPLSASMIKRYDEHHQDLTLLKALVRQQLPEKYKEIFFDQSKNGYAGYIDGGASQEEFYKFIKPILEKMDGTEELLVKLNREDLLRKQRTFDNGSIPHQIHLGELHAILRRQEDFYPFLKDNREKIEKILTFRIPYYVGPLARGNSRFAWMTRKSEETITPWNFEEVVDKGASAQSFIERMTNFDKNLPNEKVLPKHSLLYEYFTVYNELTKVKYVTEGMRKPAFLSGEQKKAIVDLLFKTNRKVTVKQLKEDYFKKIECFDSVEISGVEDRFNASLGTYHDLLKIIKDKDFLDNEENEDILEDIVLTLTLFEDREMIEERLKTYAHLFDDKVMKQLKRRRYTGWGRLSRKLINGIRDKQSGKTILDFLKSDGFANRNFMQLIHDDSLTFKEDIQKAQVSGQGDSLHEHIANLAGSPAIKKGILQTVKVVDELVKVMGRHKPENIVIEMARENQTTQKGQKNSRERMKRIEEGIKELGSQILKEHPVENTQLQNEKLYLYYLQNGRDMYVDQELDINRLSDYDVDHIVPQSFLKDDSIDNKVLTRSDKARGKSDNVPSEEVVKKMKNYWRQLLNAKLITQRKFDNLTKAERGGLSELDKAGFIKRQLVETRQITKHVAQILDSRMNTKYDENDKLIREVKVITLKSKLVSDFRKDFQFYKVREINNYHHAHDAYLNAVVGTALIKKYPKLESEFVYGDYKVYDVRKMIAKSEQEIGKATAKYFFYSNIMNFFKTEITLANGEIRKRPLIETNGETGEIVWDKGRDFATVRKVLSMPQVNIVKKTEVQTGGFSKESILPKRNSDKLIARKKDWDPKKYGGFDSPTVAYSVLVVAKVEKGKSKKLKSVKELLGITIMERSSFEKNPIDFLEAKGYKEVKKDLIIKLPKYSLFELENGRKRMLASAGELQKGNELALPSKYVNFLYLASHYEKLKGSPEDNEQKQLFVEQHKHYLDEIIEQISEFSKRVILADANLDKVLSAYNKHRDKPIREQAENIIHLFTLTNLGAPAAFKYFDTTIDRKRYTSTKEVLDATLIHQSITGLYETRIDLSQLGGDGGPAPAPAPAPAPAPGGTLNIEDEHRLHETSKEPDVSLGSTWLSDFPQAWAETGGMGLAVRQAPLIIPLKATSTPVSIKQYPMSQEARLGIKPHIQRLLDQGILVPCQSPWNTPLLPVKKPGTNDYRPVQDLREVNKRVEDIHPTVPNPYNLLSGLPPSHQWYTVLDLKDAFFCLRLHPTSQPLFAFEWRDPEMGISGQLTWTRLPQGFKNSPTLFNEALHRDLADFRIQHPDLILLQYVDDLLLAATSELDCQQGTRALLQTLGNLGYRASAKKAQICQKQVKYLGYLLKEGQRWLTEARKETVMGQPTPKTPRQLREFLGTAGFCRLWIPGFAEMAAPLYPLTKPGTLFNWGPDQQKAYQEIKQALLTAPALGLPDLTKPFELFVDEKQGYAKGVLTQKLGPWRRPVAYLSKKLDPVAAGWPPCLRMVAAIAVLTKDAGKLTMGQPLVILAPHAVEALVKQPPDRWLSNARMTHYQALLLDTDRVQFGPVVALNPATLLPLPEEGLQHNCLDILAEAHGTRPDLTDQPLPDADHTWYTDGSSLLQEGQRKAGAAVTTETEVIWAKALPAGTSAQRAELIALTQALKMAEGKKLNVYTDSRYAFATAHIHGEIYRRRGWLTSEGKEIKNKDEILALLKALFLPKRLSIIHCPGHQKGHSAEARGNRMADQAARKAAITETPDTSTLLAGKRTADGSEFEKRTADGSEFESPKKKAKVE

SEQ ID NO: 2975 - protein, 2091 aa, synthetic construct
MPAAKRVKLDGGDKKYSIGLDIGTNSVGWAVITDEYKVPSKKFKVLGNTDRHSIKKNLIGALLFDSGETAEATRLKRTARRRYTRRKNRICYLQEIFSNEMAKVDDSFFHRLEESFLVEEDKKHERHPIFGNIVDEVAYHEKYPTIYHLRKKLVDSTDKADLRLIYLALAHMIKFRGHFLIEGDLNPDNSDVDKLFIQLVQTYNQLFEENPINASGVDAKAILSARLSKSRRLENLIAQLPGEKKNGLFGNLIALSLGLTPNFKSNFDLAEDAKLQLSKDTYDDDLDNLLAQIGDQYADLFLAAKNLSDAILLSDILRVNTEITKAPLSASMIKRYDEHHQDLTLLKALVRQQLPEKYKEIFFDQSKNGYAGYIDGGASQEEFYKFIKPILEKMDGTEELLVKLNREDLLRKQRTFDNGSIPHQIHLGELHAILRRQEDFYPFLKDNREKIEKILTFRIPYYVGPLARGNSRFAWMTRKSEETITPWNFEEVVDKGASAQSFIERMTNFDKNLPNEKVLPKHSLLYEYFTVYNELTKVKYVTEGMRKPAFLSGEQKKAIVDLLFKTNRKVTVKQLKEDYFKKIECFDSVEISGVEDRFNASLGTYHDLLKIIKDKDFLDNEENEDILEDIVLTLTLFEDREMIEERLKTYAHLFDDKVMKQLKRRRYTGWGRLSRKLINGIRDKQSGKTILDFLKSDGFANRNFMQLIHDDSLTFKEDIQKAQVSGQGDSLHEHIANLAGSPAIKKGILQTVKVVDELVKVMGRHKPENIVIEMARENQTTQKGQKNSRERMKRIEEGIKELGSQILKEHPVENTQLQNEKLYLYYLQNGRDMYVDQELDINRLSDYDVDHIVPQSFLKDDSIDNKVLTRSDKARGKSDNVPSEEVVKKMKNYWRQLLNAKLITQRKFDNLTKAERGGLSELDKAGFIKRQLVETRQITKHVAQILDSRMNTKYDENDKLIREVKVITLKSKLVSDFRKDFQFYKVREINNYHHAHDAYLNAVVGTALIKKYPKLESEFVYGDYKVYDVRKMIAKSEQEIGKATAKYFFYSNIMNFFKTEITLANGEIRKRPLIETNGETGEIVWDKGRDFATVRKVLSMPQVNIVKKTEVQTGGFSKESILPKRNSDKLIARKKDWDPKKYGGFDSPTVAYSVLVVAKVEKGKSKKLKSVKELLGITIMERSSFEKNPIDFLEAKGYKEVKKDLIIKLPKYSLFELENGRKRMLASAGELQKGNELALPSKYVNFLYLASHYEKLKGSPEDNEQKQLFVEQHKHYLDEIIEQISEFSKRVILADANLDKVLSAYNKHRDKPIREQAENIIHLFTLTNLGAPAAFKYFDTTIDRKRYTSTKEVLDATLIHQSITGLYETRIDLSQLGGDGGGGGGGGGGTLNIEDEHRLHETSKEPDVSLGSTWLSDFPQAWAETGGMGLAVRQAPLIIPLKATSTPVSIKQYPMSQEARLGIKPHIQRLLDQGILVPCQSPWNTPLLPVKKPGTNDYRPVQDLREVNKRVEDIHPTVPNPYNLLSGLPPSHQWYTVLDLKDAFFCLRLHPTSQPLFAFEWRDPEMGISGQLTWTRLPQGFKNSPTLFNEALHRDLADFRIQHPDLILLQYVDDLLLAATSELDCQQGTRALLQTLGNLGYRASAKKAQICQKQVKYLGYLLKEGQRWLTEARKETVMGQPTPKTPRQLREFLGTAGFCRLWIPGFAEMAAPLYPLTKPGTLFNWGPDQQKAYQEIKQALLTAPALGLPDLTKPFELFVDEKQGYAKGVLTQKLGPWRRPVAYLSKKLDPVAAGWPPCLRMVAAIAVLTKDAGKLTMGQPLVILAPHAVEALVKQPPDRWLSNARMTHYQALLLDTDRVQFGPVVALNPATLLPLPEEGLQHNCLDILAEAHGTRPDLTDQPLPDADHTWYTDGSSLLQEGQRKAGAAVTTETEVIWAKALPAGTSAQRAELIALTQALKMAEGKKLNVYTDSRYAFATAHIHGEIYRRRGWLTSEGKEIKNKDEILALLKALFLPKRLSIIHCPGHQKGHSAEARGNRMADQAARKAAITETPDTSTLLAGKRTADGSEFEKRTADGSEFESPKKKAKVE

SEQ ID NO: 2976 - protein, 2096 aa, synthetic construct; identical to SEQ ID NO: 2723

SEQ ID NO: 2977 - protein, 2096 aa, synthetic construct; identical to SEQ ID NO: 2777

SEQ ID NO: 2978 - protein, 2093 aa, synthetic construct
MPAAKRVKLDGGDKKYSIGLDIGTNSVGWAVITDEYKVPSKKFKVLGNTDRHSIKKNLIGALLFDSGETAEATRLKRTARRRYTRRKNRICYLQEIFSNEMAKVDDSFFHRLEESFLVEEDKKHERHPIFGNIVDEVAYHEKYPTIYHLRKKLVDSTDKADLRLIYLALAHMIKFRGHFLIEGDLNPDNSDVDKLFIQLVQTYNQLFEENPINASGVDAKAILSARLSKSRRLENLIAQLPGEKKNGLFGNLIALSLGLTPNFKSNFDLAEDAKLQLSKDTYDDDLDNLLAQIGDQYADLFLAAKNLSDAILLSDILRVNTEITKAPLSASMIKRYDEHHQDLTLLKALVRQQLPEKYKEIFFDQSKNGYAGYIDGGASQEEFYKFIKPILEKMDGTEELLVKLNREDLLRKQRTFDNGSIPHQIHLGELHAILRRQEDFYPFLKDNREKIEKILTFRIPYYVGPLARGNSRFAWMTRKSEETITPWNFEEVVDKGASAQSFIERMTNFDKNLPNEKVLPKHSLLYEYFTVYNELTKVKYVTEGMRKPAFLSGEQKKAIVDLLFKTNRKVTVKQLKEDYFKKIECFDSVEISGVEDRFNASLGTYHDLLKIIKDKDFLDNEENEDILEDIVLTLTLFEDREMIEERLKTYAHLFDDKVMKQLKRRRYTGWGRLSRKLINGIRDKQSGKTILDFLKSDGFANRNFMQLIHDDSLTFKEDIQKAQVSGQGDSLHEHIANLAGSPAIKKGILQTVKVVDELVKVMGRHKPENIVIEMARENQTTQKGQKNSRERMKRIEEGIKELGSQILKEHPVENTQLQNEKLYLYYLQNGRDMYVDQELDINRLSDYDVDHIVPQSFLKDDSIDNKVLTRSDKARGKSDNVPSEEVVKKMKNYWRQLLNAKLITQRKFDNLTKAERGGLSELDKAGFIKRQLVETRQITKHVAQILDSRMNTKYDENDKLIREVKVITLKSKLVSDFRKDFQFYKVREINNYHHAHDAYLNAVVGTALIKKYPKLESEFVYGDYKVYDVRKMIAKSEQEIGKATAKYFFYSNIMNFFKTEITLANGEIRKRPLIETNGETGEIVWDKGRDFATVRKVLSMPQVNIVKKTEVQTGGFSKESILPKRNSDKLIARKKDWDPKKYGGFDSPTVAYSVLVVAKVEKGKSKKLKSVKELLGITIMERSSFEKNPIDFLEAKGYKEVKKDLIIKLPKYSLFELENGRKRMLASAGELQKGNELALPSKYVNFLYLASHYEKLKGSPEDNEQKQLFVEQHKHYLDEIIEQISEFSKRVILADANLDKVLSAYNKHRDKPIREQAENIIHLFTLTNLGAPAAFKYFDTTIDRKRYTSTKEVLDATLIHQSITGLYETRIDLSQLGGDGGEAAAKGGGGGTLNIEDEHRLHETSKEPDVSLGSTWLSDFPQAWAETGGMGLAVRQAPLIIPLKATSTPVSIKQYPMSQEARLGIKPHIQRLLDQGILVPCQSPWNTPLLPVKKPGTNDYRPVQDLREVNKRVEDIHPTVPNPYNLLSGLPPSHQWYTVLDLKDAFFCLRLHPTSQPLFAFEWRDPEMGISGQLTWTRLPQGFKNSPTLFNEALHRDLADFRIQHPDLILLQYVDDLLLAATSELDCQQGTRALLQTLGNLGYRASAKKAQICQKQVKYLGYLLKEGQRWLTEARKETVMGQPTPKTPRQLREFLGTAGFCRLWIPGFAEMAAPLYPLTKPGTLFNWGPDQQKAYQEIKQALLTAPALGLPDLTKPFELFVDEKQGYAKGVLTQKLGPWRRPVAYLSKKLDPVAAGWPPCLRMVAAIAVLTKDAGKLTMGQPLVILAPHAVEALVKQPPDRWLSNARMTHYQALLLDTDRVQFGPVVALNPATLLPLPEEGLQHNCLDILAEAHGTRPDLTDQPLPDADHTWYTDGSSLLQEGQRKAGAAVTTETEVIWAKALPAGTSAQRAELIALTQALKMAEGKKLNVYTDSRYAFATAHIHGEIYRRRGWLTSEGKEIKNKDEILALLKALFLPKRLSIIHCPGHQKGHSAEARGNRMADQAARKAAITETPDTSTLLAGKRTADGSEFEKRTADGSEFESPKKKAKVE

SEQ ID NO: 2979 - protein, 2094 aa, synthetic construct
MPAAKRVKLDGGDKKYSIGLDIGTNSVGWAVITDEYKVPSKKFKVLGNTDRHSIKKNLIGALLFDSGETAEATRLKRTARRRYTRRKNRICYLQEIFSNEMAKVDDSFFHRLEESFLVEEDKKHERHPIFGNIVDEVAYHEKYPTIYHLRKKLVDSTDKADLRLIYLALAHMIKFRGHFLIEGDLNPDNSDVDKLFIQLVQTYNQLFEENPINASGVDAKAILSARLSKSRRLENLIAQLPGEKKNGLFGNLIALSLGLTPNFKSNFDLAEDAKLQLSKDTYDDDLDNLLAQIGDQYADLFLAAKNLSDAILLSDILRVNTEITKAPLSASMIKRYDEHHQDLTLLKALVRQQLPEKYKEIFFDQSKNGYAGYIDGGASQEEFYKFIKPILEKMDGTEELLVKLNREDLLRKQRTFDNGSIPHQIHLGELHAILRRQEDFYPFLKDNREKIEKILTFRIPYYVGPLARGNSRFAWMTRKSEETITPWNFEEVVDKGASAQSFIERMTNFDKNLPNEKVLPKHSLLYEYFTVYNELTKVKYVTEGMRKPAFLSGEQKKAIVDLLFKTNRKVTVKQLKEDYFKKIECFDSVEISGVEDRFNASLGTYHDLLKIIKDKDFLDNEENEDILEDIVLTLTLFEDREMIEERLKTYAHLFDDKVMKQLKRRRYTGWGRLSRKLINGIRDKQSGKTILDFLKSDGFANRNFMQLIHDDSLTFKEDIQKAQVSGQGDSLHEHIANLAGSPAIKKGILQTVKVVDELVKVMGRHKPENIVIEMARENQTTQKGQKNSRERMKRIEEGIKELGSQILKEHPVENTQLQNEKLYLYYLQNGRDMYVDQELDINRLSDYDVDHIVPQSFLKDDSIDNKVLTRSDKARGKSDNVPSEEVVKKMKNYWRQLLNAKLITQRKFDNLTKAERGGLSELDKAGFIKRQLVETRQITKHVAQILDSRMNTKYDENDKLIREVKVITLKSKLVSDFRKDFQFYKVREINNYHHAHDAYLNAVVGTALIKKYPKLESEFVYGDYKVYDVRKMIAKSEQEIGKATAKYFFYSNIMNFFKTEITLANGEIRKRPLIETNGETGEIVWDKGRDFATVRKVLSMPQVNIVKKTEVQTGGFSKESILPKRNSDKLIARKKDWDPKKYGGFDSPTVAYSVLVVAKVEKGKSKKLKSVKELLGITIMERSSFEKNPIDFLEAKGYKEVKKDLIIKLPKYSLFELENGRKRMLASAGELQKGNELALPSKYVNFLYLASHYEKLKGSPEDNEQKQLFVEQHKHYLDEIIEQISEFSKRVILADANLDKVLSAYNKHRDKPIREQAENIIHLFTLTNLGAPAAFKYFDTTIDRKRYTSTKEVLDATLIHQSITGLYETRIDLSQLGGDGGGGSGSSGGGGGTLNIEDEHRLHETSKEPDVSLGSTWLSDFPQAWAETGGMGLAVRQAPLIIPLKATSTPVSIKQYPMSQEARLGIKPHIQRLLDQGILVPCQSPWNTPLLPVKKPGTNDYRPVQDLREVNKRVEDIHPTVPNPYNLLSGLPPSHQWYTVLDLKDAFFCLRLHPTSQPLFAFEWRDPEMGISGQLTWTRLPQGFKNSPTLFNEALHRDLADFRIQHPDLILLQYVDDLLLAATSELDCQQGTRALLQTLGNLGYRASAKKAQICQKQVKYLGYLLKEGQRWLTEARKETVMGQPTPKTPRQLREFLGTAGFCRLWIPGFAEMAAPLYPLTKPGTLFNWGPDQQKAYQEIKQALLTAPALGLPDLTKPFELFVDEKQGYAKGVLTQKLGPWRRPVAYLSKKLDPVAAGWPPCLRMVAAIAVLTKDAGKLTMGQPLVILAPHAVEALVKQPPDRWLSNARMTHYQALLLDTDRVQFGPVVALNPATLLPLPEEGLQHNCLDILAEAHGTRPDLTDQPLPDADHTWYTDGSSLLQEGQRKAGAAVTTETEVIWAKALPAGTSAQRAELIALTQALKMAEGKKLNVYTDSRYAFATAHIHGEIYRRRGWLTSEGKEIKNKDEILALLKALFLPKRLSIIHCPGHQKGHSAEARGNRMADQAARKAAITETPDTSTLLAGKRTADGSEFEKRTADGSEFESPKKKAKVE

SEQ ID NO: 2980 - protein, 2092 aa, synthetic construct
MPAAKRVKLDGGDKKYSIGLDIGTNSVGWAVITDEYKVPSKKFKVLGNTDRHSIKKNLIGALLFDSGETAEATRLKRTARRRYTRRKNRICYLQEIFSNEMAKVDDSFFHRLEESFLVEEDKKHERHPIFGNIVDEVAYHEKYPTIYHLRKKLVDSTDKADLRLIYLALAHMIKFRGHFLIEGDLNPDNSDVDKLFIQLVQTYNQLFEENPINASGVDAKAILSARLSKSRRLENLIAQLPGEKKNGLFGNLIALSLGLTPNFKSNFDLAEDAKLQLSKDTYDDDLDNLLAQIGDQYADLFLAAKNLSDAILLSDILRVNTEITKAPLSASMIKRYDEHHQDLTLLKALVRQQLPEKYKEIFFDQSKNGYAGYIDGGASQEEFYKFIKPILEKMDGTEELLVKLNREDLLRKQRTFDNGSIPHQIHLGELHAILRRQEDFYPFLKDNREKIEKILTFRIPYYVGPLARGNSRFAWMTRKSEETITPWNFEEVVDKGASAQSFIERMTNFDKNLPNEKVLPKHSLLYEYFTVYNELTKVKYVTEGMRKPAFLSGEQKKAIVDLLFKTNRKVTVKQLKEDYFKKIECFDSVEISGVEDRFNASLGTYHDLLKIIKDKDFLDNEENEDILEDIVLTLTLFEDREMIEERLKTYAHLFDDKVMKQLKRRRYTGWGRLSRKLINGIRDKQSGKTILDFLKSDGFANRNFMQLIHDDSLTFKEDIQKAQVSGQGDSLHEHIANLAGSPAIKKGILQTVKVVDELVKVMGRHKPENIVIEMARENQTTQKGQKNSRERMKRIEEGIKELGSQILKEHPVENTQLQNEKLYLYYLQNGRDMYVDQELDINRLSDYDVDHIVPQSFLKDDSIDNKVLTRSDKARGKSDNVPSEEVVKKMKNYWRQLLNAKLITQRKFDNLTKAERGGLSELDKAGFIKRQLVETRQITKHVAQILDSRMNTKYDENDKLIREVKVITLKSKLVSDFRKDFQFYKVREINNYHHAHDAYLNAVVGTALIKKYPKLESEFVYGDYKVYDVRKMIAKSEQEIGKATAKYFFYSNIMNFFKTEITLANGEIRKRPLIETNGETGEIVWDKGRDFATVRKVLSMPQVNIVKKTEVQTGGFSKESILPKRNSDKLIARKKDWDPKKYGGFDSPTVAYSVLVVAKVEKGKSKKLKSVKELLGITIMERSSFEKNPIDFLEAKGYKEVKKDLIIKLPKYSLFELENGRKRMLASAGELQKGNELALPSKYVNFLYLASHYEKLKGSPEDNEQKQLFVEQHKHYLDEIIEQISEFSKRVILADANLDKVLSAYNKHRDKPIREQAENIIHLFTLTNLGAPAAFKYFDTTIDRKRYTSTKEVLDATLIHQSITGLYETRIDLSQLGGDGGPAPAPAPGGTLNIEDEHRLHETSKEPDVSLGSTWLSDFPQAWAETGGMGLAVRQAPLIIPLKATSTPVSIKQYPMSQEARLGIKPHIQRLLDQGILVPCQSPWNTPLLPVKKPGTNDYRPVQDLREVNKRVEDIHPTVPNPYNLLSGLPPSHQWYTVLDLKDAFFCLRLHPTSQPLFAFEWRDPEMGISGQLTWTRLPQGFKNSPTLFNEALHRDLADFRIQHPDLILLQYVDDLLLAATSELDCQQGTRALLQTLGNLGYRASAKKAQICQKQVKYLGYLLKEGQRWLTEARKETVMGQPTPKTPRQLREFLGTAGFCRLWIPGFAEMAAPLYPLTKPGTLFNWGPDQQKAYQEIKQALLTAPALGLPDLTKPFELFVDEKQGYAKGVLTQKLGPWRRPVAYLSKKLDPVAAGWPPCLRMVAAIAVLTKDAGKLTMGQPLVILAPHAVEALVKQPPDRWLSNARMTHYQALLLDTDRVQFGPVVALNPATLLPLPEEGLQHNCLDILAEAHGTRPDLTDQPLPDADHTWYTDGSSLLQEGQRKAGAAVTTETEVIWAKALPAGTSAQRAELIALTQALKMAEGKKLNVYTDSRYAFATAHIHGEIYRRRGWLTSEGKEIKNKDEILALLKALFLPKRLSIIHCPGHQKGHSAEARGNRMADQAARKAAITETPDTSTLLAGKRTADGSEFEKRTADGSEFESPKKKAKVE

SEQ ID NO: 2981 - protein, 2100 aa, synthetic construct
MPAAKRVKLDGGDKKYSIGLDIGTNSVGWAVITDEYKVPSKKFKVLGNTDRHSIKKNLIGALLFDSGETAEATRLKRTARRRYTRRKNRICYLQEIFSNEMAKVDDSFFHRLEESFLVEEDKKHERHPIFGNIVDEVAYHEKYPTIYHLRKKLVDSTDKADLRLIYLALAHMIKFRGHFLIEGDLNPDNSDVDKLFIQLVQTYNQLFEENPINASGVDAKAILSARLSKSRRLENLIAQLPGEKKNGLFGNLIALSLGLTPNFKSNFDLAEDAKLQLSKDTYDDDLDNLLAQIGDQYADLFLAAKNLSDAILLSDILRVNTEITKAPLSASMIKRYDEHHQDLTLLKALVRQQLPEKYKEIFFDQSKNGYAGYIDGGASQEEFYKFIKPILEKMDGTEELLVKLNREDLLRKQRTFDNGSIPHQIHLGELHAILRRQEDFYPFLKDNREKIEKILTFRIPYYVGPLARGNSRFAWMTRKSEETITPWNFEEVVDKGASAQSFIERMTNFDKNLPNEKVLPKHSLLYEYFTVYNELTKVKYVTEGMRKPAFLSGEQKKAIVDLLFKTNRKVTVKQLKEDYFKKIECFDSVEISGVEDRFNASLGTYHDLLKIIKDKDFLDNEENEDILEDIVLTLTLFEDREMIEERLKTYAHLFDDKVMKQLKRRRYTGWGRLSRKLINGIRDKQSGKTILDFLKSDGFANRNFMQLIHDDSLTFKEDIQKAQVSGQGDSLHEHIANLAGSPAIKKGILQTVKVVDELVKVMGRHKPENIVIEMARENQTTQKGQKNSRERMKRIEEGIKELGSQILKEHPVENTQLQNEKLYLYYLQNGRDMYVDQELDINRLSDYDVDHIVPQSFLKDDSIDNKVLTRSDKARGKSDNVPSEEVVKKMKNYWRQLLNAKLITQRKFDNLTKAERGGLSELDKAGFIKRQLVETRQITKHVAQILDSRMNTKYDENDKLIREVKVITLKSKLVSDFRKDFQFYKVREINNYHHAHDAYLNAVVGTALIKKYPKLESEFVYGDYKVYDVRKMIAKSEQEIGKATAKYFFYSNIMNFFKTEITLANGEIRKRPLIETNGETGEIVWDKGRDFATVRKVLSMPQVNIVKKTEVQTGGFSKESILPKRNSDKLIARKKDWDPKKYGGFDSPTVAYSVLVVAKVEKGKSKKLKSVKELLGITIMERSSFEKNPIDFLEAKGYKEVKKDLIIKLPKYSLFELENGRKRMLASAGELQKGNELALPSKYVNFLYLASHYEKLKGSPEDNEQKQLFVEQHKHYLDEIIEQISEFSKRVILADANLDKVLSAYNKHRDKPIREQAENIIHLFTLTNLGAPAAFKYFDTTIDRKRYTSTKEVLDATLIHQSITGLYETRIDLSQLGGDGGGGSGGSGGSGGSGGSGGTLNIEDEHRLHETSKEPDVSLGSTWLSDFPQAWAETGGMGLAVRQAPLIIPLKATSTPVSIKQYPMSQEARLGIKPHIQRLLDQGILVPCQSPWNTPLLPVKKPGTNDYRPVQDLREVNKRVEDIHPTVPNPYNLLSGLPPSHQWYTVLDLKDAFFCLRLHPTSQPLFAFEWRDPEMGISGQLTWTRLPQGFKNSPTLFNEALHRDLADFRIQHPDLILLQYVDDLLLAATSELDCQQGTRALLQTLGNLGYRASAKKAQICQKQVKYLGYLLKEGQRWLTEARKETVMGQPTPKTPRQLREFLGTAGFCRLWIPGFAEMAAPLYPLTKPGTLFNWGPDQQKAYQEIKQALLTAPALGLPDLTKPFELFVDEKQGYAKGVLTQKLGPWRRPVAYLSKKLDPVAAGWPPCLRMVAAIAVLTKDAGKLTMGQPLVILAPHAVEALVKQPPDRWLSNARMTHYQALLLDTDRVQFGPVVALNPATLLPLPEEGLQHNCLDILAEAHGTRPDLTDQPLPDADHTWYTDGSSLLQEGQRKAGAAVTTETEVIWAKALPAGTSAQRAELIALTQALKMAEGKKLNVYTDSRYAFATAHIHGEIYRRRGWLTSEGKEIKNKDEILALLKALFLPKRLSIIHCPGHQKGHSAEARGNRMADQAARKAAITETPDTSTLLAGKRTADGSEFEKRTADGSEFESPKKKAKVE

SEQ ID NO: 2982 - protein, 2093 aa, synthetic construct; identical to SEQ ID NO: 2726

SEQ ID NO: 2983 - protein, 2115 aa, synthetic construct; identical to SEQ ID NO: 2741

SEQ ID NO: 2984 - protein, 2090 aa, synthetic construct
MPAAKRVKLDGGDKKYSIGLDIGTNSVGWAVITDEYKVPSKKFKVLGNTDRHSIKKNLIGALLFDSGETAEATRLKRTARRRYTRRKNRICYLQEIFSNEMAKVDDSFFHRLEESFLVEEDKKHERHPIFGNIVDEVAYHEKYPTIYHLRKKLVDSTDKADLRLIYLALAHMIKFRGHFLIEGDLNPDNSDVDKLFIQLVQTYNQLFEENPINASGVDAKAILSARLSKSRRLENLIAQLPGEKKNGLFGNLIALSLGLTPNFKSNFDLAEDAKLQLSKDTYDDDLDNLLAQIGDQYADLFLAAKNLSDAILLSDILRVNTEITKAPLSASMIKRYDEHHQDLTLLKALVRQQLPEKYKEIFFDQSKNGYAGYIDGGASQEEFYKFIKPILEKMDGTEELLVKLNREDLLRKQRTFDNGSIPHQIHLGELHAILRRQEDFYPFLKDNREKIEKILTFRIPYYVGPLARGNSRFAWMTRKSEETITPWNFEEVVDKGASAQSFIERMTNFDKNLPNEKVLPKHSLLYEYFTVYNELTKVKYVTEGMRKPAFLSGEQKKAIVDLLFKTNRKVTVKQLKEDYFKKIECFDSVEISGVEDRFNASLGTYHDLLKIIKDKDFLDNEENEDILEDIVLTLTLFEDREMIEERLKTYAHLFDDKVMKQLKRRRYTGWGRLSRKLINGIRDKQSGKTILDFLKSDGFANRNFMQLIHDDSLTFKEDIQKAQVSGQGDSLHEHIANLAGSPAIKKGILQTVKVVDELVKVMGRHKPENIVIEMARENQTTQKGQKNSRERMKRIEEGIKELGSQILKEHPVENTQLQNEKLYLYYLQNGRDMYVDQELDINRLSDYDVDHIVPQSFLKDDSIDNKVLTRSDKARGKSDNVPSEEVVKKMKNYWRQLLNAKLITQRKFDNLTKAERGGLSELDKAGFIKRQLVETRQITKHVAQILDSRMNTKYDENDKLIREVKVITLKSKLVSDFRKDFQFYKVREINNYHHAHDAYLNAVVGTALIKKYPKLESEFVYGDYKVYDVRKMIAKSEQEIGKATAKYFFYSNIMNFFKTEITLANGEIRKRPLIETNGETGEIVWDKGRDFATVRKVLSMPQVNIVKKTEVQTGGFSKESILPKRNSDKLIARKKDWDPKKYGGFDSPTVAYSVLVVAKVEKGKSKKLKSVKELLGITIMERSSFEKNPIDFLEAKGYKEVKKDLIIKLPKYSLFELENGRKRMLASAGELQKGNELALPSKYVNFLYLASHYEKLKGSPEDNEQKQLFVEQHKHYLDEIIEQISEFSKRVILADANLDKVLSAYNKHRDKPIREQAENIIHLFTLTNLGAPAAFKYFDTTIDRKRYTSTKEVLDATLIHQSITGLYETRIDLSQLGGDGGGGGGGGGTLNIEDEHRLHETSKEPDVSLGSTWLSDFPQAWAETGGMGLAVRQAPLIIPLKATSTPVSIKQYPMSQEARLGIKPHIQRLLDQGILVPCQSPWNTPLLPVKKPGTNDYRPVQDLREVNKRVEDIHPTVPNPYNLLSGLPPSHQWYTVLDLKDAFFCLRLHPTSQPLFAFEWRDPEMGISGQLTWTRLPQGFKNSPTLFNEALHRDLADFRIQHPDLILLQYVDDLLLAATSELDCQQGTRALLQTLGNLGYRASAKKAQICQKQVKYLGYLLKEGQRWLTEARKETVMGQPTPKTPRQLREFLGTAGFCRLWIPGFAEMAAPLYPLTKPGTLFNWGPDQQKAYQEIKQALLTAPALGLPDLTKPFELFVDEKQGYAKGVLTQKLGPWRRPVAYLSKKLDPVAAGWPPCLRMVAAIAVLTKDAGKLTMGQPLVILAPHAVEALVKQPPDRWLSNARMTHYQALLLDTDRVQFGPVVALNPATLLPLPEEGLQHNCLDILAEAHGTRPDLTDQPLPDADHTWYTDGSSLLQEGQRKAGAAVTTETEVIWAKALPAGTSAQRAELIALTQALKMAEGKKLNVYTDSRYAFATAHIHGEIYRRRGWLTSEGKEIKNKDEILALLKALFLPKRLSIIHCPGHQKGHSAEARGNRMADQAARKAAITETPDTSTLLAGKRTADGSEFEKRTADGSEFESPKKKAKVE

SEQ ID NO: 2985 - protein, 2094 aa, synthetic construct
MPAAKRVKLDGGDKKYSIGLDIGTNSVGWAVITDEYKVPSKKFKVLGNTDRHSIKKNLIGALLFDSGETAEATRLKRTARRRYTRRKNRICYLQEIFSNEMAKVDDSFFHRLEESFLVEEDKKHERHPIFGNIVDEVAYHEKYPTIYHLRKKLVDSTDKADLRLIYLALAHMIKFRGHFLIEGDLNPDNSDVDKLFIQLVQTYNQLFEENPINASGVDAKAILSARLSKSRRLENLIAQLPGEKKNGLFGNLIALSLGLTPNFKSNFDLAEDAKLQLSKDTYDDDLDNLLAQIGDQYADLFLAAKNLSDAILLSDILRVNTEITKAPLSASMIKRYDEHHQDLTLLKALVRQQLPEKYKEIFFDQSKNGYAGYIDGGASQEEFYKFIKPILEKMDGTEELLVKLNREDLLRKQRTFDNGSIPHQIHLGELHAILRRQEDFYPFLKDNREKIEKILTFRIPYYVGPLARGNSRFAWMTRKSEETITPWNFEEVVDKGASAQSFIERMTNFDKNLPNEKVLPKHSLLYEYFTVYNELTKVKYVTEGMRKPAFLSGEQKKAIVDLLFKTNRKVTVKQLKEDYFKKIECFDSVEISGVEDRFNASLGTYHDLLKIIKDKDFLDNEENEDILEDIVLTLTLFEDREMIEERLKTYAHLFDDKVMKQLKRRRYTGWGRLSRKLINGIRDKQSGKTILDFLKSDGFANRNFMQLIHDDSLTFKEDIQKAQVSGQGDSLHEHIANLAGSPAIKKGILQTVKVVDELVKVMGRHKPENIVIEMARENQTTQKGQKNSRERMKRIEEGIKELGSQILKEHPVENTQLQNEKLYLYYLQNGRDMYVDQELDINRLSDYDVDHIVPQSFLKDDSIDNKVLTRSDKARGKSDNVPSEEVVKKMKNYWRQLLNAKLITQRKFDNLTKAERGGLSELDKAGFIKRQLVETRQITKHVAQILDSRMNTKYDENDKLIREVKVITLKSKLVSDFRKDFQFYKVREINNYHHAHDAYLNAVVGTALIKKYPKLESEFVYGDYKVYDVRKMIAKSEQEIGKATAKYFFYSNIMNFFKTEITLANGEIRKRPLIETNGETGEIVWDKGRDFATVRKVLSMPQVNIVKKTEVQTGGFSKESILPKRNSDKLIARKKDWDPKKYGGFDSPTVAYSVLVVAKVEKGKSKKLKSVKELLGITIMERSSFEKNPIDFLEAKGYKEVKKDLIIKLPKYSLFELENGRKRMLASAGELQKGNELALPSKYVNFLYLASHYEKLKGSPEDNEQKQLFVEQHKHYLDEIIEQISEFSKRVILADANLDKVLSAYNKHRDKPIREQAENIIHLFTLTNLGAPAAFKYFDTTIDRKRYTSTKEVLDATLIHQSITGLYETRIDLSQLGGDGGGGSGSSPAPGGTLNIEDEHRLHETSKEPDVSLGSTWLSDFPQAWAETGGMGLAVRQAPLIIPLKATSTPVSIKQYPMSQEARLGIKPHIQRLLDQGILVPCQSPWNTPLLPVKKPGTNDYRPVQDLREVNKRVEDIHPTVPNPYNLLSGLPPSHQWYTVLDLKDAFFCLRLHPTSQPLFAFEWRDPEMGISGQLTWTRLPQGFKNSPTLFNEALHRDLADFRIQHPDLILLQYVDDLLLAATSELDCQQGTRALLQTLGNLGYRASAKKAQICQKQVKYLGYLLKEGQRWLTEARKETVMGQPTPKTPRQLREFLGTAGFCRLWIPGFAEMAAPLYPLTKPGTLFNWGPDQQKAYQEIKQALLTAPALGLPDLTKPFELFVDEKQGYAKGVLTQKLGPWRRPVAYLSKKLDPVAAGWPPCLRMVAAIAVLTKDAGKLTMGQPLVILAPHAVEALVKQPPDRWLSNARMTHYQALLLDTDRVQFGPVVALNPATLLPLPEEGLQHNCLDILAEAHGTRPDLTDQPLPDADHTWYTDGSSLLQEGQRKAGAAVTTETEVIWAKALPAGTSAQRAELIALTQALKMAEGKKLNVYTDSRYAFATAHIHGEIYRRRGWLTSEGKEIKNKDEILALLKALFLPKRLSIIHCPGHQKGHSAEARGNRMADQAARKAAITETPDTSTLLAGKRTADGSEFEKRTADGSEFESPKKKAKVE

SEQ ID NO: 2986 - protein, 2088 aa, synthetic construct
MPAAKRVKLDGGDKKYSIGLDIGTNSVGWAVITDEYKVPSKKFKVLGNTDRHSIKKNLIGALLFDSGETAEATRLKRTARRRYTRRKNRICYLQEIFSNEMAKVDDSFFHRLEESFLVEEDKKHERHPIFGNIVDEVAYHEKYPTIYHLRKKLVDSTDKADLRLIYLALAHMIKFRGHFLIEGDLNPDNSDVDKLFIQLVQTYNQLFEENPINASGVDAKAILSARLSKSRRLENLIAQLPGEKKNGLFGNLIALSLGLTPNFKSNFDLAEDAKLQLSKDTYDDDLDNLLAQIGDQYADLFLAAKNLSDAILLSDILRVNTEITKAPLSASMIKRYDEHHQDLTLLKALVRQQLPEKYKEIFFDQSKNGYAGYIDGGASQEEFYKFIKPILEKMDGTEELLVKLNREDLLRKQRTFDNGSIPHQIHLGELHAILRRQEDFYPFLKDNREKIEKILTFRIPYYVGPLARGNSRFAWMTRKSEETITPWNFEEVVDKGASAQSFIERMTNFDKNLPNEKVLPKHSLLYEYFTVYNELTKVKYVTEGMRKPAFLSGEQKKAIVDLLFKTNRKVTVKQLKEDYFKKIECFDSVEISGVEDRFNASLGTYHDLLKIIKDKDFLDNEENEDILEDIVLTLTLFEDREMIEERLKTYAHLFDDKVMKQLKRRRYTGWGRLSRKLINGIRDKQSGKTILDFLKSDGFANRNFMQLIHDDSLTFKEDIQKAQVSGQGDSLHEHIANLAGSPAIKKGILQTVKVVDELVKVMGRHKPENIVIEMARENQTTQKGQKNSRERMKRIEEGIKELGSQILKEHPVENTQLQNEKLYLYYLQNGRDMYVDQELDINRLSDYDVDHIVPQSFLKDDSIDNKVLTRSDKARGKSDNVPSEEVVKKMKNYWRQLLNAKLITQRKFDNLTKAERGGLSELDKAGFIKRQLVETRQITKHVAQILDSRMNTKYDENDKLIREVKVITLKSKLVSDFRKDFQFYKVREINNYHHAHDAYLNAVVGTALIKKYPKLESEFVYGDYKVYDVRKMIAKSEQEIGKATAKYFFYSNIMNFFKTEITLANGEIRKRPLIETNGETGEIVWDKGRDFATVRKVLSMPQVNIVKKTEVQTGGFSKESILPKRNSDKLIARKKDWDPKKYGGFDSPTVAYSVLVVAKVEKGKSKKLKSVKELLGITIMERSSFEKNPIDFLEAKGYKEVKKDLIIKLPKYSLFELENGRKRMLASAGELQKGNELALPSKYVNFLYLASHYEKLKGSPEDNEQKQLFVEQHKHYLDEIIEQISEFSKRVILADANLDKVLSAYNKHRDKPIREQAENIIHLFTLTNLGAPAAFKYFDTTIDRKRYTSTKEVLDATLIHQSITGLYETRIDLSQLGGDGGGSSGGTLNIEDEHRLHETSKEPDVSLGSTWLSDFPQAWAETGGMGLAVRQAPLIIPLKATSTPVSIKQYPMSQEARLGIKPHIQRLLDQGILVPCQSPWNTPLLPVKKPGTNDYRPVQDLREVNKRVEDIHPTVPNPYNLLSGLPPSHQWYTVLDLKDAFFCLRLHPTSQPLFAFEWRDPEMGISGQLTWTRLPQGFKNSPTLFNEALHRDLADFRIQHPDLILLQYVDDLLLAATSELDCQQGTRALLQTLGNLGYRASAKKAQICQKQVKYLGYLLKEGQRWLTEARKETVMGQPTPKTPRQLREFLGTAGFCRLWIPGFAEMAAPLYPLTKPGTLFNWGPDQQKAYQEIKQALLTAPALGLPDLTKPFELFVDEKQGYAKGVLTQKLGPWRRPVAYLSKKLDPVAAGWPPCLRMVAAIAVLTKDAGKLTMGQPLVILAPHAVEALVKQPPDRWLSNARMTHYQALLLDTDRVQFGPVVALNPATLLPLPEEGLQHNCLDILAEAHGTRPDLTDQPLPDADHTWYTDGSSLLQEGQRKAGAAVTTETEVIWAKALPAGTSAQRAELIALTQALKMAEGKKLNVYTDSRYAFATAHIHGEIYRRRGWLTSEGKEIKNKDEILALLKALFLPKRLSIIHCPGHQKGHSAEARGNRMADQAARKAAITETPDTSTLLAGKRTADGSEFEKRTADGSEFESPKKKAKVE

SEQ ID NO: 2987 - protein, 2096 aa, synthetic construct; identical to SEQ ID NO: 2776

SEQ ID NO: 2988 - protein, 2094 aa, synthetic construct
MPAAKRVKLDGGDKKYSIGLDIGTNSVGWAVITDEYKVPSKKFKVLGNTDRHSIKKNLIGALLFDSGETAEATRLKRTARRRYTRRKNRICYLQEIFSNEMAKVDDSFFHRLEESFLVEEDKKHERHPIFGNIVDEVAYHEKYPTIYHLRKKLVDSTDKADLRLIYLALAHMIKFRGHFLIEGDLNPDNSDVDKLFIQLVQTYNQLFEENPINASGVDAKAILSARLSKSRRLENLIAQLPGEKKNGLFGNLIALSLGLTPNFKSNFDLAEDAKLQLSKDTYDDDLDNLLAQIGDQYADLFLAAKNLSDAILLSDILRVNTEITKAPLSASMIKRYDEHHQDLTLLKALVRQQLPEKYKEIFFDQSKNGYAGYIDGGASQEEFYKFIKPILEKMDGTEELLVKLNREDLLRKQRTFDNGSIPHQIHLGELHAILRRQEDFYPFLKDNREKIEKILTFRIPYYVGPLARGNSRFAWMTRKSEETITPWNFEEVVDKGASAQSFIERMTNFDKNLPNEKVLPKHSLLYEYFTVYNELTKVKYVTEGMRKPAFLSGEQKKAIVDLLFKTNRKVTVKQLKEDYFKKIECFDSVEISGVEDRFNASLGTYHDLLKIIKDKDFLDNEENEDILEDIVLTLTLFEDREMIEERLKTYAHLFDDKVMKQLKRRRYTGWGRLSRKLINGIRDKQSGKTILDFLKSDGFANRNFMQLIHDDSLTFKEDIQKAQVSGQGDSLHEHIANLAGSPAIKKGILQTVKVVDELVKVMGRHKPENIVIEMARENQTTQKGQKNSRERMKRIEEGIKELGSQILKEHPVENTQLQNEKLYLYYLQNGRDMYVDQELDINRLSDYDVDHIVPQSFLKDDSIDNKVLTRSDKARGKSDNVPSEEVVKKMKNYWRQLLNAKLITQRKFDNLTKAERGGLSELDKAGFIKRQLVETRQITKHVAQILDSRMNTKYDENDKLIREVKVITLKSKLVSDFRKDFQFYKVREINNYHHAHDAYLNAVVGTALIKKYPKLESEFVYGDYKVYDVRKMIAKSEQEIGKATAKYFFYSNIMNFFKTEITLANGEIRKRPLIETNGETGEIVWDKGRDFATVRKVLSMPQVNIVKKTEVQTGGFSKESILPKRNSDKLIARKKDWDPKKYGGFDSPTVAYSVLVVAKVEKGKSKKLKSVKELLGITIMERSSFEKNPIDFLEAKGYKEVKKDLIIKLPKYSLFELENGRKRMLASAGELQKGNELALPSKYVNFLYLASHYEKLKGSPEDNEQKQLFVEQHKHYLDEIIEQISEFSKRVILADANLDKVLSAYNKHRDKPIREQAENIIHLFTLTNLGAPAAFKYFDTTIDRKRYTSTKEVLDATLIHQSITGLYETRIDLSQLGGDGGGSSPAPGGGGGTLNIEDEHRLHETSKEPDVSLGSTWLSDFPQAWAETGGMGLAVRQAPLIIPLKATSTPVSIKQYPMSQEARLGIKPHIQRLLDQGILVPCQSPWNTPLLPVKKPGTNDYRPVQDLREVNKRVEDIHPTVPNPYNLLSGLPPSHQWYTVLDLKDAFFCLRLHPTSQPLFAFEWRDPEMGISGQLTWTRLPQGFKNSPTLFNEALHRDLADFRIQHPDLILLQYVDDLLLAATSELDCQQGTRALLQTLGNLGYRASAKKAQICQKQVKYLGYLLKEGQRWLTEARKETVMGQPTPKTPRQLREFLGTAGFCRLWIPGFAEMAAPLYPLTKPGTLFNWGPDQQKAYQEIKQALLTAPALGLPDLTKPFELFVDEKQGYAKGVLTQKLGPWRRPVAYLSKKLDPVAAGWPPCLRMVAAIAVLTKDAGKLTMGQPLVILAPHAVEALVKQPPDRWLSNARMTHYQALLLDTDRVQFGPVVALNPATLLPLPEEGLQHNCLDILAEAHGTRPDLTDQPLPDADHTWYTDGSSLLQEGQRKAGAAVTTETEVIWAKALPAGTSAQRAELIALTQALKMAEGKKLNVYTDSRYAFATAHIHGEIYRRRGWLTSEGKEIKNKDEILALLKALFLPKRLSIIHCPGHQKGHSAEARGNRMADQAARKAAITETPDTSTLLAGKRTADGSEFEKRTADGSEFESPKKKAKVE

SEQ ID NO: 2989 - protein, 2096 aa, synthetic construct; identical to SEQ ID NO: 2727

SEQ ID NO: 2990 - protein, 2096 aa, synthetic construct; identical to SEQ ID NO: 2764

SEQ ID NO: 2991 - protein, 2110 aa, synthetic construct; identical to SEQ ID NO: 2716

SEQ ID NO: 2992 - protein, 2115 aa, synthetic construct
MPAAKRVKLDGGDKKYSIGLDIGTNSVGWAVITDEYKVPSKKFKVLGNTDRHSIKKNLIGALLFDSGETAEATRLKRTARRRYTRRKNRICYLQEIFSNEMAKVDDSFFHRLEESFLVEEDKKHERHPIFGNIVDEVAYHEKYPTIYHLRKKLVDSTDKADLRLIYLALAHMIKFRGHFLIEGDLNPDNSDVDKLFIQLVQTYNQLFEENPINASGVDAKAILSARLSKSRRLENLIAQLPGEKKNGLFGNLIALSLGLTPNFKSNFDLAEDAKLQLSKDTYDDDLDNLLAQIGDQYADLFLAAKNLSDAILLSDILRVNTEITKAPLSASMIKRYDEHHQDLTLLKALVRQQLPEKYKEIFFDQSKNGYAGYIDGGASQEEFYKFIKPILEKMDGTEELLVKLNREDLLRKQRTFDNGSIPHQIHLGELHAILRRQEDFYPFLKDNREKIEKILTFRIPYYVGPLARGNSRFAWMTRKSEETITPWNFEEVVDKGASAQSFIERMTNFDKNLPNEKVLPKHSLLYEYFTVYNELTKVKYVTEGMRKPAFLSGEQKKAIVDLLFKTNRKVTVKQLKEDYFKKIECFDSVEISGVEDRFNASLGTYHDLLKIIKDKDFLDNEENEDILEDIVLTLTLFEDREMIEERLKTYAHLFDDKVMKQLKRRRYTGWGRLSRKLINGIRDKQSGKTILDFLKSDGFANRNFMQLIHDDSLTFKEDIQKAQVSGQGDSLHEHIANLAGSPAIKKGILQTVKVVDELVKVMGRHKPENIVIEMARENQTTQKGQKNSRERMKRIEEGIKELGSQILKEHPVENTQLQNEKLYLYYLQNGRDMYVDQELDINRLSDYDVDHIVPQSFLKDDSIDNKVLTRSDKARGKSDNVPSEEVVKKMKNYWRQLLNAKLITQRKFDNLTKAERGGLSELDKAGFIKRQLVETRQITKHVAQILDSRMNTKYDENDKLIREVKVITLKSKLVSDFRKDFQFYKVREINNYHHAHDAYLNAVVGTALIKKYPKLESEFVYGDYKVYDVRKMIAKSEQEIGKATAKYFFYSNIMNFFKTEITLANGEIRKRPLIETNGETGEIVWDKGRDFATVRKVLSMPQVNIVKKTEVQTGGFSKESILPKRNSDKLIARKKDWDPKKYGGFDSPTVAYSVLVVAKVEKGKSKKLKSVKELLGITIMERSSFEKNPIDFLEAKGYKEVKKDLIIKLPKYSLFELENGRKRMLASAGELQKGNELALPSKYVNFLYLASHYEKLKGSPEDNEQKQLFVEQHKHYLDEIIEQISEFSKRVILADANLDKVLSAYNKHRDKPIREQAENIIHLFTLTNLGAPAAFKYFDTTIDRKRYTSTKEVLDATLIHQSITGLYETRIDLSQLGGDGGEAAAKEAAAKEAAAKEAAAKEAAAKEAAAKGGTLNIEDEHRLHETSKEPDVSLGSTWLSDFPQAWAETGGMGLAVRQAPLIIPLKATSTPVSIKQYPMSQEARLGIKPHIQRLLDQGILVPCQSPWNTPLLPVKKPGTNDYRPVQDLREVNKRVEDIHPTVPNPYNLLSGLPPSHQWYTVLDLKDAFFCLRLHPTSQPLFAFEWRDPEMGISGQLTWTRLPQGFKNSPTLFNEALHRDLADFRIQHPDLILLQYVDDLLLAATSELDCQQGTRALLQTLGNLGYRASAKKAQICQKQVKYLGYLLKEGQRWLTEARKETVMGQPTPKTPRQLREFLGTAGFCRLWIPGFAEMAAPLYPLTKPGTLFNWGPDQQKAYQEIKQALLTAPALGLPDLTKPFELFVDEKQGYAKGVLTQKLGPWRRPVAYLSKKLDPVAAGWPPCLRMVAAIAVLTKDAGKLTMGQPLVILAPHAVEALVKQPPDRWLSNARMTHYQALLLDTDRVQFGPVVALNPATLLPLPEEGLQHNCLDILAEAHGTRPDLTDQPLPDADHTWYTDGSSLLQEGQRKAGAAVTTETEVIWAKALPAGTSAQRAELIALTQALKMAEGKKLNVYTDSRYAFATAHIHGEIYRRRGWLTSEGKEIKNKDEILALLKALFLPKRLSIIHCPGHQKGHSAEARGNRMADQAARKAAITETPDTSTLLAGKRTADGSEFEKRTADGSEFESPKKKAKVE

SEQ ID NO: 2993 - protein, 2094 aa, synthetic construct; identical to SEQ ID NO: 2766

SEQ ID NO: 2994 - protein, 2094 aa, synthetic construct; identical to SEQ ID NO: 2773

SEQ ID NO: 2995 - protein, 2097 aa, synthetic construct
MPAAKRVKLDGGDKKYSIGLDIGTNSVGWAVITDEYKVPSKKFKVLGNTDRHSIKKNLIGALLFDSGETAEATRLKRTARRRYTRRKNRICYLQEIFSNEMAKVDDSFFHRLEESFLVEEDKKHERHPIFGNIVDEVAYHEKYPTIYHLRKKLVDSTDKADLRLIYLALAHMIKFRGHFLIEGDLNPDNSDVDKLFIQLVQTYNQLFEENPINASGVDAKAILSARLSKSRRLENLIAQLPGEKKNGLFGNLIALSLGLTPNFKSNFDLAEDAKLQLSKDTYDDDLDNLLAQIGDQYADLFLAAKNLSDAILLSDILRVNTEITKAPLSASMIKRYDEHHQDLTLLKALVRQQLPEKYKEIFFDQSKNGYAGYIDGGASQEEFYKFIKPILEKMDGTEELLVKLNREDLLRKQRTFDNGSIPHQIHLGELHAILRRQEDFYPFLKDNREKIEKILTFRIPYYVGPLARGNSRFAWMTRKSEETITPWNFEEVVDKGASAQSFIERMTNFDKNLPNEKVLPKHSLLYEYFTVYNELTKVKYVTEGMRKPAFLSGEQKKAIVDLLFKTNRKVTVKQLKEDYFKKIECFDSVEISGVEDRFNASLGTYHDLLKIIKDKDFLDNEENEDILEDIVLTLTLFEDREMIEERLKTYAHLFDDKVMKQLKRRRYTGWGRLSRKLINGIRDKQSGKTILDFLKSDGFANRNFMQLIHDDSLTFKEDIQKAQVSGQGDSLHEHIANLAGSPAIKKGILQTVKVVDELVKVMGRHKPENIVIEMARENQTTQKGQKNSRERMKRIEEGIKELGSQILKEHPVENTQLQNEKLYLYYLQNGRDMYVDQELDINRLSDYDVDHIVPQSFLKDDSIDNKVLTRSDKARGKSDNVPSEEVVKKMKNYWRQLLNAKLITQRKFDNLTKAERGGLSELDKAGFIKRQLVETRQITKHVAQILDSRMNTKYDENDKLIREVKVITLKSKLVSDFRKDFQFYKVREINNYHHAHDAYLNAVVGTALIKKYPKLESEFVYGDYKVYDVRKMIAKSEQEIGKATAKYFFYSNIMNFFKTEITLANGEIRKRPLIETNGETGEIVWDKGRDFATVRKVLSMPQVNIVKKTEVQTGGFSKESILPKRNSDKLIARKKDWDPKKYGGFDSPTVAYSVLVVAKVEKGKSKKLKSVKELLGITIMERSSFEKNPIDFLEAKGYKEVKKDLIIKLPKYSLFELENGRKRMLASAGELQKGNELALPSKYVNFLYLASHYEKLKGSPEDNEQKQLFVEQHKHYLDEIIEQISEFSKRVILADANLDKVLSAYNKHRDKPIREQAENIIHLFTLTNLGAPAAFKYFDTTIDRKRYTSTKEVLDATLIHQSITGLYETRIDLSQLGGDGGGSAGSAAGSGEFGGTLNIEDEHRLHETSKEPDVSLGSTWLSDFPQAWAETGGMGLAVRQAPLIIPLKATSTPVSIKQYPMSQEARLGIKPHIQRLLDQGILVPCQSPWNTPLLPVKKPGTNDYRPVQDLREVNKRVEDIHPTVPNPYNLLSGLPPSHQWYTVLDLKDAFFCLRLHPTSQPLFAFEWRDPEMGISGQLTWTRLPQGFKNSPTLFNEALHRDLADFRIQHPDLILLQYVDDLLLAATSELDCQQGTRALLQTLGNLGYRASAKKAQICQKQVKYLGYLLKEGQRWLTEARKETVMGQPTPKTPRQLREFLGTAGFCRLWIPGFAEMAAPLYPLTKPGTLFNWGPDQQKAYQEIKQALLTAPALGLPDLTKPFELFVDEKQGYAKGVLTQKLGPWRRPVAYLSKKLDPVAAGWPPCLRMVAAIAVLTKDAGKLTMGQPLVILAPHAVEALVKQPPDRWLSNARMTHYQALLLDTDRVQFGPVVALNPATLLPLPEEGLQHNCLDILAEAHGTRPDLTDQPLPDADHTWYTDGSSLLQEGQRKAGAAVTTETEVIWAKALPAGTSAQRAELIALTQALKMAEGKKLNVYTDSRYAFATAHIHGEIYRRRGWLTSEGKEIKNKDEILALLKALFLPKRLSIIHCPGHQKGHSAEARGNRMADQAARKAAITETPDTSTLLAGKRTADGSEFEKRTADGSEFESPKKKAKVE

SEQ ID NO: 2996 - protein, 2091 aa, synthetic construct
MPAAKRVKLDGGDKKYSIGLDIGTNSVGWAVITDEYKVPSKKFKVLGNTDRHSIKKNLIGALLFDSGETAEATRLKRTARRRYTRRKNRICYLQEIFSNEMAKVDDSFFHRLEESFLVEEDKKHERHPIFGNIVDEVAYHEKYPTIYHLRKKLVDSTDKADLRLIYLALAHMIKFRGHFLIEGDLNPDNSDVDKLFIQLVQTYNQLFEENPINASGVDAKAILSARLSKSRRLENLIAQLPGEKKNGLFGNLIALSLGLTPNFKSNFDLAEDAKLQLSKDTYDDDLDNLLAQIGDQYADLFLAAKNLSDAILLSDILRVNTEITKAPLSASMIKRYDEHHQDLTLLKALVRQQLPEKYKEIFFDQSKNGYAGYIDGGASQEEFYKFIKPILEKMDGTEELLVKLNREDLLRKQRTFDNGSIPHQIHLGELHAILRRQEDFYPFLKDNREKIEKILTFRIPYYVGPLARGNSRFAWMTRKSEETITPWNFEEVVDKGASAQSFIERMTNFDKNLPNEKVLPKHSLLYEYFTVYNELTKVKYVTEGMRKPAFLSGEQKKAIVDLLFKTNRKVTVKQLKEDYFKKIECFDSVEISGVEDRFNASLGTYHDLLKIIKDKDFLDNEENEDILEDIVLTLTLFEDREMIEERLKTYAHLFDDKVMKQLKRRRYTGWGRLSRKLINGIRDKQSGKTILDFLKSDGFANRNFMQLIHDDSLTFKEDIQKAQVSGQGDSLHEHIANLAGSPAIKKGILQTVKVVDELVKVMGRHKPENIVIEMARENQTTQKGQKNSRERMKRIEEGIKELGSQILKEHPVENTQLQNEKLYLYYLQNGRDMYVDQELDINRLSDYDVDHIVPQSFLKDDSIDNKVLTRSDKARGKSDNVPSEEVVKKMKNYWRQLLNAKLITQRKFDNLTKAERGGLSELDKAGFIKRQLVETRQITKHVAQILDSRMNTKYDENDKLIREVKVITLKSKLVSDFRKDFQFYKVREINNYHHAHDAYLNAVVGTALIKKYPKLESEFVYGDYKVYDVRKMIAKSEQEIGKATAKYFFYSNIMNFFKTEITLANGEIRKRPLIETNGETGEIVWDKGRDFATVRKVLSMPQVNIVKKTEVQTGGFSKESILPKRNSDKLIARKKDWDPKKYGGFDSPTVAYSVLVVAKVEKGKSKKLKSVKELLGITIMERSSFEKNPIDFLEAKGYKEVKKDLIIKLPKYSLFELENGRKRMLASAGELQKGNELALPSKYVNFLYLASHYEKLKGSPEDNEQKQLFVEQHKHYLDEIIEQISEFSKRVILADANLDKVLSAYNKHRDKPIREQAENIIHLFTLTNLGAPAAFKYFDTTIDRKRYTSTKEVLDATLIHQSITGLYETRIDLSQLGGDGGPAPGSSGGTLNIEDEHRLHETSKEPDVSLGSTWLSDFPQAWAETGGMGLAVRQAPLIIPLKATSTPVSIKQYPMSQEARLGIKPHIQRLLDQGILVPCQSPWNTPLLPVKKPGTNDYRPVQDLREVNKRVEDIHPTVPNPYNLLSGLPPSHQWYTVLDLKDAFFCLRLHPTSQPLFAFEWRDPEMGISGQLTWTRLPQGFKNSPTLFNEALHRDLADFRIQHPDLILLQYVDDLLLAATSELDCQQGTRALLQTLGNLGYRASAKKAQICQKQVKYLGYLLKEGQRWLTEARKETVMGQPTPKTPRQLREFLGTAGFCRLWIPGFAEMAAPLYPLTKPGTLFNWGPDQQKAYQEIKQALLTAPALGLPDLTKPFELFVDEKQGYAKGVLTQKLGPWRRPVAYLSKKLDPVAAGWPPCLRMVAAIAVLTKDAGKLTMGQPLVILAPHAVEALVKQPPDRWLSNARMTHYQALLLDTDRVQFGPVVALNPATLLPLPEEGLQHNCLDILAEAHGTRPDLTDQPLPDADHTWYTDGSSLLQEGQRKAGAAVTTETEVIWAKALPAGTSAQRAELIALTQALKMAEGKKLNVYTDSRYAFATAHIHGEIYRRRGWLTSEGKEIKNKDEILALLKALFLPKRLSIIHCPGHQKGHSAEARGNRMADQAARKAAITETPDTSTLLAGKRTADGSEFEKRTADGSEFESPKKKAKVE

SEQ ID NO: 2997 - protein, 2096 aa, synthetic construct
MPAAKRVKLDGGDKKYSIGLDIGTNSVGWAVITDEYKVPSKKFKVLGNTDRHSIKKNLIGALLFDSGETAEATRLKRTARRRYTRRKNRICYLQEIFSNEMAKVDDSFFHRLEESFLVEEDKKHERHPIFGNIVDEVAYHEKYPTIYHLRKKLVDSTDKADLRLIYLALAHMIKFRGHFLIEGDLNPDNSDVDKLFIQLVQTYNQLFEENPINASGVDAKAILSARLSKSRRLENLIAQLPGEKKNGLFGNLIALSLGLTPNFKSNFDLAEDAKLQLSKDTYDDDLDNLLAQIGDQYADLFLAAKNLSDAILLSDILRVNTEITKAPLSASMIKRYDEHHQDLTLLKALVRQQLPEKYKEIFFDQSKNGYAGYIDGGASQEEFYKFIKPILEKMDGTEELLVKLNREDLLRKQRTFDNGSIPHQIHLGELHAILRRQEDFYPFLKDNREKIEKILTFRIPYYVGPLARGNSRFAWMTRKSEETITPWNFEEVVDKGASAQSFIERMTNFDKNLPNEKVLPKHSLLYEYFTVYNELTKVKYVTEGMRKPAFLSGEQKKAIVDLLFKTNRKVTVKQLKEDYFKKIECFDSVEISGVEDRFNASLGTYHDLLKIIKDKDFLDNEENEDILEDIVLTLTLFEDREMIEERLKTYAHLFDDKVMKQLKRRRYTGWGRLSRKLINGIRDKQSGKTILDFLKSDGFANRNFMQLIHDDSLTFKEDIQKAQVSGQGDSLHEHIANLAGSPAIKKGILQTVKVVDELVKVMGRHKPENIVIEMARENQTTQKGQKNSRERMKRIEEGIKELGSQILKEHPVENTQLQNEKLYLYYLQNGRDMYVDQELDINRLSDYDVDHIVPQSFLKDDSIDNKVLTRSDKARGKSDNVPSEEVVKKMKNYWRQLLNAKLITQRKFDNLTKAERGGLSELDKAGFIKRQLVETRQITKHVAQILDSRMNTKYDENDKLIREVKVITLKSKLVSDFRKDFQFYKVREINNYHHAHDAYLNAVVGTALIKKYPKLESEFVYGDYKVYDVRKMIAKSEQEIGKATAKYFFYSNIMNFFKTEITLANGEIRKRPLIETNGETGEIVWDKGRDFATVRKVLSMPQVNIVKKTEVQTGGFSKESILPKRNSDKLIARKKDWDPKKYGGFDSPTVAYSVLVVAKVEKGKSKKLKSVKELLGITIMERSSFEKNPIDFLEAKGYKEVKKDLIIKLPKYSLFELENGRKRMLASAGELQKGNELALPSKYVNFLYLASHYEKLKGSPEDNEQKQLFVEQHKHYLDEIIEQISEFSKRVILADANLDKVLSAYNKHRDKPIREQAENIIHLFTLTNLGAPAAFKYFDTTIDRKRYTSTKEVLDATLIHQSITGLYETRIDLSQLGGDGGEAAAKGGGGSSGGTLNIEDEHRLHETSKEPDVSLGSTWLSDFPQAWAETGGMGLAVRQAPLIIPLKATSTPVSIKQYPMSQEARLGIKPHIQRLLDQGILVPCQSPWNTPLLPVKKPGTNDYRPVQDLREVNKRVEDIHPTVPNPYNLLSGLPPSHQWYTVLDLKDAFFCLRLHPTSQPLFAFEWRDPEMGISGQLTWTRLPQGFKNSPTLFNEALHRDLADFRIQHPDLILLQYVDDLLLAATSELDCQQGTRALLQTLGNLGYRASAKKAQICQKQVKYLGYLLKEGQRWLTEARKETVMGQPTPKTPRQLREFLGTAGFCRLWIPGFAEMAAPLYPLTKPGTLFNWGPDQQKAYQEIKQALLTAPALGLPDLTKPFELFVDEKQGYAKGVLTQKLGPWRRPVAYLSKKLDPVAAGWPPCLRMVAAIAVLTKDAGKLTMGQPLVILAPHAVEALVKQPPDRWLSNARMTHYQALLLDTDRVQFGPVVALNPATLLPLPEEGLQHNCLDILAEAHGTRPDLTDQPLPDADHTWYTDGSSLLQEGQRKAGAAVTTETEVIWAKALPAGTSAQRAELIALTQALKMAEGKKLNVYTDSRYAFATAHIHGEIYRRRGWLTSEGKEIKNKDEILALLKALFLPKRLSIIHCPGHQKGHSAEARGNRMADQAARKAAITETPDTSTLLAGKRTADGSEFEKRTADGSEFESPKKKAKVE

SEQ ID NO: 2998 - protein, 2100 aa, synthetic construct
MPAAKRVKLDGGDKKYSIGLDIGTNSVGWAVITDEYKVPSKKFKVLGNTDRHSIKKNLIGALLFDSGETAEATRLKRTARRRYTRRKNRICYLQEIFSNEMAKVDDSFFHRLEESFLVEEDKKHERHPIFGNIVDEVAYHEKYPTIYHLRKKLVDSTDKADLRLIYLALAHMIKFRGHFLIEGDLNPDNSDVDKLFIQLVQTYNQLFEENPINASGVDAKAILSARLSKSRRLENLIAQLPGEKKNGLFGNLIALSLGLTPNFKSNFDLAEDAKLQLSKDTYDDDLDNLLAQIGDQYADLFLAAKNLSDAILLSDILRVNTEITKAPLSASMIKRYDEHHQDLTLLKALVRQQLPEKYKEIFFDQSKNGYAGYIDGGASQEEFYKFIKPILEKMDGTEELLVKLNREDLLRKQRTFDNGSIPHQIHLGELHAILRRQEDFYPFLKDNREKIEKILTFRIPYYVGPLARGNSRFAWMTRKSEETITPWNFEEVVDKGASAQSFIERMTNFDKNLPNEKVLPKHSLLYEYFTVYNELTKVKYVTEGMRKPAFLSGEQKKAIVDLLFKTNRKVTVKQLKEDYFKKIECFDSVEISGVEDRFNASLGTYHDLLKIIKDKDFLDNEENEDILEDIVLTLTLFEDREMIEERLKTYAHLFDDKVMKQLKRRRYTGWGRLSRKLINGIRDKQSGKTILDFLKSDGFANRNFMQLIHDDSLTFKEDIQKAQVSGQGDSLHEHIANLAGSPAIKKGILQTVKVVDELVKVMGRHKPENIVIEMARENQTTQKGQKNSRERMKRIEEGIKELGSQILKEHPVENTQLQNEKLYLYYLQNGRDMYVDQELDINRLSDYDVDHIVPQSFLKDDSIDNKVLTRSDKARGKSDNVPSEEVVKKMKNYWRQLLNAKLITQRKFDNLTKAERGGLSELDKAGFIKRQLVETRQITKHVAQILDSRMNTKYDENDKLIREVKVITLKSKLVSDFRKDFQFYKVREINNYHHAHDAYLNAVVGTALIKKYPKLESEFVYGDYKVYDVRKMIAKSEQEIGKATAKYFFYSNIMNFFKTEITLANGEIRKRPLIETNGETGEIVWDKGRDFATVRKVLSMPQVNIVKKTEVQTGGFSKESILPKRNSDKLIARKKDWDPKKYGGFDSPTVAYSVLVVAKVEKGKSKKLKSVKELLGITIMERSSFEKNPIDFLEAKGYKEVKKDLIIKLPKYSLFELENGRKRMLASAGELQKGNELALPSKYVNFLYLASHYEKLKGSPEDNEQKQLFVEQHKHYLDEIIEQISEFSKRVILADANLDKVLSAYNKHRDKPIREQAENIIHLFTLTNLGAPAAFKYFDTTIDRKRYTSTKEVLDATLIHQSITGLYETRIDLSQLGGDGGGSSGSSGSSGSSGSSGGTLNIEDEHRLHETSKEPDVSLGSTWLSDFPQAWAETGGMGLAVRQAPLIIPLKATSTPVSIKQYPMSQEARLGIKPHIQRLLDQGILVPCQSPWNTPLLPVKKPGTNDYRPVQDLREVNKRVEDIHPTVPNPYNLLSGLPPSHQWYTVLDLKDAFFCLRLHPTSQPLFAFEWRDPEMGISGQLTWTRLPQGFKNSPTLFNEALHRDLADFRIQHPDLILLQYVDDLLLAATSELDCQQGTRALLQTLGNLGYRASAKKAQICQKQVKYLGYLLKEGQRWLTEARKETVMGQPTPKTPRQLREFLGTAGFCRLWIPGFAEMAAPLYPLTKPGTLFNWGPDQQKAYQEIKQALLTAPALGLPDLTKPFELFVDEKQGYAKGVLTQKLGPWRRPVAYLSKKLDPVAAGWPPCLRMVAAIAVLTKDAGKLTMGQPLVILAPHAVEALVKQPPDRWLSNARMTHYQALLLDTDRVQFGPVVALNPATLLPLPEEGLQHNCLDILAEAHGTRPDLTDQPLPDADHTWYTDGSSLLQEGQRKAGAAVTTETEVIWAKALPAGTSAQRAELIALTQALKMAEGKKLNVYTDSRYAFATAHIHGEIYRRRGWLTSEGKEIKNKDEILALLKALFLPKRLSIIHCPGHQKGHSAEARGNRMADQAARKAAITETPDTSTLLAGKRTADGSEFEKRTADGSEFESPKKKAKVE

SEQ ID NO: 2999 - protein, 2096 aa, synthetic construct; identical to SEQ ID NO: 2719

SEQ ID NO: 3000 - protein, 2088 aa, synthetic construct
MPAAKRVKLDGGDKKYSIGLDIGTNSVGWAVITDEYKVPSKKFKVLGNTDRHSIKKNLIGALLFDSGETAEATRLKRTARRRYTRRKNRICYLQEIFSNEMAKVDDSFFHRLEESFLVEEDKKHERHPIFGNIVDEVAYHEKYPTIYHLRKKLVDSTDKADLRLIYLALAHMIKFRGHFLIEGDLNPDNSDVDKLFIQLVQTYNQLFEENPINASGVDAKAILSARLSKSRRLENLIAQLPGEKKNGLFGNLIALSLGLTPNFKSNFDLAEDAKLQLSKDTYDDDLDNLLAQIGDQYADLFLAAKNLSDAILLSDILRVNTEITKAPLSASMIKRYDEHHQDLTLLKALVRQQLPEKYKEIFFDQSKNGYAGYIDGGASQEEFYKFIKPILEKMDGTEELLVKLNREDLLRKQRTFDNGSIPHQIHLGELHAILRRQEDFYPFLKDNREKIEKILTFRIPYYVGPLARGNSRFAWMTRKSEETITPWNFEEVVDKGASAQSFIERMTNFDKNLPNEKVLPKHSLLYEYFTVYNELTKVKYVTEGMRKPAFLSGEQKKAIVDLLFKTNRKVTVKQLKEDYFKKIECFDSVEISGVEDRFNASLGTYHDLLKIIKDKDFLDNEENEDILEDIVLTLTLFEDREMIEERLKTYAHLFDDKVMKQLKRRRYTGWGRLSRKLINGIRDKQSGKTILDFLKSDGFANRNFMQLIHDDSLTFKEDIQKAQVSGQGDSLHEHIANLAGSPAIKKGILQTVKVVDELVKVMGRHKPENIVIEMARENQTTQKGQKNSRERMKRIEEGIKELGSQILKEHPVENTQLQNEKLYLYYLQNGRDMYVDQELDINRLSDYDVDHIVPQSFLKDDSIDNKVLTRSDKARGKSDNVPSEEVVKKMKNYWRQLLNAKLITQRKFDNLTKAERGGLSELDKAGFIKRQLVETRQITKHVAQILDSRMNTKYDENDKLIREVKVITLKSKLVSDFRKDFQFYKVREINNYHHAHDAYLNAVVGTALIKKYPKLESEFVYGDYKVYDVRKMIAKSEQEIGKATAKYFFYSNIMNFFKTEITLANGEIRKRPLIETNGETGEIVWDKGRDFATVRKVLSMPQVNIVKKTEVQTGGFSKESILPKRNSDKLIARKKDWDPKKYGGFDSPTVAYSVLVVAKVEKGKSKKLKSVKELLGITIMERSSFEKNPIDFLEAKGYKEVKKDLIIKLPKYSLFELENGRKRMLASAGELQKGNELALPSKYVNFLYLASHYEKLKGSPEDNEQKQLFVEQHKHYLDEIIEQISEFSKRVILADANLDKVLSAYNKHRDKPIREQAENIIHLFTLTNLGAPAAFKYFDTTIDRKRYTSTKEVLDATLIHQSITGLYETRIDLSQLGGDGGGGSGGTLNIEDEHRLHETSKEPDVSLGSTWLSDFPQAWAETGGMGLAVRQAPLIIPLKATSTPVSIKQYPMSQEARLGIKPHIQRLLDQGILVPCQSPWNTPLLPVKKPGTNDYRPVQDLREVNKRVEDIHPTVPNPYNLLSGLPPSHQWYTVLDLKDAFFCLRLHPTSQPLFAFEWRDPEMGISGQLTWTRLPQGFKNSPTLFNEALHRDLADFRIQHPDLILLQYVDDLLLAATSELDCQQGTRALLQTLGNLGYRASAKKAQICQKQVKYLGYLLKEGQRWLTEARKETVMGQPTPKTPRQLREFLGTAGFCRLWIPGFAEMAAPLYPLTKPGTLFNWGPDQQKAYQEIKQALLTAPALGLPDLTKPFELFVDEKQGYAKGVLTQKLGPWRRPVAYLSKKLDPVAAGWPPCLRMVAAIAVLTKDAGKLTMGQPLVILAPHAVEALVKQPPDRWLSNARMTHYQALLLDTDRVQFGPVVALNPATLLPLPEEGLQHNCLDILAEAHGTRPDLTDQPLPDADHTWYTDGSSLLQEGQRKAGAAVTTETEVIWAKALPAGTSAQRAELIALTQALKMAEGKKLNVYTDSRYAFATAHIHGEIYRRRGWLTSEGKEIKNKDEILALLKALFLPKRLSIIHCPGHQKGHSAEARGNRMADQAARKAAITETPDTSTLLAGKRTADGSEFEKRTADGSEFESPKKKAKVE

SEQ ID NO: 3001 - protein, 2100 aa, synthetic construct; identical to SEQ ID NO: 2725

SEQ ID NO: 3002 - protein, 2093 aa, synthetic construct; identical to SEQ ID NO: 2740

SEQ ID NO: 3003 - protein, 2094 aa, synthetic construct; identical to SEQ ID NO: 2752

SEQ ID NO: 3004 - protein, 2097 aa, synthetic construct; identical to SEQ ID NO: 2763

SEQ ID NO: 3005 - protein, 2096 aa, synthetic construct
MPAAKRVKLDGGDKKYSIGLDIGTNSVGWAVITDEYKVPSKKFKVLGNTDRHSIKKNLIGALLFDSGETAEATRLKRTARRRYTRRKNRICYLQEIFSNEMAKVDDSFFHRLEESFLVEEDKKHERHPIFGNIVDEVAYHEKYPTIYHLRKKLVDSTDKADLRLIYLALAHMIKFRGHFLIEGDLNPDNSDVDKLFIQLVQTYNQLFEENPINASGVDAKAILSARLSKSRRLENLIAQLPGEKKNGLFGNLIALSLGLTPNFKSNFDLAEDAKLQLSKDTYDDDLDNLLAQIGDQYADLFLAAKNLSDAILLSDILRVNTEITKAPLSASMIKRYDEHHQDLTLLKALVRQQLPEKYKEIFFDQSKNGYAGYIDGGASQEEFYKFIKPILEKMDGTEELLVKLNREDLLRKQRTFDNGSIPHQIHLGELHAILRRQEDFYPFLKDNREKIEKILTFRIPYYVGPLARGNSRFAWMTRKSEETITPWNFEEVVDKGASAQSFIERMTNFDKNLPNEKVLPKHSLLYEYFTVYNELTKVKYVTEGMRKPAFLSGEQKKAIVDLLFKTNRKVTVKQLKEDYFKKIECFDSVEISGVEDRFNASLGTYHDLLKIIKDKDFLDNEENEDILEDIVLTLTLFEDREMIEERLKTYAHLFDDKVMKQLKRRRYTGWGRLSRKLINGIRDKQSGKTILDFLKSDGFANRNFMQLIHDDSLTFKEDIQKAQVSGQGDSLHEHIANLAGSPAIKKGILQTVKVVDELVKVMGRHKPENIVIEMARENQTTQKGQKNSRERMKRIEEGIKELGSQILKEHPVENTQLQNEKLYLYYLQNGRDMYVDQELDINRLSDYDVDHIVPQSFLKDDSIDNKVLTRSDKARGKSDNVPSEEVVKKMKNYWRQLLNAKLITQRKFDNLTKAERGGLSELDKAGFIKRQLVETRQITKHVAQILDSRMNTKYDENDKLIREVKVITLKSKLVSDFRKDFQFYKVREINNYHHAHDAYLNAVVGTALIKKYPKLESEFVYGDYKVYDVRKMIAKSEQEIGKATAKYFFYSNIMNFFKTEITLANGEIRKRPLIETNGETGEIVWDKGRDFATVRKVLSMPQVNIVKKTEVQTGGFSKESILPKRNSDKLIARKKDWDPKKYGGFDSPTVAYSVLVVAKVEKGKSKKLKSVKELLGITIMERSSFEKNPIDFLEAKGYKEVKKDLIIKLPKYSLFELENGRKRMLASAGELQKGNELALPSKYVNFLYLASHYEKLKGSPEDNEQKQLFVEQHKHYLDEIIEQISEFSKRVILADANLDKVLSAYNKHRDKPIREQAENIIHLFTLTNLGAPAAFKYFDTTIDRKRYTSTKEVLDATLIHQSITGLYETRIDLSQLGGDGGEAAAKPAPGSSGGTLNIEDEHRLHETSKEPDVSLGSTWLSDFPQAWAETGGMGLAVRQAPLIIPLKATSTPVSIKQYPMSQEARLGIKPHIQRLLDQGILVPCQSPWNTPLLPVKKPGTNDYRPVQDLREVNKRVEDIHPTVPNPYNLLSGLPPSHQWYTVLDLKDAFFCLRLHPTSQPLFAFEWRDPEMGISGQLTWTRLPQGFKNSPTLFNEALHRDLADFRIQHPDLILLQYVDDLLLAATSELDCQQGTRALLQTLGNLGYRASAKKAQICQKQVKYLGYLLKEGQRWLTEARKETVMGQPTPKTPRQLREFLGTAGFCRLWIPGFAEMAAPLYPLTKPGTLFNWGPDQQKAYQEIKQALLTAPALGLPDLTKPFELFVDEKQGYAKGVLTQKLGPWRRPVAYLSKKLDPVAAGWPPCLRMVAAIAVLTKDAGKLTMGQPLVILAPHAVEALVKQPPDRWLSNARMTHYQALLLDTDRVQFGPVVALNPATLLPLPEEGLQHNCLDILAEAHGTRPDLTDQPLPDADHTWYTDGSSLLQEGQRKAGAAVTTETEVIWAKALPAGTSAQRAELIALTQALKMAEGKKLNVYTDSRYAFATAHIHGEIYRRRGWLTSEGKEIKNKDEILALLKALFLPKRLSIIHCPGHQKGHSAEARGNRMADQAARKAAITETPDTSTLLAGKRTADGSEFEKRTADGSEFESPKKKAKVE

SEQ ID NO: 3006 - protein, 2089 aa, synthetic construct
MPAAKRVKLDGGDKKYSIGLDIGTNSVGWAVITDEYKVPSKKFKVLGNTDRHSIKKNLIGALLFDSGETAEATRLKRTARRRYTRRKNRICYLQEIFSNEMAKVDDSFFHRLEESFLVEEDKKHERHPIFGNIVDEVAYHEKYPTIYHLRKKLVDSTDKADLRLIYLALAHMIKFRGHFLIEGDLNPDNSDVDKLFIQLVQTYNQLFEENPINASGVDAKAILSARLSKSRRLENLIAQLPGEKKNGLFGNLIALSLGLTPNFKSNFDLAEDAKLQLSKDTYDDDLDNLLAQIGDQYADLFLAAKNLSDAILLSDILRVNTEITKAPLSASMIKRYDEHHQDLTLLKALVRQQLPEKYKEIFFDQSKNGYAGYIDGGASQEEFYKFIKPILEKMDGTEELLVKLNREDLLRKQRTFDNGSIPHQIHLGELHAILRRQEDFYPFLKDNREKIEKILTFRIPYYVGPLARGNSRFAWMTRKSEETITPWNFEEVVDKGASAQSFIERMTNFDKNLPNEKVLPKHSLLYEYFTVYNELTKVKYVTEGMRKPAFLSGEQKKAIVDLLFKTNRKVTVKQLKEDYFKKIECFDSVEISGVEDRFNASLGTYHDLLKIIKDKDFLDNEENEDILEDIVLTLTLFEDREMIEERLKTYAHLFDDKVMKQLKRRRYTGWGRLSRKLINGIRDKQSGKTILDFLKSDGFANRNFMQLIHDDSLTFKEDIQKAQVSGQGDSLHEHIANLAGSPAIKKGILQTVKVVDELVKVMGRHKPENIVIEMARENQTTQKGQKNSRERMKRIEEGIKELGSQILKEHPVENTQLQNEKLYLYYLQNGRDMYVDQELDINRLSDYDVDHIVPQSFLKDDSIDNKVLTRSDKARGKSDNVPSEEVVKKMKNYWRQLLNAKLITQRKFDNLTKAERGGLSELDKAGFIKRQLVETRQITKHVAQILDSRMNTKYDENDKLIREVKVITLKSKLVSDFRKDFQFYKVREINNYHHAHDAYLNAVVGTALIKKYPKLESEFVYGDYKVYDVRKMIAKSEQEIGKATAKYFFYSNIMNFFKTEITLANGEIRKRPLIETNGETGEIVWDKGRDFATVRKVLSMPQVNIVKKTEVQTGGFSKESILPKRNSDKLIARKKDWDPKKYGGFDSPTVAYSVLVVAKVEKGKSKKLKSVKELLGITIMERSSFEKNPIDFLEAKGYKEVKKDLIIKLPKYSLFELENGRKRMLASAGELQKGNELALPSKYVNFLYLASHYEKLKGSPEDNEQKQLFVEQHKHYLDEIIEQISEFSKRVILADANLDKVLSAYNKHRDKPIREQAENIIHLFTLTNLGAPAAFKYFDTTIDRKRYTSTKEVLDATLIHQSITGLYETRIDLSQLGGDGGGGGGGGTLNIEDEHRLHETSKEPDVSLGSTWLSDFPQAWAETGGMGLAVRQAPLIIPLKATSTPVSIKQYPMSQEARLGIKPHIQRLLDQGILVPCQSPWNTPLLPVKKPGTNDYRPVQDLREVNKRVEDIHPTVPNPYNLLSGLPPSHQWYTVLDLKDAFFCLRLHPTSQPLFAFEWRDPEMGISGQLTWTRLPQGFKNSPTLFNEALHRDLADFRIQHPDLILLQYVDDLLLAATSELDCQQGTRALLQTLGNLGYRASAKKAQICQKQVKYLGYLLKEGQRWLTEARKETVMGQPTPKTPRQLREFLGTAGFCRLWIPGFAEMAAPLYPLTKPGTLFNWGPDQQKAYQEIKQALLTAPALGLPDLTKPFELFVDEKQGYAKGVLTQKLGPWRRPVAYLSKKLDPVAAGWPPCLRMVAAIAVLTKDAGKLTMGQPLVILAPHAVEALVKQPPDRWLSNARMTHYQALLLDTDRVQFGPVVALNPATLLPLPEEGLQHNCLDILAEAHGTRPDLTDQPLPDADHTWYTDGSSLLQEGQRKAGAAVTTETEVIWAKALPAGTSAQRAELIALTQALKMAEGKKLNVYTDSRYAFATAHIHGEIYRRRGWLTSEGKEIKNKDEILALLKALFLPKRLSIIHCPGHQKGHSAEARGNRMADQAARKAAITETPDTSTLLAGKRTADGSEFEKRTADGSEFESPKKKAKVE

SEQ ID NO: 3007 - protein, 2096 aa, synthetic construct; identical to SEQ ID NO: 2748

SEQ ID NO: 3008 - protein, 2090 aa, synthetic construct; identical to SEQ ID NO: 2730

SEQ ID NO: 3009 - protein, 2096 aa, synthetic construct
MPAAKRVKLDGGDKKYSIGLDIGTNSVGWAVITDEYKVPSKKFKVLGNTDRHSIKKNLIGALLFDSGETAEATRLKRTARRRYTRRKNRICYLQEIFSNEMAKVDDSFFHRLEESFLVEEDKKHERHPIFGNIVDEVAYHEKYPTIYHLRKKLVDSTDKADLRLIYLALAHMIKFRGHFLIEGDLNPDNSDVDKLFIQLVQTYNQLFEENPINASGVDAKAILSARLSKSRRLENLIAQLPGEKKNGLFGNLIALSLGLTPNFKSNFDLAEDAKLQLSKDTYDDDLDNLLAQIGDQYADLFLAAKNLSDAILLSDILRVNTEITKAPLSASMIKRYDEHHQDLTLLKALVRQQLPEKYKEIFFDQSKNGYAGYIDGGASQEEFYKFIKPILEKMDGTEELLVKLNREDLLRKQRTFDNGSIPHQIHLGELHAILRRQEDFYPFLKDNREKIEKILTFRIPYYVGPLARGNSRFAWMTRKSEETITPWNFEEVVDKGASAQSFIERMTNFDKNLPNEKVLPKHSLLYEYFTVYNELTKVKYVTEGMRKPAFLSGEQKKAIVDLLFKTNRKVTVKQLKEDYFKKIECFDSVEISGVEDRFNASLGTYHDLLKIIKDKDFLDNEENEDILEDIVLTLTLFEDREMIEERLKTYAHLFDDKVMKQLKRRRYTGWGRLSRKLINGIRDKQSGKTILDFLKSDGFANRNFMQLIHDDSLTFKEDIQKAQVSGQGDSLHEHIANLAGSPAIKKGILQTVKVVDELVKVMGRHKPENIVIEMARENQTTQKGQKNSRERMKRIEEGIKELGSQILKEHPVENTQLQNEKLYLYYLQNGRDMYVDQELDINRLSDYDVDHIVPQSFLKDDSIDNKVLTRSDKARGKSDNVPSEEVVKKMKNYWRQLLNAKLITQRKFDNLTKAERGGLSELDKAGFIKRQLVETRQITKHVAQILDSRMNTKYDENDKLIREVKVITLKSKLVSDFRKDFQFYKVREINNYHHAHDAYLNAVVGTALIKKYPKLESEFVYGDYKVYDVRKMIAKSEQEIGKATAKYFFYSNIMNFFKTEITLANGEIRKRPLIETNGETGEIVWDKGRDFATVRKVLSMPQVNIVKKTEVQTGGFSKESILPKRNSDKLIARKKDWDPKKYGGFDSPTVAYSVLVVAKVEKGKSKKLKSVKELLGITIMERSSFEKNPIDFLEAKGYKEVKKDLIIKLPKYSLFELENGRKRMLASAGELQKGNELALPSKYVNFLYLASHYEKLKGSPEDNEQKQLFVEQHKHYLDEIIEQISEFSKRVILADANLDKVLSAYNKHRDKPIREQAENIIHLFTLTNLGAPAAFKYFDTTIDRKRYTSTKEVLDATLIHQSITGLYETRIDLSQLGGDGGPAPEAAAKGGGGGTLNIEDEHRLHETSKEPDVSLGSTWLSDFPQAWAETGGMGLAVRQAPLIIPLKATSTPVSIKQYPMSQEARLGIKPHIQRLLDQGILVPCQSPWNTPLLPVKKPGTNDYRPVQDLREVNKRVEDIHPTVPNPYNLLSGLPPSHQWYTVLDLKDAFFCLRLHPTSQPLFAFEWRDPEMGISGQLTWTRLPQGFKNSPTLFNEALHRDLADFRIQHPDLILLQYVDDLLLAATSELDCQQGTRALLQTLGNLGYRASAKKAQICQKQVKYLGYLLKEGQRWLTEARKETVMGQPTPKTPRQLREFLGTAGFCRLWIPGFAEMAAPLYPLTKPGTLFNWGPDQQKAYQEIKQALLTAPALGLPDLTKPFELFVDEKQGYAKGVLTQKLGPWRRPVAYLSKKLDPVAAGWPPCLRMVAAIAVLTKDAGKLTMGQPLVILAPHAVEALVKQPPDRWLSNARMTHYQALLLDTDRVQFGPVVALNPATLLPLPEEGLQHNCLDILAEAHGTRPDLTDQPLPDADHTWYTDGSSLLQEGQRKAGAAVTTETEVIWAKALPAGTSAQRAELIALTQALKMAEGKKLNVYTDSRYAFATAHIHGEIYRRRGWLTSEGKEIKNKDEILALLKALFLPKRLSIIHCPGHQKGHSAEARGNRMADQAARKAAITETPDTSTLLAGKRTADGSEFEKRTADGSEFESPKKKAKVE

SEQ ID NO: 3010 - protein, 2101 aa, synthetic construct
MPAAKRVKLDGGDKKYSIGLDIGTNSVGWAVITDEYKVPSKKFKVLGNTDRHSIKKNLIGALLFDSGETAEATRLKRTARRRYTRRKNRICYLQEIFSNEMAKVDDSFFHRLEESFLVEEDKKHERHPIFGNIVDEVAYHEKYPTIYHLRKKLVDSTDKADLRLIYLALAHMIKFRGHFLIEGDLNPDNSDVDKLFIQLVQTYNQLFEENPINASGVDAKAILSARLSKSRRLENLIAQLPGEKKNGLFGNLIALSLGLTPNFKSNFDLAEDAKLQLSKDTYDDDLDNLLAQIGDQYADLFLAAKNLSDAILLSDILRVNTEITKAPLSASMIKRYDEHHQDLTLLKALVRQQLPEKYKEIFFDQSKNGYAGYIDGGASQEEFYKFIKPILEKMDGTEELLVKLNREDLLRKQRTFDNGSIPHQIHLGELHAILRRQEDFYPFLKDNREKIEKILTFRIPYYVGPLARGNSRFAWMTRKSEETITPWNFEEVVDKGASAQSFIERMTNFDKNLPNEKVLPKHSLLYEYFTVYNELTKVKYVTEGMRKPAFLSGEQKKAIVDLLFKTNRKVTVKQLKEDYFKKIECFDSVEISGVEDRFNASLGTYHDLLKIIKDKDFLDNEENEDILEDIVLTLTLFEDREMIEERLKTYAHLFDDKVMKQLKRRRYTGWGRLSRKLINGIRDKQSGKTILDFLKSDGFANRNFMQLIHDDSLTFKEDIQKAQVSGQGDSLHEHIANLAGSPAIKKGILQTVKVVDELVKVMGRHKPENIVIEMARENQTTQKGQKNSRERMKRIEEGIKELGSQILKEHPVENTQLQNEKLYLYYLQNGRDMYVDQELDINRLSDYDVDHIVPQSFLKDDSIDNKVLTRSDKARGKSDNVPSEEVVKKMKNYWRQLLNAKLITQRKFDNLTKAERGGLSELDKAGFIKRQLVETRQITKHVAQILDSRMNTKYDENDKLIREVKVITLKSKLVSDFRKDFQFYKVREINNYHHAHDAYLNAVVGTALIKKYPKLESEFVYGDYKVYDVRKMIAKSEQEIGKATAKYFFYSNIMNFFKTEITLANGEIRKRPLIETNGETGEIVWDKGRDFATVRKVLSMPQVNIVKKTEVQTGGFSKESILPKRNSDKLIARKKDWDPKKYGGFDSPTVAYSVLVVAKVEKGKSKKLKSVKELLGITIMERSSFEKNPIDFLEAKGYKEVKKDLIIKLPKYSLFELENGRKRMLASAGELQKGNELALPSKYVNFLYLASHYEKLKGSPEDNEQKQLFVEQHKHYLDEIIEQISEFSKRVILADANLDKVLSAYNKHRDKPIREQAENIIHLFTLTNLGAPAAFKYFDTTIDRKRYTSTKEVLDATLIHQSITGLYETRIDLSQLGGDGGSGSETPGTSESATPESGGTLNIEDEHRLHETSKEPDVSLGSTWLSDFPQAWAETGGMGLAVRQAPLIIPLKATSTPVSIKQYPMSQEARLGIKPHIQRLLDQGILVPCQSPWNTPLLPVKKPGTNDYRPVQDLREVNKRVEDIHPTVPNPYNLLSGLPPSHQWYTVLDLKDAFFCLRLHPTSQPLFAFEWRDPEMGISGQLTWTRLPQGFKNSPTLFNEALHRDLADFRIQHPDLILLQYVDDLLLAATSELDCQQGTRALLQTLGNLGYRASAKKAQICQKQVKYLGYLLKEGQRWLTEARKETVMGQPTPKTPRQLREFLGTAGFCRLWIPGFAEMAAPLYPLTKPGTLFNWGPDQQKAYQEIKQALLTAPALGLPDLTKPFELFVDEKQGYAKGVLTQKLGPWRRPVAYLSKKLDPVAAGWPPCLRMVAAIAVLTKDAGKLTMGQPLVILAPHAVEALVKQPPDRWLSNARMTHYQALLLDTDRVQFGPVVALNPATLLPLPEEGLQHNCLDILAEAHGTRPDLTDQPLPDADHTWYTDGSSLLQEGQRKAGAAVTTETEVIWAKALPAGTSAQRAELIALTQALKMAEGKKLNVYTDSRYAFATAHIHGEIYRRRGWLTSEGKEIKNKDEILALLKALFLPKRLSIIHCPGHQKGHSAEARGNRMADQAARKAAITETPDTSTLLAGKRTADGSEFEKRTADGSEFESPKKKAKVE

SEQ ID NO: 3011 - protein, 2091 aa, synthetic construct
MPAAKRVKLDGGDKKYSIGLDIGTNSVGWAVITDEYKVPSKKFKVLGNTDRHSIKKNLIGALLFDSGETAEATRLKRTARRRYTRRKNRICYLQEIFSNEMAKVDDSFFHRLEESFLVEEDKKHERHPIFGNIVDEVAYHEKYPTIYHLRKKLVDSTDKADLRLIYLALAHMIKFRGHFLIEGDLNPDNSDVDKLFIQLVQTYNQLFEENPINASGVDAKAILSARLSKSRRLENLIAQLPGEKKNGLFGNLIALSLGLTPNFKSNFDLAEDAKLQLSKDTYDDDLDNLLAQIGDQYADLFLAAKNLSDAILLSDILRVNTEITKAPLSASMIKRYDEHHQDLTLLKALVRQQLPEKYKEIFFDQSKNGYAGYIDGGASQEEFYKFIKPILEKMDGTEELLVKLNREDLLRKQRTFDNGSIPHQIHLGELHAILRRQEDFYPFLKDNREKIEKILTFRIPYYVGPLARGNSRFAWMTRKSEETITPWNFEEVVDKGASAQSFIERMTNFDKNLPNEKVLPKHSLLYEYFTVYNELTKVKYVTEGMRKPAFLSGEQKKAIVDLLFKTNRKVTVKQLKEDYFKKIECFDSVEISGVEDRFNASLGTYHDLLKIIKDKDFLDNEENEDILEDIVLTLTLFEDREMIEERLKTYAHLFDDKVMKQLKRRRYTGWGRLSRKLINGIRDKQSGKTILDFLKSDGFANRNFMQLIHDDSLTFKEDIQKAQVSGQGDSLHEHIANLAGSPAIKKGILQTVKVVDELVKVMGRHKPENIVIEMARENQTTQKGQKNSRERMKRIEEGIKELGSQILKEHPVENTQLQNEKLYLYYLQNGRDMYVDQELDINRLSDYDVDHIVPQSFLKDDSIDNKVLTRSDKARGKSDNVPSEEVVKKMKNYWRQLLNAKLITQRKFDNLTKAERGGLSELDKAGFIKRQLVETRQITKHVAQILDSRMNTKYDENDKLIREVKVITLKSKLVSDFRKDFQFYKVREINNYHHAHDAYLNAVVGTALIKKYPKLESEFVYGDYKVYDVRKMIAKSEQEIGKATAKYFFYSNIMNFFKTEITLANGEIRKRPLIETNGETGEIVWDKGRDFATVRKVLSMPQVNIVKKTEVQTGGFSKESILPKRNSDKLIARKKDWDPKKYGGFDSPTVAYSVLVVAKVEKGKSKKLKSVKELLGITIMERSSFEKNPIDFLEAKGYKEVKKDLIIKLPKYSLFELENGRKRMLASAGELQKGNELALPSKYVNFLYLASHYEKLKGSPEDNEQKQLFVEQHKHYLDEIIEQISEFSKRVILADANLDKVLSAYNKHRDKPIREQAENIIHLFTLTNLGAPAAFKYFDTTIDRKRYTSTKEVLDATLIHQSITGLYETRIDLSQLGGDGGGGSGSSGGTLNIEDEHRLHETSKEPDVSLGSTWLSDFPQAWAETGGMGLAVRQAPLIIPLKATSTPVSIKQYPMSQEARLGIKPHIQRLLDQGILVPCQSPWNTPLLPVKKPGTNDYRPVQDLREVNKRVEDIHPTVPNPYNLLSGLPPSHQWYTVLDLKDAFFCLRLHPTSQPLFAFEWRDPEMGISGQLTWTRLPQGFKNSPTLFNEALHRDLADFRIQHPDLILLQYVDDLLLAATSELDCQQGTRALLQTLGNLGYRASAKKAQICQKQVKYLGYLLKEGQRWLTEARKETVMGQPTPKTPRQLREFLGTAGFCRLWIPGFAEMAAPLYPLTKPGTLFNWGPDQQKAYQEIKQALLTAPALGLPDLTKPFELFVDEKQGYAKGVLTQKLGPWRRPVAYLSKKLDPVAAGWPPCLRMVAAIAVLTKDAGKLTMGQPLVILAPHAVEALVKQPPDRWLSNARMTHYQALLLDTDRVQFGPVVALNPATLLPLPEEGLQHNCLDILAEAHGTRPDLTDQPLPDADHTWYTDGSSLLQEGQRKAGAAVTTETEVIWAKALPAGTSAQRAELIALTQALKMAEGKKLNVYTDSRYAFATAHIHGEIYRRRGWLTSEGKEIKNKDEILALLKALFLPKRLSIIHCPGHQKGHSAEARGNRMADQAARKAAITETPDTSTLLAGKRTADGSEFEKRTADGSEFESPKKKAKVE

SEQ ID NO: 3012 - protein, 2096 aa, synthetic construct; identical to SEQ ID NO: 2758

SEQ ID NO: 3013 - protein, 2094 aa, synthetic construct
MPAAKRVKLDGGDKKYSIGLDIGTNSVGWAVITDEYKVPSKKFKVLGNTDRHSIKKNLIGALLFDSGETAEATRLKRTARRRYTRRKNRICYLQEIFSNEMAKVDDSFFHRLEESFLVEEDKKHERHPIFGNIVDEVAYHEKYPTIYHLRKKLVDSTDKADLRLIYLALAHMIKFRGHFLIEGDLNPDNSDVDKLFIQLVQTYNQLFEENPINASGVDAKAILSARLSKSRRLENLIAQLPGEKKNGLFGNLIALSLGLTPNFKSNFDLAEDAKLQLSKDTYDDDLDNLLAQIGDQYADLFLAAKNLSDAILLSDILRVNTEITKAPLSASMIKRYDEHHQDLTLLKALVRQQLPEKYKEIFFDQSKNGYAGYIDGGASQEEFYKFIKPILEKMDGTEELLVKLNREDLLRKQRTFDNGSIPHQIHLGELHAILRRQEDFYPFLKDNREKIEKILTFRIPYYVGPLARGNSRFAWMTRKSEETITPWNFEEVVDKGASAQSFIERMTNFDKNLPNEKVLPKHSLLYEYFTVYNELTKVKYVTEGMRKPAFLSGEQKKAIVDLLFKTNRKVTVKQLKEDYFKKIECFDSVEISGVEDRFNASLGTYHDLLKIIKDKDFLDNEENEDILEDIVLTLTLFEDREMIEERLKTYAHLFDDKVMKQLKRRRYTGWGRLSRKLINGIRDKQSGKTILDFLKSDGFANRNFMQLIHDDSLTFKEDIQKAQVSGQGDSLHEHIANLAGSPAIKKGILQTVKVVDELVKVMGRHKPENIVIEMARENQTTQKGQKNSRERMKRIEEGIKELGSQILKEHPVENTQLQNEKLYLYYLQNGRDMYVDQELDINRLSDYDVDHIVPQSFLKDDSIDNKVLTRSDKARGKSDNVPSEEVVKKMKNYWRQLLNAKLITQRKFDNLTKAERGGLSELDKAGFIKRQLVETRQITKHVAQILDSRMNTKYDENDKLIREVKVITLKSKLVSDFRKDFQFYKVREINNYHHAHDAYLNAVVGTALIKKYPKLESEFVYGDYKVYDVRKMIAKSEQEIGKATAKYFFYSNIMNFFKTEITLANGEIRKRPLIETNGETGEIVWDKGRDFATVRKVLSMPQVNIVKKTEVQTGGFSKESILPKRNSDKLIARKKDWDPKKYGGFDSPTVAYSVLVVAKVEKGKSKKLKSVKELLGITIMERSSFEKNPIDFLEAKGYKEVKKDLIIKLPKYSLFELENGRKRMLASAGELQKGNELALPSKYVNFLYLASHYEKLKGSPEDNEQKQLFVEQHKHYLDEIIEQISEFSKRVILADANLDKVLSAYNKHRDKPIREQAENIIHLFTLTNLGAPAAFKYFDTTIDRKRYTSTKEVLDATLIHQSITGLYETRIDLSQLGGDGGPAPGGSGGGGGTLNIEDEHRLHETSKEPDVSLGSTWLSDFPQAWAETGGMGLAVRQAPLIIPLKATSTPVSIKQYPMSQEARLGIKPHIQRLLDQGILVPCQSPWNTPLLPVKKPGTNDYRPVQDLREVNKRVEDIHPTVPNPYNLLSGLPPSHQWYTVLDLKDAFFCLRLHPTSQPLFAFEWRDPEMGISGQLTWTRLPQGFKNSPTLFNEALHRDLADFRIQHPDLILLQYVDDLLLAATSELDCQQGTRALLQTLGNLGYRASAKKAQICQKQVKYLGYLLKEGQRWLTEARKETVMGQPTPKTPRQLREFLGTAGFCRLWIPGFAEMAAPLYPLTKPGTLFNWGPDQQKAYQEIKQALLTAPALGLPDLTKPFELFVDEKQGYAKGVLTQKLGPWRRPVAYLSKKLDPVAAGWPPCLRMVAAIAVLTKDAGKLTMGQPLVILAPHAVEALVKQPPDRWLSNARMTHYQALLLDTDRVQFGPVVALNPATLLPLPEEGLQHNCLDILAEAHGTRPDLTDQPLPDADHTWYTDGSSLLQEGQRKAGAAVTTETEVIWAKALPAGTSAQRAELIALTQALKMAEGKKLNVYTDSRYAFATAHIHGEIYRRRGWLTSEGKEIKNKDEILALLKALFLPKRLSIIHCPGHQKGHSAEARGNRMADQAARKAAITETPDTSTLLAGKRTADGSEFEKRTADGSEFESPKKKAKVE

SEQ ID NO: 3014 - protein, 2096 aa, synthetic construct; identical to SEQ ID NO: 2714

SEQ ID NO: 3015 - protein, 2093 aa, synthetic construct; identical to SEQ ID NO: 2718

SEQ ID NO: 3016 - protein, 2094 aa, synthetic construct; identical to SEQ ID NO: 2762

SEQ ID NO: 3017 - protein, 2095 aa, synthetic construct; identical to SEQ ID NO: 2749

SEQ ID NO: 3018 - protein, 2096 aa, synthetic construct; identical to SEQ ID NO: 2721

SEQ ID NO: 3019 - protein, 2096 aa, synthetic construct; identical to SEQ ID NO: 2747

SEQ ID NO: 3020 - protein, 2096 aa, synthetic construct; identical to SEQ ID NO: 2755

SEQ ID NO: 3021 - protein, 2096 aa, synthetic construct
MPAAKRVKLDGGDKKYSIGLDIGTNSVGWAVITDEYKVPSKKFKVLGNTDRHSIKKNLIGALLFDSGETAEATRLKRTARRRYTRRKNRICYLQEIFSNEMAKVDDSFFHRLEESFLVEEDKKHERHPIFGNIVDEVAYHEKYPTIYHLRKKLVDSTDKADLRLIYLALAHMIKFRGHFLIEGDLNPDNSDVDKLFIQLVQTYNQLFEENPINASGVDAKAILSARLSKSRRLENLIAQLPGEKKNGLFGNLIALSLGLTPNFKSNFDLAEDAKLQLSKDTYDDDLDNLLAQIGDQYADLFLAAKNLSDAILLSDILRVNTEITKAPLSASMIKRYDEHHQDLTLLKALVRQQLPEKYKEIFFDQSKNGYAGYIDGGASQEEFYKFIKPILEKMDGTEELLVKLNREDLLRKQRTFDNGSIPHQIHLGELHAILRRQEDFYPFLKDNREKIEKILTFRIPYYVGPLARGNSRFAWMTRKSEETITPWNFEEVVDKGASAQSFIERMTNFDKNLPNEKVLPKHSLLYEYFTVYNELTKVKYVTEGMRKPAFLSGEQKKAIVDLLFKTNRKVTVKQLKEDYFKKIECFDSVEISGVEDRFNASLGTYHDLLKIIKDKDFLDNEENEDILEDIVLTLTLFEDREMIEERLKTYAHLFDDKVMKQLKRRRYTGWGRLSRKLINGIRDKQSGKTILDFLKSDGFANRNFMQLIHDDSLTFKEDIQKAQVSGQGDSLHEHIANLAGSPAIKKGILQTVKVVDELVKVMGRHKPENIVIEMARENQTTQKGQKNSRERMKRIEEGIKELGSQILKEHPVENTQLQNEKLYLYYLQNGRDMYVDQELDINRLSDYDVDHIVPQSFLKDDSIDNKVLTRSDKARGKSDNVPSEEVVKKMKNYWRQLLNAKLITQRKFDNLTKAERGGLSELDKAGFIKRQLVETRQITKHVAQILDSRMNTKYDENDKLIREVKVITLKSKLVSDFRKDFQFYKVREINNYHHAHDAYLNAVVGTALIKKYPKLESEFVYGDYKVYDVRKMIAKSEQEIGKATAKYFFYSNIMNFFKTEITLANGEIRKRPLIETNGETGEIVWDKGRDFATVRKVLSMPQVNIVKKTEVQTGGFSKESILPKRNSDKLIARKKDWDPKKYGGFDSPTVAYSVLVVAKVEKGKSKKLKSVKELLGITIMERSSFEKNPIDFLEAKGYKEVKKDLIIKLPKYSLFELENGRKRMLASAGELQKGNELALPSKYVNFLYLASHYEKLKGSPEDNEQKQLFVEQHKHYLDEIIEQISEFSKRVILADANLDKVLSAYNKHRDKPIREQAENIIHLFTLTNLGAPAAFKYFDTTIDRKRYTSTKEVLDATLIHQSITGLYETRIDLSQLGGDGGEAAAKGSSGGSGGTLNIEDEHRLHETSKEPDVSLGSTWLSDFPQAWAETGGMGLAVRQAPLIIPLKATSTPVSIKQYPMSQEARLGIKPHIQRLLDQGILVPCQSPWNTPLLPVKKPGTNDYRPVQDLREVNKRVEDIHPTVPNPYNLLSGLPPSHQWYTVLDLKDAFFCLRLHPTSQPLFAFEWRDPEMGISGQLTWTRLPQGFKNSPTLFNEALHRDLADFRIQHPDLILLQYVDDLLLAATSELDCQQGTRALLQTLGNLGYRASAKKAQICQKQVKYLGYLLKEGQRWLTEARKETVMGQPTPKTPRQLREFLGTAGFCRLWIPGFAEMAAPLYPLTKPGTLFNWGPDQQKAYQEIKQALLTAPALGLPDLTKPFELFVDEKQGYAKGVLTQKLGPWRRPVAYLSKKLDPVAAGWPPCLRMVAAIAVLTKDAGKLTMGQPLVILAPHAVEALVKQPPDRWLSNARMTHYQALLLDTDRVQFGPVVALNPATLLPLPEEGLQHNCLDILAEAHGTRPDLTDQPLPDADHTWYTDGSSLLQEGQRKAGAAVTTETEVIWAKALPAGTSAQRAELIALTQALKMAEGKKLNVYTDSRYAFATAHIHGEIYRRRGWLTSEGKEIKNKDEILALLKALFLPKRLSIIHCPGHQKGHSAEARGNRMADQAARKAAITETPDTSTLLAGKRTADGSEFEKRTADGSEFESPKKKAKVE

SEQ ID NO: 3022 - protein, 2094 aa, synthetic construct
MPAAKRVKLDGGDKKYSIGLDIGTNSVGWAVITDEYKVPSKKFKVLGNTDRHSIKKNLIGALLFDSGETAEATRLKRTARRRYTRRKNRICYLQEIFSNEMAKVDDSFFHRLEESFLVEEDKKHERHPIFGNIVDEVAYHEKYPTIYHLRKKLVDSTDKADLRLIYLALAHMIKFRGHFLIEGDLNPDNSDVDKLFIQLVQTYNQLFEENPINASGVDAKAILSARLSKSRRLENLIAQLPGEKKNGLFGNLIALSLGLTPNFKSNFDLAEDAKLQLSKDTYDDDLDNLLAQIGDQYADLFLAAKNLSDAILLSDILRVNTEITKAPLSASMIKRYDEHHQDLTLLKALVRQQLPEKYKEIFFDQSKNGYAGYIDGGASQEEFYKFIKPILEKMDGTEELLVKLNREDLLRKQRTFDNGSIPHQIHLGELHAILRRQEDFYPFLKDNREKIEKILTFRIPYYVGPLARGNSRFAWMTRKSEETITPWNFEEVVDKGASAQSFIERMTNFDKNLPNEKVLPKHSLLYEYFTVYNELTKVKYVTEGMRKPAFLSGEQKKAIVDLLFKTNRKVTVKQLKEDYFKKIECFDSVEISGVEDRFNASLGTYHDLLKIIKDKDFLDNEENEDILEDIVLTLTLFEDREMIEERLKTYAHLFDDKVMKQLKRRRYTGWGRLSRKLINGIRDKQSGKTILDFLKSDGFANRNFMQLIHDDSLTFKEDIQKAQVSGQGDSLHEHIANLAGSPAIKKGILQTVKVVDELVKVMGRHKPENIVIEMARENQTTQKGQKNSRERMKRIEEGIKELGSQILKEHPVENTQLQNEKLYLYYLQNGRDMYVDQELDINRLSDYDVDHIVPQSFLKDDSIDNKVLTRSDKARGKSDNVPSEEVVKKMKNYWRQLLNAKLITQRKFDNLTKAERGGLSELDKAGFIKRQLVETRQITKHVAQILDSRMNTKYDENDKLIREVKVITLKSKLVSDFRKDFQFYKVREINNYHHAHDAYLNAVVGTALIKKYPKLESEFVYGDYKVYDVRKMIAKSEQEIGKATAKYFFYSNIMNFFKTEITLANGEIRKRPLIETNGETGEIVWDKGRDFATVRKVLSMPQVNIVKKTEVQTGGFSKESILPKRNSDKLIARKKDWDPKKYGGFDSPTVAYSVLVVAKVEKGKSKKLKSVKELLGITIMERSSFEKNPIDFLEAKGYKEVKKDLIIKLPKYSLFELENGRKRMLASAGELQKGNELALPSKYVNFLYLASHYEKLKGSPEDNEQKQLFVEQHKHYLDEIIEQISEFSKRVILADANLDKVLSAYNKHRDKPIREQAENIIHLFTLTNLGAPAAFKYFDTTIDRKRYTSTKEVLDATLIHQSITGLYETRIDLSQLGGDGGGGGGSSGGSGGTLNIEDEHRLHETSKEPDVSLGSTWLSDFPQAWAETGGMGLAVRQAPLIIPLKATSTPVSIKQYPMSQEARLGIKPHIQRLLDQGILVPCQSPWNTPLLPVKKPGTNDYRPVQDLREVNKRVEDIHPTVPNPYNLLSGLPPSHQWYTVLDLKDAFFCLRLHPTSQPLFAFEWRDPEMGISGQLTWTRLPQGFKNSPTLFNEALHRDLADFRIQHPDLILLQYVDDLLLAATSELDCQQGTRALLQTLGNLGYRASAKKAQICQKQVKYLGYLLKEGQRWLTEARKETVMGQPTPKTPRQLREFLGTAGFCRLWIPGFAEMAAPLYPLTKPGTLFNWGPDQQKAYQEIKQALLTAPALGLPDLTKPFELFVDEKQGYAKGVLTQKLGPWRRPVAYLSKKLDPVAAGWPPCLRMVAAIAVLTKDAGKLTMGQPLVILAPHAVEALVKQPPDRWLSNARMTHYQALLLDTDRVQFGPVVALNPATLLPLPEEGLQHNCLDILAEAHGTRPDLTDQPLPDADHTWYTDGSSLLQEGQRKAGAAVTTETEVIWAKALPAGTSAQRAELIALTQALKMAEGKKLNVYTDSRYAFATAHIHGEIYRRRGWLTSEGKEIKNKDEILALLKALFLPKRLSIIHCPGHQKGHSAEARGNRMADQAARKAAITETPDTSTLLAGKRTADGSEFEKRTADGSEFESPKKKAKVE

SEQ ID NO: 3023 - protein, 2096 aa, synthetic construct; identical to SEQ ID NO: 2759

SEQ ID NO: 3024 - protein, 2092 aa, synthetic construct
MPAAKRVKLDGGDKKYSIGLDIGTNSVGWAVITDEYKVPSKKFKVLGNTDRHSIKKNLIGALLFDSGETAEATRLKRTARRRYTRRKNRICYLQEIFSNEMAKVDDSFFHRLEESFLVEEDKKHERHPIFGNIVDEVAYHEKYPTIYHLRKKLVDSTDKADLRLIYLALAHMIKFRGHFLIEGDLNPDNSDVDKLFIQLVQTYNQLFEENPINASGVDAKAILSARLSKSRRLENLIAQLPGEKKNGLFGNLIALSLGLTPNFKSNFDLAEDAKLQLSKDTYDDDLDNLLAQIGDQYADLFLAAKNLSDAILLSDILRVNTEITKAPLSASMIKRYDEHHQDLTLLKALVRQQLPEKYKEIFFDQSKNGYAGYIDGGASQEEFYKFIKPILEKMDGTEELLVKLNREDLLRKQRTFDNGSIPHQIHLGELHAILRRQEDFYPFLKDNREKIEKILTFRIPYYVGPLARGNSRFAWMTRKSEETITPWNFEEVVDKGASAQSFIERMTNFDKNLPNEKVLPKHSLLYEYFTVYNELTKVKYVTEGMRKPAFLSGEQKKAIVDLLFKTNRKVTVKQLKEDYFKKIECFDSVEISGVEDRFNASLGTYHDLLKIIKDKDFLDNEENEDILEDIVLTLTLFEDREMIEERLKTYAHLFDDKVMKQLKRRRYTGWGRLSRKLINGIRDKQSGKTILDFLKSDGFANRNFMQLIHDDSLTFKEDIQKAQVSGQGDSLHEHIANLAGSPAIKKGILQTVKVVDELVKVMGRHKPENIVIEMARENQTTQKGQKNSRERMKRIEEGIKELGSQILKEHPVENTQLQNEKLYLYYLQNGRDMYVDQELDINRLSDYDVDHIVPQSFLKDDSIDNKVLTRSDKARGKSDNVPSEEVVKKMKNYWRQLLNAKLITQRKFDNLTKAERGGLSELDKAGFIKRQLVETRQITKHVAQILDSRMNTKYDENDKLIREVKVITLKSKLVSDFRKDFQFYKVREINNYHHAHDAYLNAVVGTALIKKYPKLESEFVYGDYKVYDVRKMIAKSEQEIGKATAKYFFYSNIMNFFKTEITLANGEIRKRPLIETNGETGEIVWDKGRDFATVRKVLSMPQVNIVKKTEVQTGGFSKESILPKRNSDKLIARKKDWDPKKYGGFDSPTVAYSVLVVAKVEKGKSKKLKSVKELLGITIMERSSFEKNPIDFLEAKGYKEVKKDLIIKLPKYSLFELENGRKRMLASAGELQKGNELALPSKYVNFLYLASHYEKLKGSPEDNEQKQLFVEQHKHYLDEIIEQISEFSKRVILADANLDKVLSAYNKHRDKPIREQAENIIHLFTLTNLGAPAAFKYFDTTIDRKRYTSTKEVLDATLIHQSITGLYETRIDLSQLGGDGGGGGGGGGGGTLNIEDEHRLHETSKEPDVSLGSTWLSDFPQAWAETGGMGLAVRQAPLIIPLKATSTPVSIKQYPMSQEARLGIKPHIQRLLDQGILVPCQSPWNTPLLPVKKPGTNDYRPVQDLREVNKRVEDIHPTVPNPYNLLSGLPPSHQWYTVLDLKDAFFCLRLHPTSQPLFAFEWRDPEMGISGQLTWTRLPQGFKNSPTLFNEALHRDLADFRIQHPDLILLQYVDDLLLAATSELDCQQGTRALLQTLGNLGYRASAKKAQICQKQVKYLGYLLKEGQRWLTEARKETVMGQPTPKTPRQLREFLGTAGFCRLWIPGFAEMAAPLYPLTKPGTLFNWGPDQQKAYQEIKQALLTAPALGLPDLTKPFELFVDEKQGYAKGVLTQKLGPWRRPVAYLSKKLDPVAAGWPPCLRMVAAIAVLTKDAGKLTMGQPLVILAPHAVEALVKQPPDRWLSNARMTHYQALLLDTDRVQFGPVVALNPATLLPLPEEGLQHNCLDILAEAHGTRPDLTDQPLPDADHTWYTDGSSLLQEGQRKAGAAVTTETEVIWAKALPAGTSAQRAELIALTQALKMAEGKKLNVYTDSRYAFATAHIHGEIYRRRGWLTSEGKEIKNKDEILALLKALFLPKRLSIIHCPGHQKGHSAEARGNRMADQAARKAAITETPDTSTLLAGKRTADGSEFEKRTADGSEFESPKKKAKVE

SEQ ID NO: 3025 - protein, 2094 aa, synthetic construct; identical to SEQ ID NO: 2742

SEQ ID NO: 3026 - protein, 2094 aa, synthetic construct; identical to SEQ ID NO: 2715

SEQ ID NO: 3027 - protein, 2097 aa, synthetic construct; identical to SEQ ID NO: 2728

SEQ ID NO: 3028 - protein, 2091 aa, synthetic construct; identical to SEQ ID NO: 2743

SEQ ID NO: 3029 - protein, 2090 aa, synthetic construct
MPAAKRVKLDGGDKKYSIGLDIGTNSVGWAVITDEYKVPSKKFKVLGNTDRHSIKKNLIGALLFDSGETAEATRLKRTARRRYTRRKNRICYLQEIFSNEMAKVDDSFFHRLEESFLVEEDKKHERHPIFGNIVDEVAYHEKYPTIYHLRKKLVDSTDKADLRLIYLALAHMIKFRGHFLIEGDLNPDNSDVDKLFIQLVQTYNQLFEENPINASGVDAKAILSARLSKSRRLENLIAQLPGEKKNGLFGNLIALSLGLTPNFKSNFDLAEDAKLQLSKDTYDDDLDNLLAQIGDQYADLFLAAKNLSDAILLSDILRVNTEITKAPLSASMIKRYDEHHQDLTLLKALVRQQLPEKYKEIFFDQSKNGYAGYIDGGASQEEFYKFIKPILEKMDGTEELLVKLNREDLLRKQRTFDNGSIPHQIHLGELHAILRRQEDFYPFLKDNREKIEKILTFRIPYYVGPLARGNSRFAWMTRKSEETITPWNFEEVVDKGASAQSFIERMTNFDKNLPNEKVLPKHSLLYEYFTVYNELTKVKYVTEGMRKPAFLSGEQKKAIVDLLFKTNRKVTVKQLKEDYFKKIECFDSVEISGVEDRFNASLGTYHDLLKIIKDKDFLDNEENEDILEDIVLTLTLFEDREMIEERLKTYAHLFDDKVMKQLKRRRYTGWGRLSRKLINGIRDKQSGKTILDFLKSDGFANRNFMQLIHDDSLTFKEDIQKAQVSGQGDSLHEHIANLAGSPAIKKGILQTVKVVDELVKVMGRHKPENIVIEMARENQTTQKGQKNSRERMKRIEEGIKELGSQILKEHPVENTQLQNEKLYLYYLQNGRDMYVDQELDINRLSDYDVDHIVPQSFLKDDSIDNKVLTRSDKARGKSDNVPSEEVVKKMKNYWRQLLNAKLITQRKFDNLTKAERGGLSELDKAGFIKRQLVETRQITKHVAQILDSRMNTKYDENDKLIREVKVITLKSKLVSDFRKDFQFYKVREINNYHHAHDAYLNAVVGTALIKKYPKLESEFVYGDYKVYDVRKMIAKSEQEIGKATAKYFFYSNIMNFFKTEITLANGEIRKRPLIETNGETGEIVWDKGRDFATVRKVLSMPQVNIVKKTEVQTGGFSKESILPKRNSDKLIARKKDWDPKKYGGFDSPTVAYSVLVVAKVEKGKSKKLKSVKELLGITIMERSSFEKNPIDFLEAKGYKEVKKDLIIKLPKYSLFELENGRKRMLASAGELQKGNELALPSKYVNFLYLASHYEKLKGSPEDNEQKQLFVEQHKHYLDEIIEQISEFSKRVILADANLDKVLSAYNKHRDKPIREQAENIIHLFTLTNLGAPAAFKYFDTTIDRKRYTSTKEVLDATLIHQSITGLYETRIDLSQLGGDGGPAPAPGGTLNIEDEHRLHETSKEPDVSLGSTWLSDFPQAWAETGGMGLAVRQAPLIIPLKATSTPVSIKQYPMSQEARLGIKPHIQRLLDQGILVPCQSPWNTPLLPVKKPGTNDYRPVQDLREVNKRVEDIHPTVPNPYNLLSGLPPSHQWYTVLDLKDAFFCLRLHPTSQPLFAFEWRDPEMGISGQLTWTRLPQGFKNSPTLFNEALHRDLADFRIQHPDLILLQYVDDLLLAATSELDCQQGTRALLQTLGNLGYRASAKKAQICQKQVKYLGYLLKEGQRWLTEARKETVMGQPTPKTPRQLREFLGTAGFCRLWIPGFAEMAAPLYPLTKPGTLFNWGPDQQKAYQEIKQALLTAPALGLPDLTKPFELFVDEKQGYAKGVLTQKLGPWRRPVAYLSKKLDPVAAGWPPCLRMVAAIAVLTKDAGKLTMGQPLVILAPHAVEALVKQPPDRWLSNARMTHYQALLLDTDRVQFGPVVALNPATLLPLPEEGLQHNCLDILAEAHGTRPDLTDQPLPDADHTWYTDGSSLLQEGQRKAGAAVTTETEVIWAKALPAGTSAQRAELIALTQALKMAEGKKLNVYTDSRYAFATAHIHGEIYRRRGWLTSEGKEIKNKDEILALLKALFLPKRLSIIHCPGHQKGHSAEARGNRMADQAARKAAITETPDTSTLLAGKRTADGSEFEKRTADGSEFESPKKKAKVE

SEQ ID NO: 3030 - protein, 2091 aa, synthetic construct; identical to SEQ ID NO: 2750

SEQ ID NO: 3031 - protein, 2094 aa, synthetic construct; identical to SEQ ID NO: 2768

SEQ ID NO: 3032 - protein, 2094 aa, synthetic construct; identical to SEQ ID NO: 2770

SEQ ID NO: 3033 - protein, 2091 aa, synthetic construct; identical to SEQ ID NO: 2779

SEQ ID NO: 3034 - protein, 2093 aa, synthetic construct; identical to SEQ ID NO: 2774

SEQ ID NO: 3035 - protein, 2103 aa, synthetic construct
MPAAKRVKLDGGDKKYSIGLDIGTNSVGWAVITDEYKVPSKKFKVLGNTDRHSIKKNLIGALLFDSGETAEATRLKRTARRRYTRRKNRICYLQEIFSNEMAKVDDSFFHRLEESFLVEEDKKHERHPIFGNIVDEVAYHEKYPTIYHLRKKLVDSTDKADLRLIYLALAHMIKFRGHFLIEGDLNPDNSDVDKLFIQLVQTYNQLFEENPINASGVDAKAILSARLSKSRRLENLIAQLPGEKKNGLFGNLIALSLGLTPNFKSNFDLAEDAKLQLSKDTYDDDLDNLLAQIGDQYADLFLAAKNLSDAILLSDILRVNTEITKAPLSASMIKRYDEHHQDLTLLKALVRQQLPEKYKEIFFDQSKNGYAGYIDGGASQEEFYKFIKPILEKMDGTEELLVKLNREDLLRKQRTFDNGSIPHQIHLGELHAILRRQEDFYPFLKDNREKIEKILTFRIPYYVGPLARGNSRFAWMTRKSEETITPWNFEEVVDKGASAQSFIERMTNFDKNLPNEKVLPKHSLLYEYFTVYNELTKVKYVTEGMRKPAFLSGEQKKAIVDLLFKTNRKVTVKQLKEDYFKKIECFDSVEISGVEDRFNASLGTYHDLLKIIKDKDFLDNEENEDILEDIVLTLTLFEDREMIEERLKTYAHLFDDKVMKQLKRRRYTGWGRLSRKLINGIRDKQSGKTILDFLKSDGFANRNFMQLIHDDSLTFKEDIQKAQVSGQGDSLHEHIANLAGSPAIKKGILQTVKVVDELVKVMGRHKPENIVIEMARENQTTQKGQKNSRERMKRIEEGIKELGSQILKEHPVENTQLQNEKLYLYYLQNGRDMYVDQELDINRLSDYDVDHIVPQSFLKDDSIDNKVLTRSDKARGKSDNVPSEEVVKKMKNYWRQLLNAKLITQRKFDNLTKAERGGLSELDKAGFIKRQLVETRQITKHVAQILDSRMNTKYDENDKLIREVKVITLKSKLVSDFRKDFQFYKVREINNYHHAHDAYLNAVVGTALIKKYPKLESEFVYGDYKVYDVRKMIAKSEQEIGKATAKYFFYSNIMNFFKTEITLANGEIRKRPLIETNGETGEIVWDKGRDFATVRKVLSMPQVNIVKKTEVQTGGFSKESILPKRNSDKLIARKKDWDPKKYGGFDSPTVAYSVLVVAKVEKGKSKKLKSVKELLGITIMERSSFEKNPIDFLEAKGYKEVKKDLIIKLPKYSLFELENGRKRMLASAGELQKGNELALPSKYVNFLYLASHYEKLKGSPEDNEQKQLFVEQHKHYLDEIIEQISEFSKRVILADANLDKVLSAYNKHRDKPIREQAENIIHLFTLTNLGAPAAFKYFDTTIDRKRYTSTKEVLDATLIHQSITGLYETRIDLSQLGGDGGGGSGGSGGSGGSGGSGGSGGTLNIEDEHRLHETSKEPDVSLGSTWLSDFPQAWAETGGMGLAVRQAPLIIPLKATSTPVSIKQYPMSQEARLGIKPHIQRLLDQGILVPCQSPWNTPLLPVKKPGTNDYRPVQDLREVNKRVEDIHPTVPNPYNLLSGLPPSHQWYTVLDLKDAFFCLRLHPTSQPLFAFEWRDPEMGISGQLTWTRLPQGFKNSPTLFNEALHRDLADFRIQHPDLILLQYVDDLLLAATSELDCQQGTRALLQTLGNLGYRASAKKAQICQKQVKYLGYLLKEGQRWLTEARKETVMGQPTPKTPRQLREFLGKAGFCRLFIPGFAEMAAPLYPLTKPGTLFNWGPDQQKAYQEIKQALLTAPALGLPDLTKPFELFVDEKQGYAKGVLTQKLGPWRRPVAYLSKKLDPVAAGWPPCLRMVAAIAVLTKDAGKLTMGQPLVILAPHAVEALVKQPPDRWLSNARMTHYQALLLDTDRVQFGPVVALNPATLLPLPEEGLQHNCLDILAEAHGTRPDLTDQPLPDADHTWYTDGSSLLQEGQRKAGAAVTTETEVIWAKALPAGTSAQRAELIALTQALKMAEGKKLNVYTDSRYAFATAHIHGEIYRRRGWLTSEGKEIKNKDEILALLKALFLPKRLSIIHCPGHQKGHSAEARGNRMADQAARKAAITETPDTSTLLAGKRTADGSEFEKRTADGSEFESPKKKAKVE

SEQ ID NO: 3036 - protein, 2105 aa, synthetic construct; identical to SEQ ID NO: 2844

SEQ ID NO: 3037 - protein, 2088 aa, synthetic construct; identical to SEQ ID NO: 2812

SEQ ID NO: 3038 - protein, 2103 aa, synthetic construct; identical to SEQ ID NO: 2816

SEQ ID NO: 3039 - protein, 2097 aa, synthetic construct; identical to SEQ ID NO: 2795

SEQ ID NO: 3040 - protein, 2096 aa, synthetic construct; identical to SEQ ID NO: 2831

SEQ ID NO: 3041 - protein, 2095 aa, synthetic construct; identical to SEQ ID NO: 2845

SEQ ID NO: 3042 - protein, 2094 aa, synthetic construct; identical to SEQ ID NO: 2818

SEQ ID NO: 3043 - protein, 2110 aa, synthetic construct; identical to SEQ ID NO: 2803

SEQ ID NO: 3044 - protein, 2091 aa, synthetic construct
MPAAKRVKLDGGDKKYSIGLDIGTNSVGWAVITDEYKVPSKKFKVLGNTDRHSIKKNLIGALLFDSGETAEATRLKRTARRRYTRRKNRICYLQEIFSNEMAKVDDSFFHRLEESFLVEEDKKHERHPIFGNIVDEVAYHEKYPTIYHLRKKLVDSTDKADLRLIYLALAHMIKFRGHFLIEGDLNPDNSDVDKLFIQLVQTYNQLFEENPINASGVDAKAILSARLSKSRRLENLIAQLPGEKKNGLFGNLIALSLGLTPNFKSNFDLAEDAKLQLSKDTYDDDLDNLLAQIGDQYADLFLAAKNLSDAILLSDILRVNTEITKAPLSASMIKRYDEHHQDLTLLKALVRQQLPEKYKEIFFDQSKNGYAGYIDGGASQEEFYKFIKPILEKMDGTEELLVKLNREDLLRKQRTFDNGSIPHQIHLGELHAILRRQEDFYPFLKDNREKIEKILTFRIPYYVGPLARGNSRFAWMTRKSEETITPWNFEEVVDKGASAQSFIERMTNFDKNLPNEKVLPKHSLLYEYFTVYNELTKVKYVTEGMRKPAFLSGEQKKAIVDLLFKTNRKVTVKQLKEDYFKKIECFDSVEISGVEDRFNASLGTYHDLLKIIKDKDFLDNEENEDILEDIVLTLTLFEDREMIEERLKTYAHLFDDKVMKQLKRRRYTGWGRLSRKLINGIRDKQSGKTILDFLKSDGFANRNFMQLIHDDSLTFKEDIQKAQVSGQGDSLHEHIANLAGSPAIKKGILQTVKVVDELVKVMGRHKPENIVIEMARENQTTQKGQKNSRERMKRIEEGIKELGSQILKEHPVENTQLQNEKLYLYYLQNGRDMYVDQELDINRLSDYDVDHIVPQSFLKDDSIDNKVLTRSDKARGKSDNVPSEEVVKKMKNYWRQLLNAKLITQRKFDNLTKAERGGLSELDKAGFIKRQLVETRQITKHVAQILDSRMNTKYDENDKLIREVKVITLKSKLVSDFRKDFQFYKVREINNYHHAHDAYLNAVVGTALIKKYPKLESEFVYGDYKVYDVRKMIAKSEQEIGKATAKYFFYSNIMNFFKTEITLANGEIRKRPLIETNGETGEIVWDKGRDFATVRKVLSMPQVNIVKKTEVQTGGFSKESILPKRNSDKLIARKKDWDPKKYGGFDSPTVAYSVLVVAKVEKGKSKKLKSVKELLGITIMERSSFEKNPIDFLEAKGYKEVKKDLIIKLPKYSLFELENGRKRMLASAGELQKGNELALPSKYVNFLYLASHYEKLKGSPEDNEQKQLFVEQHKHYLDEIIEQISEFSKRVILADANLDKVLSAYNKHRDKPIREQAENIIHLFTLTNLGAPAAFKYFDTTIDRKRYTSTKEVLDATLIHQSITGLYETRIDLSQLGGDGGGGGGGGGGTLNIEDEHRLHETSKEPDVSLGSTWLSDFPQAWAETGGMGLAVRQAPLIIPLKATSTPVSIKQYPMSQEARLGIKPHIQRLLDQGILVPCQSPWNTPLLPVKKPGTNDYRPVQDLREVNKRVEDIHPTVPNPYNLLSGLPPSHQWYTVLDLKDAFFCLRLHPTSQPLFAFEWRDPEMGISGQLTWTRLPQGFKNSPTLFNEALHRDLADFRIQHPDLILLQYVDDLLLAATSELDCQQGTRALLQTLGNLGYRASAKKAQICQKQVKYLGYLLKEGQRWLTEARKETVMGQPTPKTPRQLREFLGKAGFCRLFIPGFAEMAAPLYPLTKPGTLFNWGPDQQKAYQEIKQALLTAPALGLPDLTKPFELFVDEKQGYAKGVLTQKLGPWRRPVAYLSKKLDPVAAGWPPCLRMVAAIAVLTKDAGKLTMGQPLVILAPHAVEALVKQPPDRWLSNARMTHYQALLLDTDRVQFGPVVALNPATLLPLPEEGLQHNCLDILAEAHGTRPDLTDQPLPDADHTWYTDGSSLLQEGQRKAGAAVTTETEVIWAKALPAGTSAQRAELIALTQALKMAEGKKLNVYTDSRYAFATAHIHGEIYRRRGWLTSEGKEIKNKDEILALLKALFLPKRLSIIHCPGHQKGHSAEARGNRMADQAARKAAITETPDTSTLLAGKRTADGSEFEKRTADGSEFESPKKKAKVE

SEQ ID NO: 3045 - protein, 2096 aa, synthetic construct
MPAAKRVKLDGGDKKYSIGLDIGTNSVGWAVITDEYKVPSKKFKVLGNTDRHSIKKNLIGALLFDSGETAEATRLKRTARRRYTRRKNRICYLQEIFSNEMAKVDDSFFHRLEESFLVEEDKKHERHPIFGNIVDEVAYHEKYPTIYHLRKKLVDSTDKADLRLIYLALAHMIKFRGHFLIEGDLNPDNSDVDKLFIQLVQTYNQLFEENPINASGVDAKAILSARLSKSRRLENLIAQLPGEKKNGLFGNLIALSLGLTPNFKSNFDLAEDAKLQLSKDTYDDDLDNLLAQIGDQYADLFLAAKNLSDAILLSDILRVNTEITKAPLSASMIKRYDEHHQDLTLLKALVRQQLPEKYKEIFFDQSKNGYAGYIDGGASQEEFYKFIKPILEKMDGTEELLVKLNREDLLRKQRTFDNGSIPHQIHLGELHAILRRQEDFYPFLKDNREKIEKILTFRIPYYVGPLARGNSRFAWMTRKSEETITPWNFEEVVDKGASAQSFIERMTNFDKNLPNEKVLPKHSLLYEYFTVYNELTKVKYVTEGMRKPAFLSGEQKKAIVDLLFKTNRKVTVKQLKEDYFKKIECFDSVEISGVEDRFNASLGTYHDLLKIIKDKDFLDNEENEDILEDIVLTLTLFEDREMIEERLKTYAHLFDDKVMKQLKRRRYTGWGRLSRKLINGIRDKQSGKTILDFLKSDGFANRNFMQLIHDDSLTFKEDIQKAQVSGQGDSLHEHIANLAGSPAIKKGILQTVKVVDELVKVMGRHKPENIVIEMARENQTTQKGQKNSRERMKRIEEGIKELGSQILKEHPVENTQLQNEKLYLYYLQNGRDMYVDQELDINRLSDYDVDHIVPQSFLKDDSIDNKVLTRSDKARGKSDNVPSEEVVKKMKNYWRQLLNAKLITQRKFDNLTKAERGGLSELDKAGFIKRQLVETRQITKHVAQILDSRMNTKYDENDKLIREVKVITLKSKLVSDFRKDFQFYKVREINNYHHAHDAYLNAVVGTALIKKYPKLESEFVYGDYKVYDVRKMIAKSEQEIGKATAKYFFYSNIMNFFKTEITLANGEIRKRPLIETNGETGEIVWDKGRDFATVRKVLSMPQVNIVKKTEVQTGGFSKESILPKRNSDKLIARKKDWDPKKYGGFDSPTVAYSVLVVAKVEKGKSKKLKSVKELLGITIMERSSFEKNPIDFLEAKGYKEVKKDLIIKLPKYSLFELENGRKRMLASAGELQKGNELALPSKYVNFLYLASHYEKLKGSPEDNEQKQLFVEQHKHYLDEIIEQISEFSKRVILADANLDKVLSAYNKHRDKPIREQAENIIHLFTLTNLGAPAAFKYFDTTIDRKRYTSTKEVLDATLIHQSITGLYETRIDLSQLGGDGGGGGEAAAKGGSGGTLNIEDEHRLHETSKEPDVSLGSTWLSDFPQAWAETGGMGLAVRQAPLIIPLKATSTPVSIKQYPMSQEARLGIKPHIQRLLDQGILVPCQSPWNTPLLPVKKPGTNDYRPVQDLREVNKRVEDIHPTVPNPYNLLSGLPPSHQWYTVLDLKDAFFCLRLHPTSQPLFAFEWRDPEMGISGQLTWTRLPQGFKNSPTLFNEALHRDLADFRIQHPDLILLQYVDDLLLAATSELDCQQGTRALLQTLGNLGYRASAKKAQICQKQVKYLGYLLKEGQRWLTEARKETVMGQPTPKTPRQLREFLGKAGFCRLFIPGFAEMAAPLYPLTKPGTLFNWGPDQQKAYQEIKQALLTAPALGLPDLTKPFELFVDEKQGYAKGVLTQKLGPWRRPVAYLSKKLDPVAAGWPPCLRMVAAIAVLTKDAGKLTMGQPLVILAPHAVEALVKQPPDRWLSNARMTHYQALLLDTDRVQFGPVVALNPATLLPLPEEGLQHNCLDILAEAHGTRPDLTDQPLPDADHTWYTDGSSLLQEGQRKAGAAVTTETEVIWAKALPAGTSAQRAELIALTQALKMAEGKKLNVYTDSRYAFATAHIHGEIYRRRGWLTSEGKEIKNKDEILALLKALFLPKRLSIIHCPGHQKGHSAEARGNRMADQAARKAAITETPDTSTLLAGKRTADGSEFEKRTADGSEFESPKKKAKVE

SEQ ID NO: 3046 - protein, 2096 aa, synthetic construct; identical to SEQ ID NO: 2829

SEQ ID NO: 3047 - protein, 2094 aa, synthetic construct
MPAAKRVKLDGGDKKYSIGLDIGTNSVGWAVITDEYKVPSKKFKVLGNTDRHSIKKNLIGALLFDSGETAEATRLKRTARRRYTRRKNRICYLQEIFSNEMAKVDDSFFHRLEESFLVEEDKKHERHPIFGNIVDEVAYHEKYPTIYHLRKKLVDSTDKADLRLIYLALAHMIKFRGHFLIEGDLNPDNSDVDKLFIQLVQTYNQLFEENPINASGVDAKAILSARLSKSRRLENLIAQLPGEKKNGLFGNLIALSLGLTPNFKSNFDLAEDAKLQLSKDTYDDDLDNLLAQIGDQYADLFLAAKNLSDAILLSDILRVNTEITKAPLSASMIKRYDEHHQDLTLLKALVRQQLPEKYKEIFFDQSKNGYAGYIDGGASQEEFYKFIKPILEKMDGTEELLVKLNREDLLRKQRTFDNGSIPHQIHLGELHAILRRQEDFYPFLKDNREKIEKILTFRIPYYVGPLARGNSRFAWMTRKSEETITPWNFEEVVDKGASAQSFIERMTNFDKNLPNEKVLPKHSLLYEYFTVYNELTKVKYVTEGMRKPAFLSGEQKKAIVDLLFKTNRKVTVKQLKEDYFKKIECFDSVEISGVEDRFNASLGTYHDLLKIIKDKDFLDNEENEDILEDIVLTLTLFEDREMIEERLKTYAHLFDDKVMKQLKRRRYTGWGRLSRKLINGIRDKQSGKTILDFLKSDGFANRNFMQLIHDDSLTFKEDIQKAQVSGQGDSLHEHIANLAGSPAIKKGILQTVKVVDELVKVMGRHKPENIVIEMARENQTTQKGQKNSRERMKRIEEGIKELGSQILKEHPVENTQLQNEKLYLYYLQNGRDMYVDQELDINRLSDYDVDHIVPQSFLKDDSIDNKVLTRSDKARGKSDNVPSEEVVKKMKNYWRQLLNAKLITQRKFDNLTKAERGGLSELDKAGFIKRQLVETRQITKHVAQILDSRMNTKYDENDKLIREVKVITLKSKLVSDFRKDFQFYKVREINNYHHAHDAYLNAVVGTALIKKYPKLESEFVYGDYKVYDVRKMIAKSEQEIGKATAKYFFYSNIMNFFKTEITLANGEIRKRPLIETNGETGEIVWDKGRDFATVRKVLSMPQVNIVKKTEVQTGGFSKESILPKRNSDKLIARKKDWDPKKYGGFDSPTVAYSVLVVAKVEKGKSKKLKSVKELLGITIMERSSFEKNPIDFLEAKGYKEVKKDLIIKLPKYSLFELENGRKRMLASAGELQKGNELALPSKYVNFLYLASHYEKLKGSPEDNEQKQLFVEQHKHYLDEIIEQISEFSKRVILADANLDKVLSAYNKHRDKPIREQAENIIHLFTLTNLGAPAAFKYFDTTIDRKRYTSTKEVLDATLIHQSITGLYETRIDLSQLGGDGGGSSGGGGGSGGTLNIEDEHRLHETSKEPDVSLGSTWLSDFPQAWAETGGMGLAVRQAPLIIPLKATSTPVSIKQYPMSQEARLGIKPHIQRLLDQGILVPCQSPWNTPLLPVKKPGTNDYRPVQDLREVNKRVEDIHPTVPNPYNLLSGLPPSHQWYTVLDLKDAFFCLRLHPTSQPLFAFEWRDPEMGISGQLTWTRLPQGFKNSPTLFNEALHRDLADFRIQHPDLILLQYVDDLLLAATSELDCQQGTRALLQTLGNLGYRASAKKAQICQKQVKYLGYLLKEGQRWLTEARKETVMGQPTPKTPRQLREFLGKAGFCRLFIPGFAEMAAPLYPLTKPGTLFNWGPDQQKAYQEIKQALLTAPALGLPDLTKPFELFVDEKQGYAKGVLTQKLGPWRRPVAYLSKKLDPVAAGWPPCLRMVAAIAVLTKDAGKLTMGQPLVILAPHAVEALVKQPPDRWLSNARMTHYQALLLDTDRVQFGPVVALNPATLLPLPEEGLQHNCLDILAEAHGTRPDLTDQPLPDADHTWYTDGSSLLQEGQRKAGAAVTTETEVIWAKALPAGTSAQRAELIALTQALKMAEGKKLNVYTDSRYAFATAHIHGEIYRRRGWLTSEGKEIKNKDEILALLKALFLPKRLSIIHCPGHQKGHSAEARGNRMADQAARKAAITETPDTSTLLAGKRTADGSEFEKRTADGSEFESPKKKAKVE

SEQ ID NO: 3048 - protein, 2094 aa, synthetic construct; identical to SEQ ID NO: 2852

SEQ ID NO: 3049 - protein, 2097 aa, synthetic construct; identical to SEQ ID NO: 2814

SEQ ID NO: 3050 - protein, 2096 aa, synthetic construct
MPAAKRVKLDGGDKKYSIGLDIGTNSVGWAVITDEYKVPSKKFKVLGNTDRHSIKKNLIGALLFDSGETAEATRLKRTARRRYTRRKNRICYLQEIFSNEMAKVDDSFFHRLEESFLVEEDKKHERHPIFGNIVDEVAYHEKYPTIYHLRKKLVDSTDKADLRLIYLALAHMIKFRGHFLIEGDLNPDNSDVDKLFIQLVQTYNQLFEENPINASGVDAKAILSARLSKSRRLENLIAQLPGEKKNGLFGNLIALSLGLTPNFKSNFDLAEDAKLQLSKDTYDDDLDNLLAQIGDQYADLFLAAKNLSDAILLSDILRVNTEITKAPLSASMIKRYDEHHQDLTLLKALVRQQLPEKYKEIFFDQSKNGYAGYIDGGASQEEFYKFIKPILEKMDGTEELLVKLNREDLLRKQRTFDNGSIPHQIHLGELHAILRRQEDFYPFLKDNREKIEKILTFRIPYYVGPLARGNSRFAWMTRKSEETITPWNFEEVVDKGASAQSFIERMTNFDKNLPNEKVLPKHSLLYEYFTVYNELTKVKYVTEGMRKPAFLSGEQKKAIVDLLFKTNRKVTVKQLKEDYFKKIECFDSVEISGVEDRFNASLGTYHDLLKIIKDKDFLDNEENEDILEDIVLTLTLFEDREMIEERLKTYAHLFDDKVMKQLKRRRYTGWGRLSRKLINGIRDKQSGKTILDFLKSDGFANRNFMQLIHDDSLTFKEDIQKAQVSGQGDSLHEHIANLAGSPAIKKGILQTVKVVDELVKVMGRHKPENIVIEMARENQTTQKGQKNSRERMKRIEEGIKELGSQILKEHPVENTQLQNEKLYLYYLQNGRDMYVDQELDINRLSDYDVDHIVPQSFLKDDSIDNKVLTRSDKARGKSDNVPSEEVVKKMKNYWRQLLNAKLITQRKFDNLTKAERGGLSELDKAGFIKRQLVETRQITKHVAQILDSRMNTKYDENDKLIREVKVITLKSKLVSDFRKDFQFYKVREINNYHHAHDAYLNAVVGTALIKKYPKLESEFVYGDYKVYDVRKMIAKSEQEIGKATAKYFFYSNIMNFFKTEITLANGEIRKRPLIETNGETGEIVWDKGRDFATVRKVLSMPQVNIVKKTEVQTGGFSKESILPKRNSDKLIARKKDWDPKKYGGFDSPTVAYSVLVVAKVEKGKSKKLKSVKELLGITIMERSSFEKNPIDFLEAKGYKEVKKDLIIKLPKYSLFELENGRKRMLASAGELQKGNELALPSKYVNFLYLASHYEKLKGSPEDNEQKQLFVEQHKHYLDEIIEQISEFSKRVILADANLDKVLSAYNKHRDKPIREQAENIIHLFTLTNLGAPAAFKYFDTTIDRKRYTSTKEVLDATLIHQSITGLYETRIDLSQLGGDGGGGGEAAAKGSSGGTLNIEDEHRLHETSKEPDVSLGSTWLSDFPQAWAETGGMGLAVRQAPLIIPLKATSTPVSIKQYPMSQEARLGIKPHIQRLLDQGILVPCQSPWNTPLLPVKKPGTNDYRPVQDLREVNKRVEDIHPTVPNPYNLLSGLPPSHQWYTVLDLKDAFFCLRLHPTSQPLFAFEWRDPEMGISGQLTWTRLPQGFKNSPTLFNEALHRDLADFRIQHPDLILLQYVDDLLLAATSELDCQQGTRALLQTLGNLGYRASAKKAQICQKQVKYLGYLLKEGQRWLTEARKETVMGQPTPKTPRQLREFLGKAGFCRLFIPGFAEMAAPLYPLTKPGTLFNWGPDQQKAYQEIKQALLTAPALGLPDLTKPFELFVDEKQGYAKGVLTQKLGPWRRPVAYLSKKLDPVAAGWPPCLRMVAAIAVLTKDAGKLTMGQPLVILAPHAVEALVKQPPDRWLSNARMTHYQALLLDTDRVQFGPVVALNPATLLPLPEEGLQHNCLDILAEAHGTRPDLTDQPLPDADHTWYTDGSSLLQEGQRKAGAAVTTETEVIWAKALPAGTSAQRAELIALTQALKMAEGKKLNVYTDSRYAFATAHIHGEIYRRRGWLTSEGKEIKNKDEILALLKALFLPKRLSIIHCPGHQKGHSAEARGNRMADQAARKAAITETPDTSTLLAGKRTADGSEFEKRTADGSEFESPKKKAKVE

SEQ ID NO: 3051 - protein, 2096 aa, synthetic construct; identical to SEQ ID NO: 2785

SEQ ID NO: 3052 - protein, 2096 aa, synthetic construct; identical to SEQ ID NO: 2822

SEQ ID NO: 3053 - protein, 2096 aa, synthetic construct; identical to SEQ ID NO: 2817

SEQ ID NO: 3054 - protein, 2096 aa, synthetic construct; identical to SEQ ID NO: 2851

SEQ ID NO: 3055 - protein, 2091 aa, synthetic construct
MPAAKRVKLDGGDKKYSIGLDIGTNSVGWAVITDEYKVPSKKFKVLGNTDRHSIKKNLIGALLFDSGETAEATRLKRTARRRYTRRKNRICYLQEIFSNEMAKVDDSFFHRLEESFLVEEDKKHERHPIFGNIVDEVAYHEKYPTIYHLRKKLVDSTDKADLRLIYLALAHMIKFRGHFLIEGDLNPDNSDVDKLFIQLVQTYNQLFEENPINASGVDAKAILSARLSKSRRLENLIAQLPGEKKNGLFGNLIALSLGLTPNFKSNFDLAEDAKLQLSKDTYDDDLDNLLAQIGDQYADLFLAAKNLSDAILLSDILRVNTEITKAPLSASMIKRYDEHHQDLTLLKALVRQQLPEKYKEIFFDQSKNGYAGYIDGGASQEEFYKFIKPILEKMDGTEELLVKLNREDLLRKQRTFDNGSIPHQIHLGELHAILRRQEDFYPFLKDNREKIEKILTFRIPYYVGPLARGNSRFAWMTRKSEETITPWNFEEVVDKGASAQSFIERMTNFDKNLPNEKVLPKHSLLYEYFTVYNELTKVKYVTEGMRKPAFLSGEQKKAIVDLLFKTNRKVTVKQLKEDYFKKIECFDSVEISGVEDRFNASLGTYHDLLKIIKDKDFLDNEENEDILEDIVLTLTLFEDREMIEERLKTYAHLFDDKVMKQLKRRRYTGWGRLSRKLINGIRDKQSGKTILDFLKSDGFANRNFMQLIHDDSLTFKEDIQKAQVSGQGDSLHEHIANLAGSPAIKKGILQTVKVVDELVKVMGRHKPENIVIEMARENQTTQKGQKNSRERMKRIEEGIKELGSQILKEHPVENTQLQNEKLYLYYLQNGRDMYVDQELDINRLSDYDVDHIVPQSFLKDDSIDNKVLTRSDKARGKSDNVPSEEVVKKMKNYWRQLLNAKLITQRKFDNLTKAERGGLSELDKAGFIKRQLVETRQITKHVAQILDSRMNTKYDENDKLIREVKVITLKSKLVSDFRKDFQFYKVREINNYHHAHDAYLNAVVGTALIKKYPKLESEFVYGDYKVYDVRKMIAKSEQEIGKATAKYFFYSNIMNFFKTEITLANGEIRKRPLIETNGETGEIVWDKGRDFATVRKVLSMPQVNIVKKTEVQTGGFSKESILPKRNSDKLIARKKDWDPKKYGGFDSPTVAYSVLVVAKVEKGKSKKLKSVKELLGITIMERSSFEKNPIDFLEAKGYKEVKKDLIIKLPKYSLFELENGRKRMLASAGELQKGNELALPSKYVNFLYLASHYEKLKGSPEDNEQKQLFVEQHKHYLDEIIEQISEFSKRVILADANLDKVLSAYNKHRDKPIREQAENIIHLFTLTNLGAPAAFKYFDTTIDRKRYTSTKEVLDATLIHQSITGLYETRIDLSQLGGDGGGSSPAPGGTLNIEDEHRLHETSKEPDVSLGSTWLSDFPQAWAETGGMGLAVRQAPLIIPLKATSTPVSIKQYPMSQEARLGIKPHIQRLLDQGILVPCQSPWNTPLLPVKKPGTNDYRPVQDLREVNKRVEDIHPTVPNPYNLLSGLPPSHQWYTVLDLKDAFFCLRLHPTSQPLFAFEWRDPEMGISGQLTWTRLPQGFKNSPTLFNEALHRDLADFRIQHPDLILLQYVDDLLLAATSELDCQQGTRALLQTLGNLGYRASAKKAQICQKQVKYLGYLLKEGQRWLTEARKETVMGQPTPKTPRQLREFLGKAGFCRLFIPGFAEMAAPLYPLTKPGTLFNWGPDQQKAYQEIKQALLTAPALGLPDLTKPFELFVDEKQGYAKGVLTQKLGPWRRPVAYLSKKLDPVAAGWPPCLRMVAAIAVLTKDAGKLTMGQPLVILAPHAVEALVKQPPDRWLSNARMTHYQALLLDTDRVQFGPVVALNPATLLPLPEEGLQHNCLDILAEAHGTRPDLTDQPLPDADHTWYTDGSSLLQEGQRKAGAAVTTETEVIWAKALPAGTSAQRAELIALTQALKMAEGKKLNVYTDSRYAFATAHIHGEIYRRRGWLTSEGKEIKNKDEILALLKALFLPKRLSIIHCPGHQKGHSAEARGNRMADQAARKAAITETPDTSTLLAGKRTADGSEFEKRTADGSEFESPKKKAKVE

SEQ ID NO: 3056 - protein, 2094 aa, synthetic construct
MPAAKRVKLDGGDKKYSIGLDIGTNSVGWAVITDEYKVPSKKFKVLGNTDRHSIKKNLIGALLFDSGETAEATRLKRTARRRYTRRKNRICYLQEIFSNEMAKVDDSFFHRLEESFLVEEDKKHERHPIFGNIVDEVAYHEKYPTIYHLRKKLVDSTDKADLRLIYLALAHMIKFRGHFLIEGDLNPDNSDVDKLFIQLVQTYNQLFEENPINASGVDAKAILSARLSKSRRLENLIAQLPGEKKNGLFGNLIALSLGLTPNFKSNFDLAEDAKLQLSKDTYDDDLDNLLAQIGDQYADLFLAAKNLSDAILLSDILRVNTEITKAPLSASMIKRYDEHHQDLTLLKALVRQQLPEKYKEIFFDQSKNGYAGYIDGGASQEEFYKFIKPILEKMDGTEELLVKLNREDLLRKQRTFDNGSIPHQIHLGELHAILRRQEDFYPFLKDNREKIEKILTFRIPYYVGPLARGNSRFAWMTRKSEETITPWNFEEVVDKGASAQSFIERMTNFDKNLPNEKVLPKHSLLYEYFTVYNELTKVKYVTEGMRKPAFLSGEQKKAIVDLLFKTNRKVTVKQLKEDYFKKIECFDSVEISGVEDRFNASLGTYHDLLKIIKDKDFLDNEENEDILEDIVLTLTLFEDREMIEERLKTYAHLFDDKVMKQLKRRRYTGWGRLSRKLINGIRDKQSGKTILDFLKSDGFANRNFMQLIHDDSLTFKEDIQKAQVSGQGDSLHEHIANLAGSPAIKKGILQTVKVVDELVKVMGRHKPENIVIEMARENQTTQKGQKNSRERMKRIEEGIKELGSQILKEHPVENTQLQNEKLYLYYLQNGRDMYVDQELDINRLSDYDVDHIVPQSFLKDDSIDNKVLTRSDKARGKSDNVPSEEVVKKMKNYWRQLLNAKLITQRKFDNLTKAERGGLSELDKAGFIKRQLVETRQITKHVAQILDSRMNTKYDENDKLIREVKVITLKSKLVSDFRKDFQFYKVREINNYHHAHDAYLNAVVGTALIKKYPKLESEFVYGDYKVYDVRKMIAKSEQEIGKATAKYFFYSNIMNFFKTEITLANGEIRKRPLIETNGETGEIVWDKGRDFATVRKVLSMPQVNIVKKTEVQTGGFSKESILPKRNSDKLIARKKDWDPKKYGGFDSPTVAYSVLVVAKVEKGKSKKLKSVKELLGITIMERSSFEKNPIDFLEAKGYKEVKKDLIIKLPKYSLFELENGRKRMLASAGELQKGNELALPSKYVNFLYLASHYEKLKGSPEDNEQKQLFVEQHKHYLDEIIEQISEFSKRVILADANLDKVLSAYNKHRDKPIREQAENIIHLFTLTNLGAPAAFKYFDTTIDRKRYTSTKEVLDATLIHQSITGLYETRIDLSQLGGDGGGSSGGGPAPGGTLNIEDEHRLHETSKEPDVSLGSTWLSDFPQAWAETGGMGLAVRQAPLIIPLKATSTPVSIKQYPMSQEARLGIKPHIQRLLDQGILVPCQSPWNTPLLPVKKPGTNDYRPVQDLREVNKRVEDIHPTVPNPYNLLSGLPPSHQWYTVLDLKDAFFCLRLHPTSQPLFAFEWRDPEMGISGQLTWTRLPQGFKNSPTLFNEALHRDLADFRIQHPDLILLQYVDDLLLAATSELDCQQGTRALLQTLGNLGYRASAKKAQICQKQVKYLGYLLKEGQRWLTEARKETVMGQPTPKTPRQLREFLGKAGFCRLFIPGFAEMAAPLYPLTKPGTLFNWGPDQQKAYQEIKQALLTAPALGLPDLTKPFELFVDEKQGYAKGVLTQKLGPWRRPVAYLSKKLDPVAAGWPPCLRMVAAIAVLTKDAGKLTMGQPLVILAPHAVEALVKQPPDRWLSNARMTHYQALLLDTDRVQFGPVVALNPATLLPLPEEGLQHNCLDILAEAHGTRPDLTDQPLPDADHTWYTDGSSLLQEGQRKAGAAVTTETEVIWAKALPAGTSAQRAELIALTQALKMAEGKKLNVYTDSRYAFATAHIHGEIYRRRGWLTSEGKEIKNKDEILALLKALFLPKRLSIIHCPGHQKGHSAEARGNRMADQAARKAAITETPDTSTLLAGKRTADGSEFEKRTADGSEFESPKKKAKVE

SEQ ID NO: 3057 - protein, 2096 aa, synthetic construct; identical to SEQ ID NO: 2810

SEQ ID NO: 3058 - protein, 2091 aa, synthetic construct
MPAAKRVKLDGGDKKYSIGLDIGTNSVGWAVITDEYKVPSKKFKVLGNTDRHSIKKNLIGALLFDSGETAEATRLKRTARRRYTRRKNRICYLQEIFSNEMAKVDDSFFHRLEESFLVEEDKKHERHPIFGNIVDEVAYHEKYPTIYHLRKKLVDSTDKADLRLIYLALAHMIKFRGHFLIEGDLNPDNSDVDKLFIQLVQTYNQLFEENPINASGVDAKAILSARLSKSRRLENLIAQLPGEKKNGLFGNLIALSLGLTPNFKSNFDLAEDAKLQLSKDTYDDDLDNLLAQIGDQYADLFLAAKNLSDAILLSDILRVNTEITKAPLSASMIKRYDEHHQDLTLLKALVRQQLPEKYKEIFFDQSKNGYAGYIDGGASQEEFYKFIKPILEKMDGTEELLVKLNREDLLRKQRTFDNGSIPHQIHLGELHAILRRQEDFYPFLKDNREKIEKILTFRIPYYVGPLARGNSRFAWMTRKSEETITPWNFEEVVDKGASAQSFIERMTNFDKNLPNEKVLPKHSLLYEYFTVYNELTKVKYVTEGMRKPAFLSGEQKKAIVDLLFKTNRKVTVKQLKEDYFKKIECFDSVEISGVEDRFNASLGTYHDLLKIIKDKDFLDNEENEDILEDIVLTLTLFEDREMIEERLKTYAHLFDDKVMKQLKRRRYTGWGRLSRKLINGIRDKQSGKTILDFLKSDGFANRNFMQLIHDDSLTFKEDIQKAQVSGQGDSLHEHIANLAGSPAIKKGILQTVKVVDELVKVMGRHKPENIVIEMARENQTTQKGQKNSRERMKRIEEGIKELGSQILKEHPVENTQLQNEKLYLYYLQNGRDMYVDQELDINRLSDYDVDHIVPQSFLKDDSIDNKVLTRSDKARGKSDNVPSEEVVKKMKNYWRQLLNAKLITQRKFDNLTKAERGGLSELDKAGFIKRQLVETRQITKHVAQILDSRMNTKYDENDKLIREVKVITLKSKLVSDFRKDFQFYKVREINNYHHAHDAYLNAVVGTALIKKYPKLESEFVYGDYKVYDVRKMIAKSEQEIGKATAKYFFYSNIMNFFKTEITLANGEIRKRPLIETNGETGEIVWDKGRDFATVRKVLSMPQVNIVKKTEVQTGGFSKESILPKRNSDKLIARKKDWDPKKYGGFDSPTVAYSVLVVAKVEKGKSKKLKSVKELLGITIMERSSFEKNPIDFLEAKGYKEVKKDLIIKLPKYSLFELENGRKRMLASAGELQKGNELALPSKYVNFLYLASHYEKLKGSPEDNEQKQLFVEQHKHYLDEIIEQISEFSKRVILADANLDKVLSAYNKHRDKPIREQAENIIHLFTLTNLGAPAAFKYFDTTIDRKRYTSTKEVLDATLIHQSITGLYETRIDLSQLGGDGGGSSGGGGGTLNIEDEHRLHETSKEPDVSLGSTWLSDFPQAWAETGGMGLAVRQAPLIIPLKATSTPVSIKQYPMSQEARLGIKPHIQRLLDQGILVPCQSPWNTPLLPVKKPGTNDYRPVQDLREVNKRVEDIHPTVPNPYNLLSGLPPSHQWYTVLDLKDAFFCLRLHPTSQPLFAFEWRDPEMGISGQLTWTRLPQGFKNSPTLFNEALHRDLADFRIQHPDLILLQYVDDLLLAATSELDCQQGTRALLQTLGNLGYRASAKKAQICQKQVKYLGYLLKEGQRWLTEARKETVMGQPTPKTPRQLREFLGKAGFCRLFIPGFAEMAAPLYPLTKPGTLFNWGPDQQKAYQEIKQALLTAPALGLPDLTKPFELFVDEKQGYAKGVLTQKLGPWRRPVAYLSKKLDPVAAGWPPCLRMVAAIAVLTKDAGKLTMGQPLVILAPHAVEALVKQPPDRWLSNARMTHYQALLLDTDRVQFGPVVALNPATLLPLPEEGLQHNCLDILAEAHGTRPDLTDQPLPDADHTWYTDGSSLLQEGQRKAGAAVTTETEVIWAKALPAGTSAQRAELIALTQALKMAEGKKLNVYTDSRYAFATAHIHGEIYRRRGWLTSEGKEIKNKDEILALLKALFLPKRLSIIHCPGHQKGHSAEARGNRMADQAARKAAITETPDTSTLLAGKRTADGSEFEKRTADGSEFESPKKKAKVE

SEQ ID NO: 3059 - protein, 2094 aa, synthetic construct; identical to SEQ ID NO: 2804

SEQ ID NO: 3060 - protein, 2091 aa, synthetic construct
MPAAKRVKLDGGDKKYSIGLDIGTNSVGWAVITDEYKVPSKKFKVLGNTDRHSIKKNLIGALLFDSGETAEATRLKRTARRRYTRRKNRICYLQEIFSNEMAKVDDSFFHRLEESFLVEEDKKHERHPIFGNIVDEVAYHEKYPTIYHLRKKLVDSTDKADLRLIYLALAHMIKFRGHFLIEGDLNPDNSDVDKLFIQLVQTYNQLFEENPINASGVDAKAILSARLSKSRRLENLIAQLPGEKKNGLFGNLIALSLGLTPNFKSNFDLAEDAKLQLSKDTYDDDLDNLLAQIGDQYADLFLAAKNLSDAILLSDILRVNTEITKAPLSASMIKRYDEHHQDLTLLKALVRQQLPEKYKEIFFDQSKNGYAGYIDGGASQEEFYKFIKPILEKMDGTEELLVKLNREDLLRKQRTFDNGSIPHQIHLGELHAILRRQEDFYPFLKDNREKIEKILTFRIPYYVGPLARGNSRFAWMTRKSEETITPWNFEEVVDKGASAQSFIERMTNFDKNLPNEKVLPKHSLLYEYFTVYNELTKVKYVTEGMRKPAFLSGEQKKAIVDLLFKTNRKVTVKQLKEDYFKKIECFDSVEISGVEDRFNASLGTYHDLLKIIKDKDFLDNEENEDILEDIVLTLTLFEDREMIEERLKTYAHLFDDKVMKQLKRRRYTGWGRLSRKLINGIRDKQSGKTILDFLKSDGFANRNFMQLIHDDSLTFKEDIQKAQVSGQGDSLHEHIANLAGSPAIKKGILQTVKVVDELVKVMGRHKPENIVIEMARENQTTQKGQKNSRERMKRIEEGIKELGSQILKEHPVENTQLQNEKLYLYYLQNGRDMYVDQELDINRLSDYDVDHIVPQSFLKDDSIDNKVLTRSDKARGKSDNVPSEEVVKKMKNYWRQLLNAKLITQRKFDNLTKAERGGLSELDKAGFIKRQLVETRQITKHVAQILDSRMNTKYDENDKLIREVKVITLKSKLVSDFRKDFQFYKVREINNYHHAHDAYLNAVVGTALIKKYPKLESEFVYGDYKVYDVRKMIAKSEQEIGKATAKYFFYSNIMNFFKTEITLANGEIRKRPLIETNGETGEIVWDKGRDFATVRKVLSMPQVNIVKKTEVQTGGFSKESILPKRNSDKLIARKKDWDPKKYGGFDSPTVAYSVLVVAKVEKGKSKKLKSVKELLGITIMERSSFEKNPIDFLEAKGYKEVKKDLIIKLPKYSLFELENGRKRMLASAGELQKGNELALPSKYVNFLYLASHYEKLKGSPEDNEQKQLFVEQHKHYLDEIIEQISEFSKRVILADANLDKVLSAYNKHRDKPIREQAENIIHLFTLTNLGAPAAFKYFDTTIDRKRYTSTKEVLDATLIHQSITGLYETRIDLSQLGGDGGPAPGGSGGTLNIEDEHRLHETSKEPDVSLGSTWLSDFPQAWAETGGMGLAVRQAPLIIPLKATSTPVSIKQYPMSQEARLGIKPHIQRLLDQGILVPCQSPWNTPLLPVKKPGTNDYRPVQDLREVNKRVEDIHPTVPNPYNLLSGLPPSHQWYTVLDLKDAFFCLRLHPTSQPLFAFEWRDPEMGISGQLTWTRLPQGFKNSPTLFNEALHRDLADFRIQHPDLILLQYVDDLLLAATSELDCQQGTRALLQTLGNLGYRASAKKAQICQKQVKYLGYLLKEGQRWLTEARKETVMGQPTPKTPRQLREFLGKAGFCRLFIPGFAEMAAPLYPLTKPGTLFNWGPDQQKAYQEIKQALLTAPALGLPDLTKPFELFVDEKQGYAKGVLTQKLGPWRRPVAYLSKKLDPVAAGWPPCLRMVAAIAVLTKDAGKLTMGQPLVILAPHAVEALVKQPPDRWLSNARMTHYQALLLDTDRVQFGPVVALNPATLLPLPEEGLQHNCLDILAEAHGTRPDLTDQPLPDADHTWYTDGSSLLQEGQRKAGAAVTTETEVIWAKALPAGTSAQRAELIALTQALKMAEGKKLNVYTDSRYAFATAHIHGEIYRRRGWLTSEGKEIKNKDEILALLKALFLPKRLSIIHCPGHQKGHSAEARGNRMADQAARKAAITETPDTSTLLAGKRTADGSEFEKRTADGSEFESPKKKAKVE

SEQ ID NO: 3061 - protein, 2093 aa, synthetic construct
MPAAKRVKLDGGDKKYSIGLDIGTNSVGWAVITDEYKVPSKKFKVLGNTDRHSIKKNLIGALLFDSGETAEATRLKRTARRRYTRRKNRICYLQEIFSNEMAKVDDSFFHRLEESFLVEEDKKHERHPIFGNIVDEVAYHEKYPTIYHLRKKLVDSTDKADLRLIYLALAHMIKFRGHFLIEGDLNPDNSDVDKLFIQLVQTYNQLFEENPINASGVDAKAILSARLSKSRRLENLIAQLPGEKKNGLFGNLIALSLGLTPNFKSNFDLAEDAKLQLSKDTYDDDLDNLLAQIGDQYADLFLAAKNLSDAILLSDILRVNTEITKAPLSASMIKRYDEHHQDLTLLKALVRQQLPEKYKEIFFDQSKNGYAGYIDGGASQEEFYKFIKPILEKMDGTEELLVKLNREDLLRKQRTFDNGSIPHQIHLGELHAILRRQEDFYPFLKDNREKIEKILTFRIPYYVGPLARGNSRFAWMTRKSEETITPWNFEEVVDKGASAQSFIERMTNFDKNLPNEKVLPKHSLLYEYFTVYNELTKVKYVTEGMRKPAFLSGEQKKAIVDLLFKTNRKVTVKQLKEDYFKKIECFDSVEISGVEDRFNASLGTYHDLLKIIKDKDFLDNEENEDILEDIVLTLTLFEDREMIEERLKTYAHLFDDKVMKQLKRRRYTGWGRLSRKLINGIRDKQSGKTILDFLKSDGFANRNFMQLIHDDSLTFKEDIQKAQVSGQGDSLHEHIANLAGSPAIKKGILQTVKVVDELVKVMGRHKPENIVIEMARENQTTQKGQKNSRERMKRIEEGIKELGSQILKEHPVENTQLQNEKLYLYYLQNGRDMYVDQELDINRLSDYDVDHIVPQSFLKDDSIDNKVLTRSDKARGKSDNVPSEEVVKKMKNYWRQLLNAKLITQRKFDNLTKAERGGLSELDKAGFIKRQLVETRQITKHVAQILDSRMNTKYDENDKLIREVKVITLKSKLVSDFRKDFQFYKVREINNYHHAHDAYLNAVVGTALIKKYPKLESEFVYGDYKVYDVRKMIAKSEQEIGKATAKYFFYSNIMNFFKTEITLANGEIRKRPLIETNGETGEIVWDKGRDFATVRKVLSMPQVNIVKKTEVQTGGFSKESILPKRNSDKLIARKKDWDPKKYGGFDSPTVAYSVLVVAKVEKGKSKKLKSVKELLGITIMERSSFEKNPIDFLEAKGYKEVKKDLIIKLPKYSLFELENGRKRMLASAGELQKGNELALPSKYVNFLYLASHYEKLKGSPEDNEQKQLFVEQHKHYLDEIIEQISEFSKRVILADANLDKVLSAYNKHRDKPIREQAENIIHLFTLTNLGAPAAFKYFDTTIDRKRYTSTKEVLDATLIHQSITGLYETRIDLSQLGGDGGPAPEAAAKGGTLNIEDEHRLHETSKEPDVSLGSTWLSDFPQAWAETGGMGLAVRQAPLIIPLKATSTPVSIKQYPMSQEARLGIKPHIQRLLDQGILVPCQSPWNTPLLPVKKPGTNDYRPVQDLREVNKRVEDIHPTVPNPYNLLSGLPPSHQWYTVLDLKDAFFCLRLHPTSQPLFAFEWRDPEMGISGQLTWTRLPQGFKNSPTLFNEALHRDLADFRIQHPDLILLQYVDDLLLAATSELDCQQGTRALLQTLGNLGYRASAKKAQICQKQVKYLGYLLKEGQRWLTEARKETVMGQPTPKTPRQLREFLGKAGFCRLFIPGFAEMAAPLYPLTKPGTLFNWGPDQQKAYQEIKQALLTAPALGLPDLTKPFELFVDEKQGYAKGVLTQKLGPWRRPVAYLSKKLDPVAAGWPPCLRMVAAIAVLTKDAGKLTMGQPLVILAPHAVEALVKQPPDRWLSNARMTHYQALLLDTDRVQFGPVVALNPATLLPLPEEGLQHNCLDILAEAHGTRPDLTDQPLPDADHTWYTDGSSLLQEGQRKAGAAVTTETEVIWAKALPAGTSAQRAELIALTQALKMAEGKKLNVYTDSRYAFATAHIHGEIYRRRGWLTSEGKEIKNKDEILALLKALFLPKRLSIIHCPGHQKGHSAEARGNRMADQAARKAAITETPDTSTLLAGKRTADGSEFEKRTADGSEFESPKKKAKVE

SEQ ID NO: 3062 - protein, 2093 aa, synthetic construct; identical to SEQ ID NO: 2828

SEQ ID NO: 3063 - protein, 2105 aa, synthetic construct
MPAAKRVKLDGGDKKYSIGLDIGTNSVGWAVITDEYKVPSKKFKVLGNTDRHSIKKNLIGALLFDSGETAEATRLKRTARRRYTRRKNRICYLQEIFSNEMAKVDDSFFHRLEESFLVEEDKKHERHPIFGNIVDEVAYHEKYPTIYHLRKKLVDSTDKADLRLIYLALAHMIKFRGHFLIEGDLNPDNSDVDKLFIQLVQTYNQLFEENPINASGVDAKAILSARLSKSRRLENLIAQLPGEKKNGLFGNLIALSLGLTPNFKSNFDLAEDAKLQLSKDTYDDDLDNLLAQIGDQYADLFLAAKNLSDAILLSDILRVNTEITKAPLSASMIKRYDEHHQDLTLLKALVRQQLPEKYKEIFFDQSKNGYAGYIDGGASQEEFYKFIKPILEKMDGTEELLVKLNREDLLRKQRTFDNGSIPHQIHLGELHAILRRQEDFYPFLKDNREKIEKILTFRIPYYVGPLARGNSRFAWMTRKSEETITPWNFEEVVDKGASAQSFIERMTNFDKNLPNEKVLPKHSLLYEYFTVYNELTKVKYVTEGMRKPAFLSGEQKKAIVDLLFKTNRKVTVKQLKEDYFKKIECFDSVEISGVEDRFNASLGTYHDLLKIIKDKDFLDNEENEDILEDIVLTLTLFEDREMIEERLKTYAHLFDDKVMKQLKRRRYTGWGRLSRKLINGIRDKQSGKTILDFLKSDGFANRNFMQLIHDDSLTFKEDIQKAQVSGQGDSLHEHIANLAGSPAIKKGILQTVKVVDELVKVMGRHKPENIVIEMARENQTTQKGQKNSRERMKRIEEGIKELGSQILKEHPVENTQLQNEKLYLYYLQNGRDMYVDQELDINRLSDYDVDHIVPQSFLKDDSIDNKVLTRSDKARGKSDNVPSEEVVKKMKNYWRQLLNAKLITQRKFDNLTKAERGGLSELDKAGFIKRQLVETRQITKHVAQILDSRMNTKYDENDKLIREVKVITLKSKLVSDFRKDFQFYKVREINNYHHAHDAYLNAVVGTALIKKYPKLESEFVYGDYKVYDVRKMIAKSEQEIGKATAKYFFYSNIMNFFKTEITLANGEIRKRPLIETNGETGEIVWDKGRDFATVRKVLSMPQVNIVKKTEVQTGGFSKESILPKRNSDKLIARKKDWDPKKYGGFDSPTVAYSVLVVAKVEKGKSKKLKSVKELLGITIMERSSFEKNPIDFLEAKGYKEVKKDLIIKLPKYSLFELENGRKRMLASAGELQKGNELALPSKYVNFLYLASHYEKLKGSPEDNEQKQLFVEQHKHYLDEIIEQISEFSKRVILADANLDKVLSAYNKHRDKPIREQAENIIHLFTLTNLGAPAAFKYFDTTIDRKRYTSTKEVLDATLIHQSITGLYETRIDLSQLGGDGGGGGGSGGGGSGGGGSGGGGSGGTLNIEDEHRLHETSKEPDVSLGSTWLSDFPQAWAETGGMGLAVRQAPLIIPLKATSTPVSIKQYPMSQEARLGIKPHIQRLLDQGILVPCQSPWNTPLLPVKKPGTNDYRPVQDLREVNKRVEDIHPTVPNPYNLLSGLPPSHQWYTVLDLKDAFFCLRLHPTSQPLFAFEWRDPEMGISGQLTWTRLPQGFKNSPTLFNEALHRDLADFRIQHPDLILLQYVDDLLLAATSELDCQQGTRALLQTLGNLGYRASAKKAQICQKQVKYLGYLLKEGQRWLTEARKETVMGQPTPKTPRQLREFLGKAGFCRLFIPGFAEMAAPLYPLTKPGTLFNWGPDQQKAYQEIKQALLTAPALGLPDLTKPFELFVDEKQGYAKGVLTQKLGPWRRPVAYLSKKLDPVAAGWPPCLRMVAAIAVLTKDAGKLTMGQPLVILAPHAVEALVKQPPDRWLSNARMTHYQALLLDTDRVQFGPVVALNPATLLPLPEEGLQHNCLDILAEAHGTRPDLTDQPLPDADHTWYTDGSSLLQEGQRKAGAAVTTETEVIWAKALPAGTSAQRAELIALTQALKMAEGKKLNVYTDSRYAFATAHIHGEIYRRRGWLTSEGKEIKNKDEILALLKALFLPKRLSIIHCPGHQKGHSAEARGNRMADQAARKAAITETPDTSTLLAGKRTADGSEFEKRTADGSEFESPKKKAKVE

SEQ ID NO: 3064 - protein, 2094 aa, synthetic construct
MPAAKRVKLDGGDKKYSIGLDIGTNSVGWAVITDEYKVPSKKFKVLGNTDRHSIKKNLIGALLFDSGETAEATRLKRTARRRYTRRKNRICYLQEIFSNEMAKVDDSFFHRLEESFLVEEDKKHERHPIFGNIVDEVAYHEKYPTIYHLRKKLVDSTDKADLRLIYLALAHMIKFRGHFLIEGDLNPDNSDVDKLFIQLVQTYNQLFEENPINASGVDAKAILSARLSKSRRLENLIAQLPGEKKNGLFGNLIALSLGLTPNFKSNFDLAEDAKLQLSKDTYDDDLDNLLAQIGDQYADLFLAAKNLSDAILLSDILRVNTEITKAPLSASMIKRYDEHHQDLTLLKALVRQQLPEKYKEIFFDQSKNGYAGYIDGGASQEEFYKFIKPILEKMDGTEELLVKLNREDLLRKQRTFDNGSIPHQIHLGELHAILRRQEDFYPFLKDNREKIEKILTFRIPYYVGPLARGNSRFAWMTRKSEETITPWNFEEVVDKGASAQSFIERMTNFDKNLPNEKVLPKHSLLYEYFTVYNELTKVKYVTEGMRKPAFLSGEQKKAIVDLLFKTNRKVTVKQLKEDYFKKIECFDSVEISGVEDRFNASLGTYHDLLKIIKDKDFLDNEENEDILEDIVLTLTLFEDREMIEERLKTYAHLFDDKVMKQLKRRRYTGWGRLSRKLINGIRDKQSGKTILDFLKSDGFANRNFMQLIHDDSLTFKEDIQKAQVSGQGDSLHEHIANLAGSPAIKKGILQTVKVVDELVKVMGRHKPENIVIEMARENQTTQKGQKNSRERMKRIEEGIKELGSQILKEHPVENTQLQNEKLYLYYLQNGRDMYVDQELDINRLSDYDVDHIVPQSFLKDDSIDNKVLTRSDKARGKSDNVPSEEVVKKMKNYWRQLLNAKLITQRKFDNLTKAERGGLSELDKAGFIKRQLVETRQITKHVAQILDSRMNTKYDENDKLIREVKVITLKSKLVSDFRKDFQFYKVREINNYHHAHDAYLNAVVGTALIKKYPKLESEFVYGDYKVYDVRKMIAKSEQEIGKATAKYFFYSNIMNFFKTEITLANGEIRKRPLIETNGETGEIVWDKGRDFATVRKVLSMPQVNIVKKTEVQTGGFSKESILPKRNSDKLIARKKDWDPKKYGGFDSPTVAYSVLVVAKVEKGKSKKLKSVKELLGITIMERSSFEKNPIDFLEAKGYKEVKKDLIIKLPKYSLFELENGRKRMLASAGELQKGNELALPSKYVNFLYLASHYEKLKGSPEDNEQKQLFVEQHKHYLDEIIEQISEFSKRVILADANLDKVLSAYNKHRDKPIREQAENIIHLFTLTNLGAPAAFKYFDTTIDRKRYTSTKEVLDATLIHQSITGLYETRIDLSQLGGDGGPAPGGSGSSGGTLNIEDEHRLHETSKEPDVSLGSTWLSDFPQAWAETGGMGLAVRQAPLIIPLKATSTPVSIKQYPMSQEARLGIKPHIQRLLDQGILVPCQSPWNTPLLPVKKPGTNDYRPVQDLREVNKRVEDIHPTVPNPYNLLSGLPPSHQWYTVLDLKDAFFCLRLHPTSQPLFAFEWRDPEMGISGQLTWTRLPQGFKNSPTLFNEALHRDLADFRIQHPDLILLQYVDDLLLAATSELDCQQGTRALLQTLGNLGYRASAKKAQICQKQVKYLGYLLKEGQRWLTEARKETVMGQPTPKTPRQLREFLGKAGFCRLFIPGFAEMAAPLYPLTKPGTLFNWGPDQQKAYQEIKQALLTAPALGLPDLTKPFELFVDEKQGYAKGVLTQKLGPWRRPVAYLSKKLDPVAAGWPPCLRMVAAIAVLTKDAGKLTMGQPLVILAPHAVEALVKQPPDRWLSNARMTHYQALLLDTDRVQFGPVVALNPATLLPLPEEGLQHNCLDILAEAHGTRPDLTDQPLPDADHTWYTDGSSLLQEGQRKAGAAVTTETEVIWAKALPAGTSAQRAELIALTQALKMAEGKKLNVYTDSRYAFATAHIHGEIYRRRGWLTSEGKEIKNKDEILALLKALFLPKRLSIIHCPGHQKGHSAEARGNRMADQAARKAAITETPDTSTLLAGKRTADGSEFEKRTADGSEFESPKKKAKVE

SEQ ID NO: 3065 - protein, 2090 aa, synthetic construct; identical to SEQ ID NO: 2825

SEQ ID NO: 3066 - protein, 2090 aa, synthetic construct
MPAAKRVKLDGGDKKYSIGLDIGTNSVGWAVITDEYKVPSKKFKVLGNTDRHSIKKNLIGALLFDSGETAEATRLKRTARRRYTRRKNRICYLQEIFSNEMAKVDDSFFHRLEESFLVEEDKKHERHPIFGNIVDEVAYHEKYPTIYHLRKKLVDSTDKADLRLIYLALAHMIKFRGHFLIEGDLNPDNSDVDKLFIQLVQTYNQLFEENPINASGVDAKAILSARLSKSRRLENLIAQLPGEKKNGLFGNLIALSLGLTPNFKSNFDLAEDAKLQLSKDTYDDDLDNLLAQIGDQYADLFLAAKNLSDAILLSDILRVNTEITKAPLSASMIKRYDEHHQDLTLLKALVRQQLPEKYKEIFFDQSKNGYAGYIDGGASQEEFYKFIKPILEKMDGTEELLVKLNREDLLRKQRTFDNGSIPHQIHLGELHAILRRQEDFYPFLKDNREKIEKILTFRIPYYVGPLARGNSRFAWMTRKSEETITPWNFEEVVDKGASAQSFIERMTNFDKNLPNEKVLPKHSLLYEYFTVYNELTKVKYVTEGMRKPAFLSGEQKKAIVDLLFKTNRKVTVKQLKEDYFKKIECFDSVEISGVEDRFNASLGTYHDLLKIIKDKDFLDNEENEDILEDIVLTLTLFEDREMIEERLKTYAHLFDDKVMKQLKRRRYTGWGRLSRKLINGIRDKQSGKTILDFLKSDGFANRNFMQLIHDDSLTFKEDIQKAQVSGQGDSLHEHIANLAGSPAIKKGILQTVKVVDELVKVMGRHKPENIVIEMARENQTTQKGQKNSRERMKRIEEGIKELGSQILKEHPVENTQLQNEKLYLYYLQNGRDMYVDQELDINRLSDYDVDHIVPQSFLKDDSIDNKVLTRSDKARGKSDNVPSEEVVKKMKNYWRQLLNAKLITQRKFDNLTKAERGGLSELDKAGFIKRQLVETRQITKHVAQILDSRMNTKYDENDKLIREVKVITLKSKLVSDFRKDFQFYKVREINNYHHAHDAYLNAVVGTALIKKYPKLESEFVYGDYKVYDVRKMIAKSEQEIGKATAKYFFYSNIMNFFKTEITLANGEIRKRPLIETNGETGEIVWDKGRDFATVRKVLSMPQVNIVKKTEVQTGGFSKESILPKRNSDKLIARKKDWDPKKYGGFDSPTVAYSVLVVAKVEKGKSKKLKSVKELLGITIMERSSFEKNPIDFLEAKGYKEVKKDLIIKLPKYSLFELENGRKRMLASAGELQKGNELALPSKYVNFLYLASHYEKLKGSPEDNEQKQLFVEQHKHYLDEIIEQISEFSKRVILADANLDKVLSAYNKHRDKPIREQAENIIHLFTLTNLGAPAAFKYFDTTIDRKRYTSTKEVLDATLIHQSITGLYETRIDLSQLGGDGGPAPAPGGTLNIEDEHRLHETSKEPDVSLGSTWLSDFPQAWAETGGMGLAVRQAPLIIPLKATSTPVSIKQYPMSQEARLGIKPHIQRLLDQGILVPCQSPWNTPLLPVKKPGTNDYRPVQDLREVNKRVEDIHPTVPNPYNLLSGLPPSHQWYTVLDLKDAFFCLRLHPTSQPLFAFEWRDPEMGISGQLTWTRLPQGFKNSPTLFNEALHRDLADFRIQHPDLILLQYVDDLLLAATSELDCQQGTRALLQTLGNLGYRASAKKAQICQKQVKYLGYLLKEGQRWLTEARKETVMGQPTPKTPRQLREFLGKAGFCRLFIPGFAEMAAPLYPLTKPGTLFNWGPDQQKAYQEIKQALLTAPALGLPDLTKPFELFVDEKQGYAKGVLTQKLGPWRRPVAYLSKKLDPVAAGWPPCLRMVAAIAVLTKDAGKLTMGQPLVILAPHAVEALVKQPPDRWLSNARMTHYQALLLDTDRVQFGPVVALNPATLLPLPEEGLQHNCLDILAEAHGTRPDLTDQPLPDADHTWYTDGSSLLQEGQRKAGAAVTTETEVIWAKALPAGTSAQRAELIALTQALKMAEGKKLNVYTDSRYAFATAHIHGEIYRRRGWLTSEGKEIKNKDEILALLKALFLPKRLSIIHCPGHQKGHSAEARGNRMADQAARKAAITETPDTSTLLAGKRTADGSEFEKRTADGSEFESPKKKAKVE

SEQ ID NO: 3067 - protein, 2096 aa, synthetic construct; identical to SEQ ID NO: 2787

SEQ ID NO: 3068 - protein, 2096 aa, synthetic construct
MPAAKRVKLDGGDKKYSIGLDIGTNSVGWAVITDEYKVPSKKFKVLGNTDRHSIKKNLIGALLFDSGETAEATRLKRTARRRYTRRKNRICYLQEIFSNEMAKVDDSFFHRLEESFLVEEDKKHERHPIFGNIVDEVAYHEKYPTIYHLRKKLVDSTDKADLRLIYLALAHMIKFRGHFLIEGDLNPDNSDVDKLFIQLVQTYNQLFEENPINASGVDAKAILSARLSKSRRLENLIAQLPGEKKNGLFGNLIALSLGLTPNFKSNFDLAEDAKLQLSKDTYDDDLDNLLAQIGDQYADLFLAAKNLSDAILLSDILRVNTEITKAPLSASMIKRYDEHHQDLTLLKALVRQQLPEKYKEIFFDQSKNGYAGYIDGGASQEEFYKFIKPILEKMDGTEELLVKLNREDLLRKQRTFDNGSIPHQIHLGELHAILRRQEDFYPFLKDNREKIEKILTFRIPYYVGPLARGNSRFAWMTRKSEETITPWNFEEVVDKGASAQSFIERMTNFDKNLPNEKVLPKHSLLYEYFTVYNELTKVKYVTEGMRKPAFLSGEQKKAIVDLLFKTNRKVTVKQLKEDYFKKIECFDSVEISGVEDRFNASLGTYHDLLKIIKDKDFLDNEENEDILEDIVLTLTLFEDREMIEERLKTYAHLFDDKVMKQLKRRRYTGWGRLSRKLINGIRDKQSGKTILDFLKSDGFANRNFMQLIHDDSLTFKEDIQKAQVSGQGDSLHEHIANLAGSPAIKKGILQTVKVVDELVKVMGRHKPENIVIEMARENQTTQKGQKNSRERMKRIEEGIKELGSQILKEHPVENTQLQNEKLYLYYLQNGRDMYVDQELDINRLSDYDVDHIVPQSFLKDDSIDNKVLTRSDKARGKSDNVPSEEVVKKMKNYWRQLLNAKLITQRKFDNLTKAERGGLSELDKAGFIKRQLVETRQITKHVAQILDSRMNTKYDENDKLIREVKVITLKSKLVSDFRKDFQFYKVREINNYHHAHDAYLNAVVGTALIKKYPKLESEFVYGDYKVYDVRKMIAKSEQEIGKATAKYFFYSNIMNFFKTEITLANGEIRKRPLIETNGETGEIVWDKGRDFATVRKVLSMPQVNIVKKTEVQTGGFSKESILPKRNSDKLIARKKDWDPKKYGGFDSPTVAYSVLVVAKVEKGKSKKLKSVKELLGITIMERSSFEKNPIDFLEAKGYKEVKKDLIIKLPKYSLFELENGRKRMLASAGELQKGNELALPSKYVNFLYLASHYEKLKGSPEDNEQKQLFVEQHKHYLDEIIEQISEFSKRVILADANLDKVLSAYNKHRDKPIREQAENIIHLFTLTNLGAPAAFKYFDTTIDRKRYTSTKEVLDATLIHQSITGLYETRIDLSQLGGDGGPAPEAAAKGGGGGTLNIEDEHRLHETSKEPDVSLGSTWLSDFPQAWAETGGMGLAVRQAPLIIPLKATSTPVSIKQYPMSQEARLGIKPHIQRLLDQGILVPCQSPWNTPLLPVKKPGTNDYRPVQDLREVNKRVEDIHPTVPNPYNLLSGLPPSHQWYTVLDLKDAFFCLRLHPTSQPLFAFEWRDPEMGISGQLTWTRLPQGFKNSPTLFNEALHRDLADFRIQHPDLILLQYVDDLLLAATSELDCQQGTRALLQTLGNLGYRASAKKAQICQKQVKYLGYLLKEGQRWLTEARKETVMGQPTPKTPRQLREFLGKAGFCRLFIPGFAEMAAPLYPLTKPGTLFNWGPDQQKAYQEIKQALLTAPALGLPDLTKPFELFVDEKQGYAKGVLTQKLGPWRRPVAYLSKKLDPVAAGWPPCLRMVAAIAVLTKDAGKLTMGQPLVILAPHAVEALVKQPPDRWLSNARMTHYQALLLDTDRVQFGPVVALNPATLLPLPEEGLQHNCLDILAEAHGTRPDLTDQPLPDADHTWYTDGSSLLQEGQRKAGAAVTTETEVIWAKALPAGTSAQRAELIALTQALKMAEGKKLNVYTDSRYAFATAHIHGEIYRRRGWLTSEGKEIKNKDEILALLKALFLPKRLSIIHCPGHQKGHSAEARGNRMADQAARKAAITETPDTSTLLAGKRTADGSEFEKRTADGSEFESPKKKAKVE

SEQ ID NO: 3069 - protein, 2088 aa, synthetic construct
MPAAKRVKLDGGDKKYSIGLDIGTNSVGWAVITDEYKVPSKKFKVLGNTDRHSIKKNLIGALLFDSGETAEATRLKRTARRRYTRRKNRICYLQEIFSNEMAKVDDSFFHRLEESFLVEEDKKHERHPIFGNIVDEVAYHEKYPTIYHLRKKLVDSTDKADLRLIYLALAHMIKFRGHFLIEGDLNPDNSDVDKLFIQLVQTYNQLFEENPINASGVDAKAILSARLSKSRRLENLIAQLPGEKKNGLFGNLIALSLGLTPNFKSNFDLAEDAKLQLSKDTYDDDLDNLLAQIGDQYADLFLAAKNLSDAILLSDILRVNTEITKAPLSASMIKRYDEHHQDLTLLKALVRQQLPEKYKEIFFDQSKNGYAGYIDGGASQEEFYKFIKPILEKMDGTEELLVKLNREDLLRKQRTFDNGSIPHQIHLGELHAILRRQEDFYPFLKDNREKIEKILTFRIPYYVGPLARGNSRFAWMTRKSEETITPWNFEEVVDKGASAQSFIERMTNFDKNLPNEKVLPKHSLLYEYFTVYNELTKVKYVTEGMRKPAFLSGEQKKAIVDLLFKTNRKVTVKQLKEDYFKKIECFDSVEISGVEDRFNASLGTYHDLLKIIKDKDFLDNEENEDILEDIVLTLTLFEDREMIEERLKTYAHLFDDKVMKQLKRRRYTGWGRLSRKLINGIRDKQSGKTILDFLKSDGFANRNFMQLIHDDSLTFKEDIQKAQVSGQGDSLHEHIANLAGSPAIKKGILQTVKVVDELVKVMGRHKPENIVIEMARENQTTQKGQKNSRERMKRIEEGIKELGSQILKEHPVENTQLQNEKLYLYYLQNGRDMYVDQELDINRLSDYDVDHIVPQSFLKDDSIDNKVLTRSDKARGKSDNVPSEEVVKKMKNYWRQLLNAKLITQRKFDNLTKAERGGLSELDKAGFIKRQLVETRQITKHVAQILDSRMNTKYDENDKLIREVKVITLKSKLVSDFRKDFQFYKVREINNYHHAHDAYLNAVVGTALIKKYPKLESEFVYGDYKVYDVRKMIAKSEQEIGKATAKYFFYSNIMNFFKTEITLANGEIRKRPLIETNGETGEIVWDKGRDFATVRKVLSMPQVNIVKKTEVQTGGFSKESILPKRNSDKLIARKKDWDPKKYGGFDSPTVAYSVLVVAKVEKGKSKKLKSVKELLGITIMERSSFEKNPIDFLEAKGYKEVKKDLIIKLPKYSLFELENGRKRMLASAGELQKGNELALPSKYVNFLYLASHYEKLKGSPEDNEQKQLFVEQHKHYLDEIIEQISEFSKRVILADANLDKVLSAYNKHRDKPIREQAENIIHLFTLTNLGAPAAFKYFDTTIDRKRYTSTKEVLDATLIHQSITGLYETRIDLSQLGGDGGGSSGGTLNIEDEHRLHETSKEPDVSLGSTWLSDFPQAWAETGGMGLAVRQAPLIIPLKATSTPVSIKQYPMSQEARLGIKPHIQRLLDQGILVPCQSPWNTPLLPVKKPGTNDYRPVQDLREVNKRVEDIHPTVPNPYNLLSGLPPSHQWYTVLDLKDAFFCLRLHPTSQPLFAFEWRDPEMGISGQLTWTRLPQGFKNSPTLFNEALHRDLADFRIQHPDLILLQYVDDLLLAATSELDCQQGTRALLQTLGNLGYRASAKKAQICQKQVKYLGYLLKEGQRWLTEARKETVMGQPTPKTPRQLREFLGKAGFCRLFIPGFAEMAAPLYPLTKPGTLFNWGPDQQKAYQEIKQALLTAPALGLPDLTKPFELFVDEKQGYAKGVLTQKLGPWRRPVAYLSKKLDPVAAGWPPCLRMVAAIAVLTKDAGKLTMGQPLVILAPHAVEALVKQPPDRWLSNARMTHYQALLLDTDRVQFGPVVALNPATLLPLPEEGLQHNCLDILAEAHGTRPDLTDQPLPDADHTWYTDGSSLLQEGQRKAGAAVTTETEVIWAKALPAGTSAQRAELIALTQALKMAEGKKLNVYTDSRYAFATAHIHGEIYRRRGWLTSEGKEIKNKDEILALLKALFLPKRLSIIHCPGHQKGHSAEARGNRMADQAARKAAITETPDTSTLLAGKRTADGSEFEKRTADGSEFESPKKKAKVE

SEQ ID NO: 3070 - protein, 2094 aa, synthetic construct; identical to SEQ ID NO: 2809

SEQ ID NO: 3071 - protein, 2097 aa, synthetic construct; identical to SEQ ID NO: 2806

SEQ ID NO: 3072 - protein, 2096 aa, synthetic construct
MPAAKRVKLDGGDKKYSIGLDIGTNSVGWAVITDEYKVPSKKFKVLGNTDRHSIKKNLIGALLFDSGETAEATRLKRTARRRYTRRKNRICYLQEIFSNEMAKVDDSFFHRLEESFLVEEDKKHERHPIFGNIVDEVAYHEKYPTIYHLRKKLVDSTDKADLRLIYLALAHMIKFRGHFLIEGDLNPDNSDVDKLFIQLVQTYNQLFEENPINASGVDAKAILSARLSKSRRLENLIAQLPGEKKNGLFGNLIALSLGLTPNFKSNFDLAEDAKLQLSKDTYDDDLDNLLAQIGDQYADLFLAAKNLSDAILLSDILRVNTEITKAPLSASMIKRYDEHHQDLTLLKALVRQQLPEKYKEIFFDQSKNGYAGYIDGGASQEEFYKFIKPILEKMDGTEELLVKLNREDLLRKQRTFDNGSIPHQIHLGELHAILRRQEDFYPFLKDNREKIEKILTFRIPYYVGPLARGNSRFAWMTRKSEETITPWNFEEVVDKGASAQSFIERMTNFDKNLPNEKVLPKHSLLYEYFTVYNELTKVKYVTEGMRKPAFLSGEQKKAIVDLLFKTNRKVTVKQLKEDYFKKIECFDSVEISGVEDRFNASLGTYHDLLKIIKDKDFLDNEENEDILEDIVLTLTLFEDREMIEERLKTYAHLFDDKVMKQLKRRRYTGWGRLSRKLINGIRDKQSGKTILDFLKSDGFANRNFMQLIHDDSLTFKEDIQKAQVSGQGDSLHEHIANLAGSPAIKKGILQTVKVVDELVKVMGRHKPENIVIEMARENQTTQKGQKNSRERMKRIEEGIKELGSQILKEHPVENTQLQNEKLYLYYLQNGRDMYVDQELDINRLSDYDVDHIVPQSFLKDDSIDNKVLTRSDKARGKSDNVPSEEVVKKMKNYWRQLLNAKLITQRKFDNLTKAERGGLSELDKAGFIKRQLVETRQITKHVAQILDSRMNTKYDENDKLIREVKVITLKSKLVSDFRKDFQFYKVREINNYHHAHDAYLNAVVGTALIKKYPKLESEFVYGDYKVYDVRKMIAKSEQEIGKATAKYFFYSNIMNFFKTEITLANGEIRKRPLIETNGETGEIVWDKGRDFATVRKVLSMPQVNIVKKTEVQTGGFSKESILPKRNSDKLIARKKDWDPKKYGGFDSPTVAYSVLVVAKVEKGKSKKLKSVKELLGITIMERSSFEKNPIDFLEAKGYKEVKKDLIIKLPKYSLFELENGRKRMLASAGELQKGNELALPSKYVNFLYLASHYEKLKGSPEDNEQKQLFVEQHKHYLDEIIEQISEFSKRVILADANLDKVLSAYNKHRDKPIREQAENIIHLFTLTNLGAPAAFKYFDTTIDRKRYTSTKEVLDATLIHQSITGLYETRIDLSQLGGDGGGSSEAAAKGGGGGTLNIEDEHRLHETSKEPDVSLGSTWLSDFPQAWAETGGMGLAVRQAPLIIPLKATSTPVSIKQYPMSQEARLGIKPHIQRLLDQGILVPCQSPWNTPLLPVKKPGTNDYRPVQDLREVNKRVEDIHPTVPNPYNLLSGLPPSHQWYTVLDLKDAFFCLRLHPTSQPLFAFEWRDPEMGISGQLTWTRLPQGFKNSPTLFNEALHRDLADFRIQHPDLILLQYVDDLLLAATSELDCQQGTRALLQTLGNLGYRASAKKAQICQKQVKYLGYLLKEGQRWLTEARKETVMGQPTPKTPRQLREFLGKAGFCRLFIPGFAEMAAPLYPLTKPGTLFNWGPDQQKAYQEIKQALLTAPALGLPDLTKPFELFVDEKQGYAKGVLTQKLGPWRRPVAYLSKKLDPVAAGWPPCLRMVAAIAVLTKDAGKLTMGQPLVILAPHAVEALVKQPPDRWLSNARMTHYQALLLDTDRVQFGPVVALNPATLLPLPEEGLQHNCLDILAEAHGTRPDLTDQPLPDADHTWYTDGSSLLQEGQRKAGAAVTTETEVIWAKALPAGTSAQRAELIALTQALKMAEGKKLNVYTDSRYAFATAHIHGEIYRRRGWLTSEGKEIKNKDEILALLKALFLPKRLSIIHCPGHQKGHSAEARGNRMADQAARKAAITETPDTSTLLAGKRTADGSEFEKRTADGSEFESPKKKAKVE

SEQ ID NO: 3073 - protein, 2091 aa, synthetic construct
MPAAKRVKLDGGDKKYSIGLDIGTNSVGWAVITDEYKVPSKKFKVLGNTDRHSIKKNLIGALLFDSGETAEATRLKRTARRRYTRRKNRICYLQEIFSNEMAKVDDSFFHRLEESFLVEEDKKHERHPIFGNIVDEVAYHEKYPTIYHLRKKLVDSTDKADLRLIYLALAHMIKFRGHFLIEGDLNPDNSDVDKLFIQLVQTYNQLFEENPINASGVDAKAILSARLSKSRRLENLIAQLPGEKKNGLFGNLIALSLGLTPNFKSNFDLAEDAKLQLSKDTYDDDLDNLLAQIGDQYADLFLAAKNLSDAILLSDILRVNTEITKAPLSASMIKRYDEHHQDLTLLKALVRQQLPEKYKEIFFDQSKNGYAGYIDGGASQEEFYKFIKPILEKMDGTEELLVKLNREDLLRKQRTFDNGSIPHQIHLGELHAILRRQEDFYPFLKDNREKIEKILTFRIPYYVGPLARGNSRFAWMTRKSEETITPWNFEEVVDKGASAQSFIERMTNFDKNLPNEKVLPKHSLLYEYFTVYNELTKVKYVTEGMRKPAFLSGEQKKAIVDLLFKTNRKVTVKQLKEDYFKKIECFDSVEISGVEDRFNASLGTYHDLLKIIKDKDFLDNEENEDILEDIVLTLTLFEDREMIEERLKTYAHLFDDKVMKQLKRRRYTGWGRLSRKLINGIRDKQSGKTILDFLKSDGFANRNFMQLIHDDSLTFKEDIQKAQVSGQGDSLHEHIANLAGSPAIKKGILQTVKVVDELVKVMGRHKPENIVIEMARENQTTQKGQKNSRERMKRIEEGIKELGSQILKEHPVENTQLQNEKLYLYYLQNGRDMYVDQELDINRLSDYDVDHIVPQSFLKDDSIDNKVLTRSDKARGKSDNVPSEEVVKKMKNYWRQLLNAKLITQRKFDNLTKAERGGLSELDKAGFIKRQLVETRQITKHVAQILDSRMNTKYDENDKLIREVKVITLKSKLVSDFRKDFQFYKVREINNYHHAHDAYLNAVVGTALIKKYPKLESEFVYGDYKVYDVRKMIAKSEQEIGKATAKYFFYSNIMNFFKTEITLANGEIRKRPLIETNGETGEIVWDKGRDFATVRKVLSMPQVNIVKKTEVQTGGFSKESILPKRNSDKLIARKKDWDPKKYGGFDSPTVAYSVLVVAKVEKGKSKKLKSVKELLGITIMERSSFEKNPIDFLEAKGYKEVKKDLIIKLPKYSLFELENGRKRMLASAGELQKGNELALPSKYVNFLYLASHYEKLKGSPEDNEQKQLFVEQHKHYLDEIIEQISEFSKRVILADANLDKVLSAYNKHRDKPIREQAENIIHLFTLTNLGAPAAFKYFDTTIDRKRYTSTKEVLDATLIHQSITGLYETRIDLSQLGGDGGGGGPAPGGTLNIEDEHRLHETSKEPDVSLGSTWLSDFPQAWAETGGMGLAVRQAPLIIPLKATSTPVSIKQYPMSQEARLGIKPHIQRLLDQGILVPCQSPWNTPLLPVKKPGTNDYRPVQDLREVNKRVEDIHPTVPNPYNLLSGLPPSHQWYTVLDLKDAFFCLRLHPTSQPLFAFEWRDPEMGISGQLTWTRLPQGFKNSPTLFNEALHRDLADFRIQHPDLILLQYVDDLLLAATSELDCQQGTRALLQTLGNLGYRASAKKAQICQKQVKYLGYLLKEGQRWLTEARKETVMGQPTPKTPRQLREFLGKAGFCRLFIPGFAEMAAPLYPLTKPGTLFNWGPDQQKAYQEIKQALLTAPALGLPDLTKPFELFVDEKQGYAKGVLTQKLGPWRRPVAYLSKKLDPVAAGWPPCLRMVAAIAVLTKDAGKLTMGQPLVILAPHAVEALVKQPPDRWLSNARMTHYQALLLDTDRVQFGPVVALNPATLLPLPEEGLQHNCLDILAEAHGTRPDLTDQPLPDADHTWYTDGSSLLQEGQRKAGAAVTTETEVIWAKALPAGTSAQRAELIALTQALKMAEGKKLNVYTDSRYAFATAHIHGEIYRRRGWLTSEGKEIKNKDEILALLKALFLPKRLSIIHCPGHQKGHSAEARGNRMADQAARKAAITETPDTSTLLAGKRTADGSEFEKRTADGSEFESPKKKAKVE

SEQ ID NO: 3074 - protein, 2091 aa, synthetic construct; identical to SEQ ID NO: 2853

SEQ ID NO: 3075 - protein, 2094 aa, synthetic construct
MPAAKRVKLDGGDKKYSIGLDIGTNSVGWAVITDEYKVPSKKFKVLGNTDRHSIKKNLIGALLFDSGETAEATRLKRTARRRYTRRKNRICYLQEIFSNEMAKVDDSFFHRLEESFLVEEDKKHERHPIFGNIVDEVAYHEKYPTIYHLRKKLVDSTDKADLRLIYLALAHMIKFRGHFLIEGDLNPDNSDVDKLFIQLVQTYNQLFEENPINASGVDAKAILSARLSKSRRLENLIAQLPGEKKNGLFGNLIALSLGLTPNFKSNFDLAEDAKLQLSKDTYDDDLDNLLAQIGDQYADLFLAAKNLSDAILLSDILRVNTEITKAPLSASMIKRYDEHHQDLTLLKALVRQQLPEKYKEIFFDQSKNGYAGYIDGGASQEEFYKFIKPILEKMDGTEELLVKLNREDLLRKQRTFDNGSIPHQIHLGELHAILRRQEDFYPFLKDNREKIEKILTFRIPYYVGPLARGNSRFAWMTRKSEETITPWNFEEVVDKGASAQSFIERMTNFDKNLPNEKVLPKHSLLYEYFTVYNELTKVKYVTEGMRKPAFLSGEQKKAIVDLLFKTNRKVTVKQLKEDYFKKIECFDSVEISGVEDRFNASLGTYHDLLKIIKDKDFLDNEENEDILEDIVLTLTLFEDREMIEERLKTYAHLFDDKVMKQLKRRRYTGWGRLSRKLINGIRDKQSGKTILDFLKSDGFANRNFMQLIHDDSLTFKEDIQKAQVSGQGDSLHEHIANLAGSPAIKKGILQTVKVVDELVKVMGRHKPENIVIEMARENQTTQKGQKNSRERMKRIEEGIKELGSQILKEHPVENTQLQNEKLYLYYLQNGRDMYVDQELDINRLSDYDVDHIVPQSFLKDDSIDNKVLTRSDKARGKSDNVPSEEVVKKMKNYWRQLLNAKLITQRKFDNLTKAERGGLSELDKAGFIKRQLVETRQITKHVAQILDSRMNTKYDENDKLIREVKVITLKSKLVSDFRKDFQFYKVREINNYHHAHDAYLNAVVGTALIKKYPKLESEFVYGDYKVYDVRKMIAKSEQEIGKATAKYFFYSNIMNFFKTEITLANGEIRKRPLIETNGETGEIVWDKGRDFATVRKVLSMPQVNIVKKTEVQTGGFSKESILPKRNSDKLIARKKDWDPKKYGGFDSPTVAYSVLVVAKVEKGKSKKLKSVKELLGITIMERSSFEKNPIDFLEAKGYKEVKKDLIIKLPKYSLFELENGRKRMLASAGELQKGNELALPSKYVNFLYLASHYEKLKGSPEDNEQKQLFVEQHKHYLDEIIEQISEFSKRVILADANLDKVLSAYNKHRDKPIREQAENIIHLFTLTNLGAPAAFKYFDTTIDRKRYTSTKEVLDATLIHQSITGLYETRIDLSQLGGDGGGSSGGSPAPGGTLNIEDEHRLHETSKEPDVSLGSTWLSDFPQAWAETGGMGLAVRQAPLIIPLKATSTPVSIKQYPMSQEARLGIKPHIQRLLDQGILVPCQSPWNTPLLPVKKPGTNDYRPVQDLREVNKRVEDIHPTVPNPYNLLSGLPPSHQWYTVLDLKDAFFCLRLHPTSQPLFAFEWRDPEMGISGQLTWTRLPQGFKNSPTLFNEALHRDLADFRIQHPDLILLQYVDDLLLAATSELDCQQGTRALLQTLGNLGYRASAKKAQICQKQVKYLGYLLKEGQRWLTEARKETVMGQPTPKTPRQLREFLGKAGFCRLFIPGFAEMAAPLYPLTKPGTLFNWGPDQQKAYQEIKQALLTAPALGLPDLTKPFELFVDEKQGYAKGVLTQKLGPWRRPVAYLSKKLDPVAAGWPPCLRMVAAIAVLTKDAGKLTMGQPLVILAPHAVEALVKQPPDRWLSNARMTHYQALLLDTDRVQFGPVVALNPATLLPLPEEGLQHNCLDILAEAHGTRPDLTDQPLPDADHTWYTDGSSLLQEGQRKAGAAVTTETEVIWAKALPAGTSAQRAELIALTQALKMAEGKKLNVYTDSRYAFATAHIHGEIYRRRGWLTSEGKEIKNKDEILALLKALFLPKRLSIIHCPGHQKGHSAEARGNRMADQAARKAAITETPDTSTLLAGKRTADGSEFEKRTADGSEFESPKKKAKVE

SEQ ID NO: 3076 - protein, 2091 aa, synthetic construct; identical to SEQ ID NO: 2780

SEQ ID NO: 3077 - protein, 2101 aa, synthetic construct; identical to SEQ ID NO: 2858

SEQ ID NO: 3078 - protein, 2093 aa, synthetic construct; identical to SEQ ID NO: 2821

SEQ ID NO: 3079 - protein, 2100 aa, synthetic construct; identical to SEQ ID NO: 2788

SEQ ID NO: 3080 - protein, 2096 aa, synthetic construct
MPAAKRVKLDGGDKKYSIGLDIGTNSVGWAVITDEYKVPSKKFKVLGNTDRHSIKKNLIGALLFDSGETAEATRLKRTARRRYTRRKNRICYLQEIFSNEMAKVDDSFFHRLEESFLVEEDKKHERHPIFGNIVDEVAYHEKYPTIYHLRKKLVDSTDKADLRLIYLALAHMIKFRGHFLIEGDLNPDNSDVDKLFIQLVQTYNQLFEENPINASGVDAKAILSARLSKSRRLENLIAQLPGEKKNGLFGNLIALSLGLTPNFKSNFDLAEDAKLQLSKDTYDDDLDNLLAQIGDQYADLFLAAKNLSDAILLSDILRVNTEITKAPLSASMIKRYDEHHQDLTLLKALVRQQLPEKYKEIFFDQSKNGYAGYIDGGASQEEFYKFIKPILEKMDGTEELLVKLNREDLLRKQRTFDNGSIPHQIHLGELHAILRRQEDFYPFLKDNREKIEKILTFRIPYYVGPLARGNSRFAWMTRKSEETITPWNFEEVVDKGASAQSFIERMTNFDKNLPNEKVLPKHSLLYEYFTVYNELTKVKYVTEGMRKPAFLSGEQKKAIVDLLFKTNRKVTVKQLKEDYFKKIECFDSVEISGVEDRFNASLGTYHDLLKIIKDKDFLDNEENEDILEDIVLTLTLFEDREMIEERLKTYAHLFDDKVMKQLKRRRYTGWGRLSRKLINGIRDKQSGKTILDFLKSDGFANRNFMQLIHDDSLTFKEDIQKAQVSGQGDSLHEHIANLAGSPAIKKGILQTVKVVDELVKVMGRHKPENIVIEMARENQTTQKGQKNSRERMKRIEEGIKELGSQILKEHPVENTQLQNEKLYLYYLQNGRDMYVDQELDINRLSDYDVDHIVPQSFLKDDSIDNKVLTRSDKARGKSDNVPSEEVVKKMKNYWRQLLNAKLITQRKFDNLTKAERGGLSELDKAGFIKRQLVETRQITKHVAQILDSRMNTKYDENDKLIREVKVITLKSKLVSDFRKDFQFYKVREINNYHHAHDAYLNAVVGTALIKKYPKLESEFVYGDYKVYDVRKMIAKSEQEIGKATAKYFFYSNIMNFFKTEITLANGEIRKRPLIETNGETGEIVWDKGRDFATVRKVLSMPQVNIVKKTEVQTGGFSKESILPKRNSDKLIARKKDWDPKKYGGFDSPTVAYSVLVVAKVEKGKSKKLKSVKELLGITIMERSSFEKNPIDFLEAKGYKEVKKDLIIKLPKYSLFELENGRKRMLASAGELQKGNELALPSKYVNFLYLASHYEKLKGSPEDNEQKQLFVEQHKHYLDEIIEQISEFSKRVILADANLDKVLSAYNKHRDKPIREQAENIIHLFTLTNLGAPAAFKYFDTTIDRKRYTSTKEVLDATLIHQSITGLYETRIDLSQLGGDGGEAAAKPAPGGSGGTLNIEDEHRLHETSKEPDVSLGSTWLSDFPQAWAETGGMGLAVRQAPLIIPLKATSTPVSIKQYPMSQEARLGIKPHIQRLLDQGILVPCQSPWNTPLLPVKKPGTNDYRPVQDLREVNKRVEDIHPTVPNPYNLLSGLPPSHQWYTVLDLKDAFFCLRLHPTSQPLFAFEWRDPEMGISGQLTWTRLPQGFKNSPTLFNEALHRDLADFRIQHPDLILLQYVDDLLLAATSELDCQQGTRALLQTLGNLGYRASAKKAQICQKQVKYLGYLLKEGQRWLTEARKETVMGQPTPKTPRQLREFLGKAGFCRLFIPGFAEMAAPLYPLTKPGTLFNWGPDQQKAYQEIKQALLTAPALGLPDLTKPFELFVDEKQGYAKGVLTQKLGPWRRPVAYLSKKLDPVAAGWPPCLRMVAAIAVLTKDAGKLTMGQPLVILAPHAVEALVKQPPDRWLSNARMTHYQALLLDTDRVQFGPVVALNPATLLPLPEEGLQHNCLDILAEAHGTRPDLTDQPLPDADHTWYTDGSSLLQEGQRKAGAAVTTETEVIWAKALPAGTSAQRAELIALTQALKMAEGKKLNVYTDSRYAFATAHIHGEIYRRRGWLTSEGKEIKNKDEILALLKALFLPKRLSIIHCPGHQKGHSAEARGNRMADQAARKAAITETPDTSTLLAGKRTADGSEFEKRTADGSEFESPKKKAKVE

SEQ ID NO: 3081 - protein, 2115 aa, synthetic construct; identical to SEQ ID NO: 2827

SEQ ID NO: 3082 - protein, 2093 aa, synthetic construct; identical to SEQ ID NO: 2856

SEQ ID NO: 3083 - protein, 2096 aa, synthetic construct; identical to SEQ ID NO: 2786

SEQ ID NO: 3084 - protein, 2098 aa, synthetic construct; identical to SEQ ID NO: 2797

SEQ ID NO: 3085 - protein, 2096 aa, synthetic construct; identical to SEQ ID NO: 2830

SEQ ID NO: 3086 - protein, 2094 aa, synthetic construct
MPAAKRVKLDGGDKKYSIGLDIGTNSVGWAVITDEYKVPSKKFKVLGNTDRHSIKKNLIGALLFDSGETAEATRLKRTARRRYTRRKNRICYLQEIFSNEMAKVDDSFFHRLEESFLVEEDKKHERHPIFGNIVDEVAYHEKYPTIYHLRKKLVDSTDKADLRLIYLALAHMIKFRGHFLIEGDLNPDNSDVDKLFIQLVQTYNQLFEENPINASGVDAKAILSARLSKSRRLENLIAQLPGEKKNGLFGNLIALSLGLTPNFKSNFDLAEDAKLQLSKDTYDDDLDNLLAQIGDQYADLFLAAKNLSDAILLSDILRVNTEITKAPLSASMIKRYDEHHQDLTLLKALVRQQLPEKYKEIFFDQSKNGYAGYIDGGASQEEFYKFIKPILEKMDGTEELLVKLNREDLLRKQRTFDNGSIPHQIHLGELHAILRRQEDFYPFLKDNREKIEKILTFRIPYYVGPLARGNSRFAWMTRKSEETITPWNFEEVVDKGASAQSFIERMTNFDKNLPNEKVLPKHSLLYEYFTVYNELTKVKYVTEGMRKPAFLSGEQKKAIVDLLFKTNRKVTVKQLKEDYFKKIECFDSVEISGVEDRFNASLGTYHDLLKIIKDKDFLDNEENEDILEDIVLTLTLFEDREMIEERLKTYAHLFDDKVMKQLKRRRYTGWGRLSRKLINGIRDKQSGKTILDFLKSDGFANRNFMQLIHDDSLTFKEDIQKAQVSGQGDSLHEHIANLAGSPAIKKGILQTVKVVDELVKVMGRHKPENIVIEMARENQTTQKGQKNSRERMKRIEEGIKELGSQILKEHPVENTQLQNEKLYLYYLQNGRDMYVDQELDINRLSDYDVDHIVPQSFLKDDSIDNKVLTRSDKARGKSDNVPSEEVVKKMKNYWRQLLNAKLITQRKFDNLTKAERGGLSELDKAGFIKRQLVETRQITKHVAQILDSRMNTKYDENDKLIREVKVITLKSKLVSDFRKDFQFYKVREINNYHHAHDAYLNAVVGTALIKKYPKLESEFVYGDYKVYDVRKMIAKSEQEIGKATAKYFFYSNIMNFFKTEITLANGEIRKRPLIETNGETGEIVWDKGRDFATVRKVLSMPQVNIVKKTEVQTGGFSKESILPKRNSDKLIARKKDWDPKKYGGFDSPTVAYSVLVVAKVEKGKSKKLKSVKELLGITIMERSSFEKNPIDFLEAKGYKEVKKDLIIKLPKYSLFELENGRKRMLASAGELQKGNELALPSKYVNFLYLASHYEKLKGSPEDNEQKQLFVEQHKHYLDEIIEQISEFSKRVILADANLDKVLSAYNKHRDKPIREQAENIIHLFTLTNLGAPAAFKYFDTTIDRKRYTSTKEVLDATLIHQSITGLYETRIDLSQLGGDGGPAPAPAPAPGGTLNIEDEHRLHETSKEPDVSLGSTWLSDFPQAWAETGGMGLAVRQAPLIIPLKATSTPVSIKQYPMSQEARLGIKPHIQRLLDQGILVPCQSPWNTPLLPVKKPGTNDYRPVQDLREVNKRVEDIHPTVPNPYNLLSGLPPSHQWYTVLDLKDAFFCLRLHPTSQPLFAFEWRDPEMGISGQLTWTRLPQGFKNSPTLFNEALHRDLADFRIQHPDLILLQYVDDLLLAATSELDCQQGTRALLQTLGNLGYRASAKKAQICQKQVKYLGYLLKEGQRWLTEARKETVMGQPTPKTPRQLREFLGKAGFCRLFIPGFAEMAAPLYPLTKPGTLFNWGPDQQKAYQEIKQALLTAPALGLPDLTKPFELFVDEKQGYAKGVLTQKLGPWRRPVAYLSKKLDPVAAGWPPCLRMVAAIAVLTKDAGKLTMGQPLVILAPHAVEALVKQPPDRWLSNARMTHYQALLLDTDRVQFGPVVALNPATLLPLPEEGLQHNCLDILAEAHGTRPDLTDQPLPDADHTWYTDGSSLLQEGQRKAGAAVTTETEVIWAKALPAGTSAQRAELIALTQALKMAEGKKLNVYTDSRYAFATAHIHGEIYRRRGWLTSEGKEIKNKDEILALLKALFLPKRLSIIHCPGHQKGHSAEARGNRMADQAARKAAITETPDTSTLLAGKRTADGSEFEKRTADGSEFESPKKKAKVE

SEQ ID NO: 3087 - protein, 2091 aa, synthetic construct; identical to SEQ ID NO: 2808

SEQ ID NO: 3088 - protein, 2096 aa, synthetic construct; identical to SEQ ID NO: 2857

SEQ ID NO: 3089 - protein, 2091 aa, synthetic construct; identical to SEQ ID NO: 2855

SEQ ID NO: 3090 - protein, 2094 aa, synthetic construct; identical to SEQ ID NO: 2847

SEQ ID NO: 3091 - protein, 2096 aa, synthetic construct; identical to SEQ ID NO: 2798

SEQ ID NO: 3092 - protein, 2100 aa, synthetic construct; identical to SEQ ID NO: 2819

SEQ ID NO: 3093 - protein, 2094 aa, synthetic construct; identical to SEQ ID NO: 2835

SEQ ID NO: 3094 - protein, 2089 aa, synthetic construct
MPAAKRVKLDGGDKKYSIGLDIGTNSVGWAVITDEYKVPSKKFKVLGNTDRHSIKKNLIGALLFDSGETAEATRLKRTARRRYTRRKNRICYLQEIFSNEMAKVDDSFFHRLEESFLVEEDKKHERHPIFGNIVDEVAYHEKYPTIYHLRKKLVDSTDKADLRLIYLALAHMIKFRGHFLIEGDLNPDNSDVDKLFIQLVQTYNQLFEENPINASGVDAKAILSARLSKSRRLENLIAQLPGEKKNGLFGNLIALSLGLTPNFKSNFDLAEDAKLQLSKDTYDDDLDNLLAQIGDQYADLFLAAKNLSDAILLSDILRVNTEITKAPLSASMIKRYDEHHQDLTLLKALVRQQLPEKYKEIFFDQSKNGYAGYIDGGASQEEFYKFIKPILEKMDGTEELLVKLNREDLLRKQRTFDNGSIPHQIHLGELHAILRRQEDFYPFLKDNREKIEKILTFRIPYYVGPLARGNSRFAWMTRKSEETITPWNFEEVVDKGASAQSFIERMTNFDKNLPNEKVLPKHSLLYEYFTVYNELTKVKYVTEGMRKPAFLSGEQKKAIVDLLFKTNRKVTVKQLKEDYFKKIECFDSVEISGVEDRFNASLGTYHDLLKIIKDKDFLDNEENEDILEDIVLTLTLFEDREMIEERLKTYAHLFDDKVMKQLKRRRYTGWGRLSRKLINGIRDKQSGKTILDFLKSDGFANRNFMQLIHDDSLTFKEDIQKAQVSGQGDSLHEHIANLAGSPAIKKGILQTVKVVDELVKVMGRHKPENIVIEMARENQTTQKGQKNSRERMKRIEEGIKELGSQILKEHPVENTQLQNEKLYLYYLQNGRDMYVDQELDINRLSDYDVDHIVPQSFLKDDSIDNKVLTRSDKARGKSDNVPSEEVVKKMKNYWRQLLNAKLITQRKFDNLTKAERGGLSELDKAGFIKRQLVETRQITKHVAQILDSRMNTKYDENDKLIREVKVITLKSKLVSDFRKDFQFYKVREINNYHHAHDAYLNAVVGTALIKKYPKLESEFVYGDYKVYDVRKMIAKSEQEIGKATAKYFFYSNIMNFFKTEITLANGEIRKRPLIETNGETGEIVWDKGRDFATVRKVLSMPQVNIVKKTEVQTGGFSKESILPKRNSDKLIARKKDWDPKKYGGFDSPTVAYSVLVVAKVEKGKSKKLKSVKELLGITIMERSSFEKNPIDFLEAKGYKEVKKDLIIKLPKYSLFELENGRKRMLASAGELQKGNELALPSKYVNFLYLASHYEKLKGSPEDNEQKQLFVEQHKHYLDEIIEQISEFSKRVILADANLDKVLSAYNKHRDKPIREQAENIIHLFTLTNLGAPAAFKYFDTTIDRKRYTSTKEVLDATLIHQSITGLYETRIDLSQLGGDGGGGGGGGTLNIEDEHRLHETSKEPDVSLGSTWLSDFPQAWAETGGMGLAVRQAPLIIPLKATSTPVSIKQYPMSQEARLGIKPHIQRLLDQGILVPCQSPWNTPLLPVKKPGTNDYRPVQDLREVNKRVEDIHPTVPNPYNLLSGLPPSHQWYTVLDLKDAFFCLRLHPTSQPLFAFEWRDPEMGISGQLTWTRLPQGFKNSPTLFNEALHRDLADFRIQHPDLILLQYVDDLLLAATSELDCQQGTRALLQTLGNLGYRASAKKAQICQKQVKYLGYLLKEGQRWLTEARKETVMGQPTPKTPRQLREFLGKAGFCRLFIPGFAEMAAPLYPLTKPGTLFNWGPDQQKAYQEIKQALLTAPALGLPDLTKPFELFVDEKQGYAKGVLTQKLGPWRRPVAYLSKKLDPVAAGWPPCLRMVAAIAVLTKDAGKLTMGQPLVILAPHAVEALVKQPPDRWLSNARMTHYQALLLDTDRVQFGPVVALNPATLLPLPEEGLQHNCLDILAEAHGTRPDLTDQPLPDADHTWYTDGSSLLQEGQRKAGAAVTTETEVIWAKALPAGTSAQRAELIALTQALKMAEGKKLNVYTDSRYAFATAHIHGEIYRRRGWLTSEGKEIKNKDEILALLKALFLPKRLSIIHCPGHQKGHSAEARGNRMADQAARKAAITETPDTSTLLAGKRTADGSEFEKRTADGSEFESPKKKAKVE

SEQ ID NO: 3095 - protein, 2088 aa, synthetic construct
MPAAKRVKLDGGDKKYSIGLDIGTNSVGWAVITDEYKVPSKKFKVLGNTDRHSIKKNLIGALLFDSGETAEATRLKRTARRRYTRRKNRICYLQEIFSNEMAKVDDSFFHRLEESFLVEEDKKHERHPIFGNIVDEVAYHEKYPTIYHLRKKLVDSTDKADLRLIYLALAHMIKFRGHFLIEGDLNPDNSDVDKLFIQLVQTYNQLFEENPINASGVDAKAILSARLSKSRRLENLIAQLPGEKKNGLFGNLIALSLGLTPNFKSNFDLAEDAKLQLSKDTYDDDLDNLLAQIGDQYADLFLAAKNLSDAILLSDILRVNTEITKAPLSASMIKRYDEHHQDLTLLKALVRQQLPEKYKEIFFDQSKNGYAGYIDGGASQEEFYKFIKPILEKMDGTEELLVKLNREDLLRKQRTFDNGSIPHQIHLGELHAILRRQEDFYPFLKDNREKIEKILTFRIPYYVGPLARGNSRFAWMTRKSEETITPWNFEEVVDKGASAQSFIERMTNFDKNLPNEKVLPKHSLLYEYFTVYNELTKVKYVTEGMRKPAFLSGEQKKAIVDLLFKTNRKVTVKQLKEDYFKKIECFDSVEISGVEDRFNASLGTYHDLLKIIKDKDFLDNEENEDILEDIVLTLTLFEDREMIEERLKTYAHLFDDKVMKQLKRRRYTGWGRLSRKLINGIRDKQSGKTILDFLKSDGFANRNFMQLIHDDSLTFKEDIQKAQVSGQGDSLHEHIANLAGSPAIKKGILQTVKVVDELVKVMGRHKPENIVIEMARENQTTQKGQKNSRERMKRIEEGIKELGSQILKEHPVENTQLQNEKLYLYYLQNGRDMYVDQELDINRLSDYDVDHIVPQSFLKDDSIDNKVLTRSDKARGKSDNVPSEEVVKKMKNYWRQLLNAKLITQRKFDNLTKAERGGLSELDKAGFIKRQLVETRQITKHVAQILDSRMNTKYDENDKLIREVKVITLKSKLVSDFRKDFQFYKVREINNYHHAHDAYLNAVVGTALIKKYPKLESEFVYGDYKVYDVRKMIAKSEQEIGKATAKYFFYSNIMNFFKTEITLANGEIRKRPLIETNGETGEIVWDKGRDFATVRKVLSMPQVNIVKKTEVQTGGFSKESILPKRNSDKLIARKKDWDPKKYGGFDSPTVAYSVLVVAKVEKGKSKKLKSVKELLGITIMERSSFEKNPIDFLEAKGYKEVKKDLIIKLPKYSLFELENGRKRMLASAGELQKGNELALPSKYVNFLYLASHYEKLKGSPEDNEQKQLFVEQHKHYLDEIIEQISEFSKRVILADANLDKVLSAYNKHRDKPIREQAENIIHLFTLTNLGAPAAFKYFDTTIDRKRYTSTKEVLDATLIHQSITGLYETRIDLSQLGGDGGGGSGGTLNIEDEHRLHETSKEPDVSLGSTWLSDFPQAWAETGGMGLAVRQAPLIIPLKATSTPVSIKQYPMSQEARLGIKPHIQRLLDQGILVPCQSPWNTPLLPVKKPGTNDYRPVQDLREVNKRVEDIHPTVPNPYNLLSGLPPSHQWYTVLDLKDAFFCLRLHPTSQPLFAFEWRDPEMGISGQLTWTRLPQGFKNSPTLFNEALHRDLADFRIQHPDLILLQYVDDLLLAATSELDCQQGTRALLQTLGNLGYRASAKKAQICQKQVKYLGYLLKEGQRWLTEARKETVMGQPTPKTPRQLREFLGKAGFCRLFIPGFAEMAAPLYPLTKPGTLFNWGPDQQKAYQEIKQALLTAPALGLPDLTKPFELFVDEKQGYAKGVLTQKLGPWRRPVAYLSKKLDPVAAGWPPCLRMVAAIAVLTKDAGKLTMGQPLVILAPHAVEALVKQPPDRWLSNARMTHYQALLLDTDRVQFGPVVALNPATLLPLPEEGLQHNCLDILAEAHGTRPDLTDQPLPDADHTWYTDGSSLLQEGQRKAGAAVTTETEVIWAKALPAGTSAQRAELIALTQALKMAEGKKLNVYTDSRYAFATAHIHGEIYRRRGWLTSEGKEIKNKDEILALLKALFLPKRLSIIHCPGHQKGHSAEARGNRMADQAARKAAITETPDTSTLLAGKRTADGSEFEKRTADGSEFESPKKKAKVE

SEQ ID NO: 3096 - protein, 2092 aa, synthetic construct; identical to SEQ ID NO: 2790

SEQ ID NO: 3097 - protein, 2093 aa, synthetic construct; identical to SEQ ID NO: 2849

SEQ ID NO: 3098 - protein, 2094 aa, synthetic construct; identical to SEQ ID NO: 2793

SEQ ID NO: 3099 - protein, 2100 aa, synthetic construct; identical to SEQ ID NO: 2836

SEQ ID NO: 3100 - protein, 2092 aa, synthetic construct
MPAAKRVKLDGGDKKYSIGLDIGTNSVGWAVITDEYKVPSKKFKVLGNTDRHSIKKNLIGALLFDSGETAEATRLKRTARRRYTRRKNRICYLQEIFSNEMAKVDDSFFHRLEESFLVEEDKKHERHPIFGNIVDEVAYHEKYPTIYHLRKKLVDSTDKADLRLIYLALAHMIKFRGHFLIEGDLNPDNSDVDKLFIQLVQTYNQLFEENPINASGVDAKAILSARLSKSRRLENLIAQLPGEKKNGLFGNLIALSLGLTPNFKSNFDLAEDAKLQLSKDTYDDDLDNLLAQIGDQYADLFLAAKNLSDAILLSDILRVNTEITKAPLSASMIKRYDEHHQDLTLLKALVRQQLPEKYKEIFFDQSKNGYAGYIDGGASQEEFYKFIKPILEKMDGTEELLVKLNREDLLRKQRTFDNGSIPHQIHLGELHAILRRQEDFYPFLKDNREKIEKILTFRIPYYVGPLARGNSRFAWMTRKSEETITPWNFEEVVDKGASAQSFIERMTNFDKNLPNEKVLPKHSLLYEYFTVYNELTKVKYVTEGMRKPAFLSGEQKKAIVDLLFKTNRKVTVKQLKEDYFKKIECFDSVEISGVEDRFNASLGTYHDLLKIIKDKDFLDNEENEDILEDIVLTLTLFEDREMIEERLKTYAHLFDDKVMKQLKRRRYTGWGRLSRKLINGIRDKQSGKTILDFLKSDGFANRNFMQLIHDDSLTFKEDIQKAQVSGQGDSLHEHIANLAGSPAIKKGILQTVKVVDELVKVMGRHKPENIVIEMARENQTTQKGQKNSRERMKRIEEGIKELGSQILKEHPVENTQLQNEKLYLYYLQNGRDMYVDQELDINRLSDYDVDHIVPQSFLKDDSIDNKVLTRSDKARGKSDNVPSEEVVKKMKNYWRQLLNAKLITQRKFDNLTKAERGGLSELDKAGFIKRQLVETRQITKHVAQILDSRMNTKYDENDKLIREVKVITLKSKLVSDFRKDFQFYKVREINNYHHAHDAYLNAVVGTALIKKYPKLESEFVYGDYKVYDVRKMIAKSEQEIGKATAKYFFYSNIMNFFKTEITLANGEIRKRPLIETNGETGEIVWDKGRDFATVRKVLSMPQVNIVKKTEVQTGGFSKESILPKRNSDKLIARKKDWDPKKYGGFDSPTVAYSVLVVAKVEKGKSKKLKSVKELLGITIMERSSFEKNPIDFLEAKGYKEVKKDLIIKLPKYSLFELENGRKRMLASAGELQKGNELALPSKYVNFLYLASHYEKLKGSPEDNEQKQLFVEQHKHYLDEIIEQISEFSKRVILADANLDKVLSAYNKHRDKPIREQAENIIHLFTLTNLGAPAAFKYFDTTIDRKRYTSTKEVLDATLIHQSITGLYETRIDLSQLGGDGGPAPAPAPGGTLNIEDEHRLHETSKEPDVSLGSTWLSDFPQAWAETGGMGLAVRQAPLIIPLKATSTPVSIKQYPMSQEARLGIKPHIQRLLDQGILVPCQSPWNTPLLPVKKPGTNDYRPVQDLREVNKRVEDIHPTVPNPYNLLSGLPPSHQWYTVLDLKDAFFCLRLHPTSQPLFAFEWRDPEMGISGQLTWTRLPQGFKNSPTLFNEALHRDLADFRIQHPDLILLQYVDDLLLAATSELDCQQGTRALLQTLGNLGYRASAKKAQICQKQVKYLGYLLKEGQRWLTEARKETVMGQPTPKTPRQLREFLGKAGFCRLFIPGFAEMAAPLYPLTKPGTLFNWGPDQQKAYQEIKQALLTAPALGLPDLTKPFELFVDEKQGYAKGVLTQKLGPWRRPVAYLSKKLDPVAAGWPPCLRMVAAIAVLTKDAGKLTMGQPLVILAPHAVEALVKQPPDRWLSNARMTHYQALLLDTDRVQFGPVVALNPATLLPLPEEGLQHNCLDILAEAHGTRPDLTDQPLPDADHTWYTDGSSLLQEGQRKAGAAVTTETEVIWAKALPAGTSAQRAELIALTQALKMAEGKKLNVYTDSRYAFATAHIHGEIYRRRGWLTSEGKEIKNKDEILALLKALFLPKRLSIIHCPGHQKGHSAEARGNRMADQAARKAAITETPDTSTLLAGKRTADGSEFEKRTADGSEFESPKKKAKVE

SEQ ID NO: 3101 - protein, 2094 aa, synthetic construct; identical to SEQ ID NO: 2846

SEQ ID NO: 3102 - protein, 2096 aa, synthetic construct; identical to SEQ ID NO: 2842

SEQ ID NO: 3103 - protein, 2096 aa, synthetic construct; identical to SEQ ID NO: 2815

SEQ ID NO: 3104 - protein, 2096 aa, synthetic construct
MPAAKRVKLDGGDKKYSIGLDIGTNSVGWAVITDEYKVPSKKFKVLGNTDRHSIKKNLIGALLFDSGETAEATRLKRTARRRYTRRKNRICYLQEIFSNEMAKVDDSFFHRLEESFLVEEDKKHERHPIFGNIVDEVAYHEKYPTIYHLRKKLVDSTDKADLRLIYLALAHMIKFRGHFLIEGDLNPDNSDVDKLFIQLVQTYNQLFEENPINASGVDAKAILSARLSKSRRLENLIAQLPGEKKNGLFGNLIALSLGLTPNFKSNFDLAEDAKLQLSKDTYDDDLDNLLAQIGDQYADLFLAAKNLSDAILLSDILRVNTEITKAPLSASMIKRYDEHHQDLTLLKALVRQQLPEKYKEIFFDQSKNGYAGYIDGGASQEEFYKFIKPILEKMDGTEELLVKLNREDLLRKQRTFDNGSIPHQIHLGELHAILRRQEDFYPFLKDNREKIEKILTFRIPYYVGPLARGNSRFAWMTRKSEETITPWNFEEVVDKGASAQSFIERMTNFDKNLPNEKVLPKHSLLYEYFTVYNELTKVKYVTEGMRKPAFLSGEQKKAIVDLLFKTNRKVTVKQLKEDYFKKIECFDSVEISGVEDRFNASLGTYHDLLKIIKDKDFLDNEENEDILEDIVLTLTLFEDREMIEERLKTYAHLFDDKVMKQLKRRRYTGWGRLSRKLINGIRDKQSGKTILDFLKSDGFANRNFMQLIHDDSLTFKEDIQKAQVSGQGDSLHEHIANLAGSPAIKKGILQTVKVVDELVKVMGRHKPENIVIEMARENQTTQKGQKNSRERMKRIEEGIKELGSQILKEHPVENTQLQNEKLYLYYLQNGRDMYVDQELDINRLSDYDVDHIVPQSFLKDDSIDNKVLTRSDKARGKSDNVPSEEVVKKMKNYWRQLLNAKLITQRKFDNLTKAERGGLSELDKAGFIKRQLVETRQITKHVAQILDSRMNTKYDENDKLIREVKVITLKSKLVSDFRKDFQFYKVREINNYHHAHDAYLNAVVGTALIKKYPKLESEFVYGDYKVYDVRKMIAKSEQEIGKATAKYFFYSNIMNFFKTEITLANGEIRKRPLIETNGETGEIVWDKGRDFATVRKVLSMPQVNIVKKTEVQTGGFSKESILPKRNSDKLIARKKDWDPKKYGGFDSPTVAYSVLVVAKVEKGKSKKLKSVKELLGITIMERSSFEKNPIDFLEAKGYKEVKKDLIIKLPKYSLFELENGRKRMLASAGELQKGNELALPSKYVNFLYLASHYEKLKGSPEDNEQKQLFVEQHKHYLDEIIEQISEFSKRVILADANLDKVLSAYNKHRDKPIREQAENIIHLFTLTNLGAPAAFKYFDTTIDRKRYTSTKEVLDATLIHQSITGLYETRIDLSQLGGDGGPAPEAAAKGSSGGTLNIEDEHRLHETSKEPDVSLGSTWLSDFPQAWAETGGMGLAVRQAPLIIPLKATSTPVSIKQYPMSQEARLGIKPHIQRLLDQGILVPCQSPWNTPLLPVKKPGTNDYRPVQDLREVNKRVEDIHPTVPNPYNLLSGLPPSHQWYTVLDLKDAFFCLRLHPTSQPLFAFEWRDPEMGISGQLTWTRLPQGFKNSPTLFNEALHRDLADFRIQHPDLILLQYVDDLLLAATSELDCQQGTRALLQTLGNLGYRASAKKAQICQKQVKYLGYLLKEGQRWLTEARKETVMGQPTPKTPRQLREFLGKAGFCRLFIPGFAEMAAPLYPLTKPGTLFNWGPDQQKAYQEIKQALLTAPALGLPDLTKPFELFVDEKQGYAKGVLTQKLGPWRRPVAYLSKKLDPVAAGWPPCLRMVAAIAVLTKDAGKLTMGQPLVILAPHAVEALVKQPPDRWLSNARMTHYQALLLDTDRVQFGPVVALNPATLLPLPEEGLQHNCLDILAEAHGTRPDLTDQPLPDADHTWYTDGSSLLQEGQRKAGAAVTTETEVIWAKALPAGTSAQRAELIALTQALKMAEGKKLNVYTDSRYAFATAHIHGEIYRRRGWLTSEGKEIKNKDEILALLKALFLPKRLSIIHCPGHQKGHSAEARGNRMADQAARKAAITETPDTSTLLAGKRTADGSEFEKRTADGSEFESPKKKAKVE

SEQ ID NO: 3105 - protein, 2096 aa, synthetic construct
MPAAKRVKLDGGDKKYSIGLDIGTNSVGWAVITDEYKVPSKKFKVLGNTDRHSIKKNLIGALLFDSGETAEATRLKRTARRRYTRRKNRICYLQEIFSNEMAKVDDSFFHRLEESFLVEEDKKHERHPIFGNIVDEVAYHEKYPTIYHLRKKLVDSTDKADLRLIYLALAHMIKFRGHFLIEGDLNPDNSDVDKLFIQLVQTYNQLFEENPINASGVDAKAILSARLSKSRRLENLIAQLPGEKKNGLFGNLIALSLGLTPNFKSNFDLAEDAKLQLSKDTYDDDLDNLLAQIGDQYADLFLAAKNLSDAILLSDILRVNTEITKAPLSASMIKRYDEHHQDLTLLKALVRQQLPEKYKEIFFDQSKNGYAGYIDGGASQEEFYKFIKPILEKMDGTEELLVKLNREDLLRKQRTFDNGSIPHQIHLGELHAILRRQEDFYPFLKDNREKIEKILTFRIPYYVGPLARGNSRFAWMTRKSEETITPWNFEEVVDKGASAQSFIERMTNFDKNLPNEKVLPKHSLLYEYFTVYNELTKVKYVTEGMRKPAFLSGEQKKAIVDLLFKTNRKVTVKQLKEDYFKKIECFDSVEISGVEDRFNASLGTYHDLLKIIKDKDFLDNEENEDILEDIVLTLTLFEDREMIEERLKTYAHLFDDKVMKQLKRRRYTGWGRLSRKLINGIRDKQSGKTILDFLKSDGFANRNFMQLIHDDSLTFKEDIQKAQVSGQGDSLHEHIANLAGSPAIKKGILQTVKVVDELVKVMGRHKPENIVIEMARENQTTQKGQKNSRERMKRIEEGIKELGSQILKEHPVENTQLQNEKLYLYYLQNGRDMYVDQELDINRLSDYDVDHIVPQSFLKDDSIDNKVLTRSDKARGKSDNVPSEEVVKKMKNYWRQLLNAKLITQRKFDNLTKAERGGLSELDKAGFIKRQLVETRQITKHVAQILDSRMNTKYDENDKLIREVKVITLKSKLVSDFRKDFQFYKVREINNYHHAHDAYLNAVVGTALIKKYPKLESEFVYGDYKVYDVRKMIAKSEQEIGKATAKYFFYSNIMNFFKTEITLANGEIRKRPLIETNGETGEIVWDKGRDFATVRKVLSMPQVNIVKKTEVQTGGFSKESILPKRNSDKLIARKKDWDPKKYGGFDSPTVAYSVLVVAKVEKGKSKKLKSVKELLGITIMERSSFEKNPIDFLEAKGYKEVKKDLIIKLPKYSLFELENGRKRMLASAGELQKGNELALPSKYVNFLYLASHYEKLKGSPEDNEQKQLFVEQHKHYLDEIIEQISEFSKRVILADANLDKVLSAYNKHRDKPIREQAENIIHLFTLTNLGAPAAFKYFDTTIDRKRYTSTKEVLDATLIHQSITGLYETRIDLSQLGGDGGGSSEAAAKPAPGGTLNIEDEHRLHETSKEPDVSLGSTWLSDFPQAWAETGGMGLAVRQAPLIIPLKATSTPVSIKQYPMSQEARLGIKPHIQRLLDQGILVPCQSPWNTPLLPVKKPGTNDYRPVQDLREVNKRVEDIHPTVPNPYNLLSGLPPSHQWYTVLDLKDAFFCLRLHPTSQPLFAFEWRDPEMGISGQLTWTRLPQGFKNSPTLFNEALHRDLADFRIQHPDLILLQYVDDLLLAATSELDCQQGTRALLQTLGNLGYRASAKKAQICQKQVKYLGYLLKEGQRWLTEARKETVMGQPTPKTPRQLREFLGKAGFCRLFIPGFAEMAAPLYPLTKPGTLFNWGPDQQKAYQEIKQALLTAPALGLPDLTKPFELFVDEKQGYAKGVLTQKLGPWRRPVAYLSKKLDPVAAGWPPCLRMVAAIAVLTKDAGKLTMGQPLVILAPHAVEALVKQPPDRWLSNARMTHYQALLLDTDRVQFGPVVALNPATLLPLPEEGLQHNCLDILAEAHGTRPDLTDQPLPDADHTWYTDGSSLLQEGQRKAGAAVTTETEVIWAKALPAGTSAQRAELIALTQALKMAEGKKLNVYTDSRYAFATAHIHGEIYRRRGWLTSEGKEIKNKDEILALLKALFLPKRLSIIHCPGHQKGHSAEARGNRMADQAARKAAITETPDTSTLLAGKRTADGSEFEKRTADGSEFESPKKKAKVE

SEQ ID NO: 3106 - protein, 2094 aa, synthetic construct
MPAAKRVKLDGGDKKYSIGLDIGTNSVGWAVITDEYKVPSKKFKVLGNTDRHSIKKNLIGALLFDSGETAEATRLKRTARRRYTRRKNRICYLQEIFSNEMAKVDDSFFHRLEESFLVEEDKKHERHPIFGNIVDEVAYHEKYPTIYHLRKKLVDSTDKADLRLIYLALAHMIKFRGHFLIEGDLNPDNSDVDKLFIQLVQTYNQLFEENPINASGVDAKAILSARLSKSRRLENLIAQLPGEKKNGLFGNLIALSLGLTPNFKSNFDLAEDAKLQLSKDTYDDDLDNLLAQIGDQYADLFLAAKNLSDAILLSDILRVNTEITKAPLSASMIKRYDEHHQDLTLLKALVRQQLPEKYKEIFFDQSKNGYAGYIDGGASQEEFYKFIKPILEKMDGTEELLVKLNREDLLRKQRTFDNGSIPHQIHLGELHAILRRQEDFYPFLKDNREKIEKILTFRIPYYVGPLARGNSRFAWMTRKSEETITPWNFEEVVDKGASAQSFIERMTNFDKNLPNEKVLPKHSLLYEYFTVYNELTKVKYVTEGMRKPAFLSGEQKKAIVDLLFKTNRKVTVKQLKEDYFKKIECFDSVEISGVEDRFNASLGTYHDLLKIIKDKDFLDNEENEDILEDIVLTLTLFEDREMIEERLKTYAHLFDDKVMKQLKRRRYTGWGRLSRKLINGIRDKQSGKTILDFLKSDGFANRNFMQLIHDDSLTFKEDIQKAQVSGQGDSLHEHIANLAGSPAIKKGILQTVKVVDELVKVMGRHKPENIVIEMARENQTTQKGQKNSRERMKRIEEGIKELGSQILKEHPVENTQLQNEKLYLYYLQNGRDMYVDQELDINRLSDYDVDHIVPQSFLKDDSIDNKVLTRSDKARGKSDNVPSEEVVKKMKNYWRQLLNAKLITQRKFDNLTKAERGGLSELDKAGFIKRQLVETRQITKHVAQILDSRMNTKYDENDKLIREVKVITLKSKLVSDFRKDFQFYKVREINNYHHAHDAYLNAVVGTALIKKYPKLESEFVYGDYKVYDVRKMIAKSEQEIGKATAKYFFYSNIMNFFKTEITLANGEIRKRPLIETNGETGEIVWDKGRDFATVRKVLSMPQVNIVKKTEVQTGGFSKESILPKRNSDKLIARKKDWDPKKYGGFDSPTVAYSVLVVAKVEKGKSKKLKSVKELLGITIMERSSFEKNPIDFLEAKGYKEVKKDLIIKLPKYSLFELENGRKRMLASAGELQKGNELALPSKYVNFLYLASHYEKLKGSPEDNEQKQLFVEQHKHYLDEIIEQISEFSKRVILADANLDKVLSAYNKHRDKPIREQAENIIHLFTLTNLGAPAAFKYFDTTIDRKRYTSTKEVLDATLIHQSITGLYETRIDLSQLGGDGGPAPGSSGGSGGTLNIEDEHRLHETSKEPDVSLGSTWLSDFPQAWAETGGMGLAVRQAPLIIPLKATSTPVSIKQYPMSQEARLGIKPHIQRLLDQGILVPCQSPWNTPLLPVKKPGTNDYRPVQDLREVNKRVEDIHPTVPNPYNLLSGLPPSHQWYTVLDLKDAFFCLRLHPTSQPLFAFEWRDPEMGISGQLTWTRLPQGFKNSPTLFNEALHRDLADFRIQHPDLILLQYVDDLLLAATSELDCQQGTRALLQTLGNLGYRASAKKAQICQKQVKYLGYLLKEGQRWLTEARKETVMGQPTPKTPRQLREFLGKAGFCRLFIPGFAEMAAPLYPLTKPGTLFNWGPDQQKAYQEIKQALLTAPALGLPDLTKPFELFVDEKQGYAKGVLTQKLGPWRRPVAYLSKKLDPVAAGWPPCLRMVAAIAVLTKDAGKLTMGQPLVILAPHAVEALVKQPPDRWLSNARMTHYQALLLDTDRVQFGPVVALNPATLLPLPEEGLQHNCLDILAEAHGTRPDLTDQPLPDADHTWYTDGSSLLQEGQRKAGAAVTTETEVIWAKALPAGTSAQRAELIALTQALKMAEGKKLNVYTDSRYAFATAHIHGEIYRRRGWLTSEGKEIKNKDEILALLKALFLPKRLSIIHCPGHQKGHSAEARGNRMADQAARKAAITETPDTSTLLAGKRTADGSEFEKRTADGSEFESPKKKAKVE

SEQ ID NO: 3107 - protein, 2091 aa, synthetic construct; identical to SEQ ID NO: 2820

SEQ ID NO: 3108 - protein, 2096 aa, synthetic construct; identical to SEQ ID NO: 2782

SEQ ID NO: 3109 - protein, 2096 aa, synthetic construct; identical to SEQ ID NO: 2860

SEQ ID NO: 3110 - protein, 2095 aa, synthetic construct
MPAAKRVKLDGGDKKYSIGLDIGTNSVGWAVITDEYKVPSKKFKVLGNTDRHSIKKNLIGALLFDSGETAEATRLKRTARRRYTRRKNRICYLQEIFSNEMAKVDDSFFHRLEESFLVEEDKKHERHPIFGNIVDEVAYHEKYPTIYHLRKKLVDSTDKADLRLIYLALAHMIKFRGHFLIEGDLNPDNSDVDKLFIQLVQTYNQLFEENPINASGVDAKAILSARLSKSRRLENLIAQLPGEKKNGLFGNLIALSLGLTPNFKSNFDLAEDAKLQLSKDTYDDDLDNLLAQIGDQYADLFLAAKNLSDAILLSDILRVNTEITKAPLSASMIKRYDEHHQDLTLLKALVRQQLPEKYKEIFFDQSKNGYAGYIDGGASQEEFYKFIKPILEKMDGTEELLVKLNREDLLRKQRTFDNGSIPHQIHLGELHAILRRQEDFYPFLKDNREKIEKILTFRIPYYVGPLARGNSRFAWMTRKSEETITPWNFEEVVDKGASAQSFIERMTNFDKNLPNEKVLPKHSLLYEYFTVYNELTKVKYVTEGMRKPAFLSGEQKKAIVDLLFKTNRKVTVKQLKEDYFKKIECFDSVEISGVEDRFNASLGTYHDLLKIIKDKDFLDNEENEDILEDIVLTLTLFEDREMIEERLKTYAHLFDDKVMKQLKRRRYTGWGRLSRKLINGIRDKQSGKTILDFLKSDGFANRNFMQLIHDDSLTFKEDIQKAQVSGQGDSLHEHIANLAGSPAIKKGILQTVKVVDELVKVMGRHKPENIVIEMARENQTTQKGQKNSRERMKRIEEGIKELGSQILKEHPVENTQLQNEKLYLYYLQNGRDMYVDQELDINRLSDYDVDHIVPQSFLKDDSIDNKVLTRSDKARGKSDNVPSEEVVKKMKNYWRQLLNAKLITQRKFDNLTKAERGGLSELDKAGFIKRQLVETRQITKHVAQILDSRMNTKYDENDKLIREVKVITLKSKLVSDFRKDFQFYKVREINNYHHAHDAYLNAVVGTALIKKYPKLESEFVYGDYKVYDVRKMIAKSEQEIGKATAKYFFYSNIMNFFKTEITLANGEIRKRPLIETNGETGEIVWDKGRDFATVRKVLSMPQVNIVKKTEVQTGGFSKESILPKRNSDKLIARKKDWDPKKYGGFDSPTVAYSVLVVAKVEKGKSKKLKSVKELLGITIMERSSFEKNPIDFLEAKGYKEVKKDLIIKLPKYSLFELENGRKRMLASAGELQKGNELALPSKYVNFLYLASHYEKLKGSPEDNEQKQLFVEQHKHYLDEIIEQISEFSKRVILADANLDKVLSAYNKHRDKPIREQAENIIHLFTLTNLGAPAAFKYFDTTIDRKRYTSTKEVLDATLIHQSITGLYETRIDLSQLGGDGGGGGGSGGGGSGGTLNIEDEHRLHETSKEPDVSLGSTWLSDFPQAWAETGGMGLAVRQAPLIIPLKATSTPVSIKQYPMSQEARLGIKPHIQRLLDQGILVPCQSPWNTPLLPVKKPGTNDYRPVQDLREVNKRVEDIHPTVPNPYNLLSGLPPSHQWYTVLDLKDAFFCLRLHPTSQPLFAFEWRDPEMGISGQLTWTRLPQGFKNSPTLFNEALHRDLADFRIQHPDLILLQYVDDLLLAATSELDCQQGTRALLQTLGNLGYRASAKKAQICQKQVKYLGYLLKEGQRWLTEARKETVMGQPTPKTPRQLREFLGKAGFCRLFIPGFAEMAAPLYPLTKPGTLFNWGPDQQKAYQEIKQALLTAPALGLPDLTKPFELFVDEKQGYAKGVLTQKLGPWRRPVAYLSKKLDPVAAGWPPCLRMVAAIAVLTKDAGKLTMGQPLVILAPHAVEALVKQPPDRWLSNARMTHYQALLLDTDRVQFGPVVALNPATLLPLPEEGLQHNCLDILAEAHGTRPDLTDQPLPDADHTWYTDGSSLLQEGQRKAGAAVTTETEVIWAKALPAGTSAQRAELIALTQALKMAEGKKLNVYTDSRYAFATAHIHGEIYRRRGWLTSEGKEIKNKDEILALLKALFLPKRLSIIHCPGHQKGHSAEARGNRMADQAARKAAITETPDTSTLLAGKRTADGSEFEKRTADGSEFESPKKKAKVE

SEQ ID NO: 3111 - protein, 2094 aa, synthetic construct; identical to SEQ ID NO: 2800

SEQ ID NO: 3112 - protein, 2096 aa, synthetic construct; identical to SEQ ID NO: 2792

SEQ ID NO: 3113 - protein, 2091 aa, synthetic construct
MPAAKRVKLDGGDKKYSIGLDIGTNSVGWAVITDEYKVPSKKFKVLGNTDRHSIKKNLIGALLFDSGETAEATRLKRTARRRYTRRKNRICYLQEIFSNEMAKVDDSFFHRLEESFLVEEDKKHERHPIFGNIVDEVAYHEKYPTIYHLRKKLVDSTDKADLRLIYLALAHMIKFRGHFLIEGDLNPDNSDVDKLFIQLVQTYNQLFEENPINASGVDAKAILSARLSKSRRLENLIAQLPGEKKNGLFGNLIALSLGLTPNFKSNFDLAEDAKLQLSKDTYDDDLDNLLAQIGDQYADLFLAAKNLSDAILLSDILRVNTEITKAPLSASMIKRYDEHHQDLTLLKALVRQQLPEKYKEIFFDQSKNGYAGYIDGGASQEEFYKFIKPILEKMDGTEELLVKLNREDLLRKQRTFDNGSIPHQIHLGELHAILRRQEDFYPFLKDNREKIEKILTFRIPYYVGPLARGNSRFAWMTRKSEETITPWNFEEVVDKGASAQSFIERMTNFDKNLPNEKVLPKHSLLYEYFTVYNELTKVKYVTEGMRKPAFLSGEQKKAIVDLLFKTNRKVTVKQLKEDYFKKIECFDSVEISGVEDRFNASLGTYHDLLKIIKDKDFLDNEENEDILEDIVLTLTLFEDREMIEERLKTYAHLFDDKVMKQLKRRRYTGWGRLSRKLINGIRDKQSGKTILDFLKSDGFANRNFMQLIHDDSLTFKEDIQKAQVSGQGDSLHEHIANLAGSPAIKKGILQTVKVVDELVKVMGRHKPENIVIEMARENQTTQKGQKNSRERMKRIEEGIKELGSQILKEHPVENTQLQNEKLYLYYLQNGRDMYVDQELDINRLSDYDVDHIVPQSFLKDDSIDNKVLTRSDKARGKSDNVPSEEVVKKMKNYWRQLLNAKLITQRKFDNLTKAERGGLSELDKAGFIKRQLVETRQITKHVAQILDSRMNTKYDENDKLIREVKVITLKSKLVSDFRKDFQFYKVREINNYHHAHDAYLNAVVGTALIKKYPKLESEFVYGDYKVYDVRKMIAKSEQEIGKATAKYFFYSNIMNFFKTEITLANGEIRKRPLIETNGETGEIVWDKGRDFATVRKVLSMPQVNIVKKTEVQTGGFSKESILPKRNSDKLIARKKDWDPKKYGGFDSPTVAYSVLVVAKVEKGKSKKLKSVKELLGITIMERSSFEKNPIDFLEAKGYKEVKKDLIIKLPKYSLFELENGRKRMLASAGELQKGNELALPSKYVNFLYLASHYEKLKGSPEDNEQKQLFVEQHKHYLDEIIEQISEFSKRVILADANLDKVLSAYNKHRDKPIREQAENIIHLFTLTNLGAPAAFKYFDTTIDRKRYTSTKEVLDATLIHQSITGLYETRIDLSQLGGDGGGGSGSSGGTLNIEDEHRLHETSKEPDVSLGSTWLSDFPQAWAETGGMGLAVRQAPLIIPLKATSTPVSIKQYPMSQEARLGIKPHIQRLLDQGILVPCQSPWNTPLLPVKKPGTNDYRPVQDLREVNKRVEDIHPTVPNPYNLLSGLPPSHQWYTVLDLKDAFFCLRLHPTSQPLFAFEWRDPEMGISGQLTWTRLPQGFKNSPTLFNEALHRDLADFRIQHPDLILLQYVDDLLLAATSELDCQQGTRALLQTLGNLGYRASAKKAQICQKQVKYLGYLLKEGQRWLTEARKETVMGQPTPKTPRQLREFLGKAGFCRLFIPGFAEMAAPLYPLTKPGTLFNWGPDQQKAYQEIKQALLTAPALGLPDLTKPFELFVDEKQGYAKGVLTQKLGPWRRPVAYLSKKLDPVAAGWPPCLRMVAAIAVLTKDAGKLTMGQPLVILAPHAVEALVKQPPDRWLSNARMTHYQALLLDTDRVQFGPVVALNPATLLPLPEEGLQHNCLDILAEAHGTRPDLTDQPLPDADHTWYTDGSSLLQEGQRKAGAAVTTETEVIWAKALPAGTSAQRAELIALTQALKMAEGKKLNVYTDSRYAFATAHIHGEIYRRRGWLTSEGKEIKNKDEILALLKALFLPKRLSIIHCPGHQKGHSAEARGNRMADQAARKAAITETPDTSTLLAGKRTADGSEFEKRTADGSEFESPKKKAKVE

SEQ ID NO: 3114 - protein, 2090 aa, synthetic construct; identical to SEQ ID NO: 2834

SEQ ID NO: 3115 - protein, 2096 aa, synthetic construct
MPAAKRVKLDGGDKKYSIGLDIGTNSVGWAVITDEYKVPSKKFKVLGNTDRHSIKKNLIGALLFDSGETAEATRLKRTARRRYTRRKNRICYLQEIFSNEMAKVDDSFFHRLEESFLVEEDKKHERHPIFGNIVDEVAYHEKYPTIYHLRKKLVDSTDKADLRLIYLALAHMIKFRGHFLIEGDLNPDNSDVDKLFIQLVQTYNQLFEENPINASGVDAKAILSARLSKSRRLENLIAQLPGEKKNGLFGNLIALSLGLTPNFKSNFDLAEDAKLQLSKDTYDDDLDNLLAQIGDQYADLFLAAKNLSDAILLSDILRVNTEITKAPLSASMIKRYDEHHQDLTLLKALVRQQLPEKYKEIFFDQSKNGYAGYIDGGASQEEFYKFIKPILEKMDGTEELLVKLNREDLLRKQRTFDNGSIPHQIHLGELHAILRRQEDFYPFLKDNREKIEKILTFRIPYYVGPLARGNSRFAWMTRKSEETITPWNFEEVVDKGASAQSFIERMTNFDKNLPNEKVLPKHSLLYEYFTVYNELTKVKYVTEGMRKPAFLSGEQKKAIVDLLFKTNRKVTVKQLKEDYFKKIECFDSVEISGVEDRFNASLGTYHDLLKIIKDKDFLDNEENEDILEDIVLTLTLFEDREMIEERLKTYAHLFDDKVMKQLKRRRYTGWGRLSRKLINGIRDKQSGKTILDFLKSDGFANRNFMQLIHDDSLTFKEDIQKAQVSGQGDSLHEHIANLAGSPAIKKGILQTVKVVDELVKVMGRHKPENIVIEMARENQTTQKGQKNSRERMKRIEEGIKELGSQILKEHPVENTQLQNEKLYLYYLQNGRDMYVDQELDINRLSDYDVDHIVPQSFLKDDSIDNKVLTRSDKARGKSDNVPSEEVVKKMKNYWRQLLNAKLITQRKFDNLTKAERGGLSELDKAGFIKRQLVETRQITKHVAQILDSRMNTKYDENDKLIREVKVITLKSKLVSDFRKDFQFYKVREINNYHHAHDAYLNAVVGTALIKKYPKLESEFVYGDYKVYDVRKMIAKSEQEIGKATAKYFFYSNIMNFFKTEITLANGEIRKRPLIETNGETGEIVWDKGRDFATVRKVLSMPQVNIVKKTEVQTGGFSKESILPKRNSDKLIARKKDWDPKKYGGFDSPTVAYSVLVVAKVEKGKSKKLKSVKELLGITIMERSSFEKNPIDFLEAKGYKEVKKDLIIKLPKYSLFELENGRKRMLASAGELQKGNELALPSKYVNFLYLASHYEKLKGSPEDNEQKQLFVEQHKHYLDEIIEQISEFSKRVILADANLDKVLSAYNKHRDKPIREQAENIIHLFTLTNLGAPAAFKYFDTTIDRKRYTSTKEVLDATLIHQSITGLYETRIDLSQLGGDGGGGGGGSEAAAKGGTLNIEDEHRLHETSKEPDVSLGSTWLSDFPQAWAETGGMGLAVRQAPLIIPLKATSTPVSIKQYPMSQEARLGIKPHIQRLLDQGILVPCQSPWNTPLLPVKKPGTNDYRPVQDLREVNKRVEDIHPTVPNPYNLLSGLPPSHQWYTVLDLKDAFFCLRLHPTSQPLFAFEWRDPEMGISGQLTWTRLPQGFKNSPTLFNEALHRDLADFRIQHPDLILLQYVDDLLLAATSELDCQQGTRALLQTLGNLGYRASAKKAQICQKQVKYLGYLLKEGQRWLTEARKETVMGQPTPKTPRQLREFLGKAGFCRLFIPGFAEMAAPLYPLTKPGTLFNWGPDQQKAYQEIKQALLTAPALGLPDLTKPFELFVDEKQGYAKGVLTQKLGPWRRPVAYLSKKLDPVAAGWPPCLRMVAAIAVLTKDAGKLTMGQPLVILAPHAVEALVKQPPDRWLSNARMTHYQALLLDTDRVQFGPVVALNPATLLPLPEEGLQHNCLDILAEAHGTRPDLTDQPLPDADHTWYTDGSSLLQEGQRKAGAAVTTETEVIWAKALPAGTSAQRAELIALTQALKMAEGKKLNVYTDSRYAFATAHIHGEIYRRRGWLTSEGKEIKNKDEILALLKALFLPKRLSIIHCPGHQKGHSAEARGNRMADQAARKAAITETPDTSTLLAGKRTADGSEFEKRTADGSEFESPKKKAKVE

SEQ ID NO: 3116 - protein, 2096 aa, synthetic construct; identical to SEQ ID NO: 2789

SEQ ID NO: 3117 - protein, 2094 aa, synthetic construct; identical to SEQ ID NO: 2848

SEQ ID NO: 3118 - protein, 2096 aa, synthetic construct; identical to SEQ ID NO: 2805

SEQ ID NO: 3119 - protein, 2091 aa, synthetic construct; identical to SEQ ID NO: 2861

SEQ ID NO: 3120 - protein, 2115 aa, synthetic construct; identical to SEQ ID NO: 2813

SEQ ID NO: 3121 - protein, 2094 aa, synthetic construct
MPAAKRVKLDGGDKKYSIGLDIGTNSVGWAVITDEYKVPSKKFKVLGNTDRHSIKKNLIGALLFDSGETAEATRLKRTARRRYTRRKNRICYLQEIFSNEMAKVDDSFFHRLEESFLVEEDKKHERHPIFGNIVDEVAYHEKYPTIYHLRKKLVDSTDKADLRLIYLALAHMIKFRGHFLIEGDLNPDNSDVDKLFIQLVQTYNQLFEENPINASGVDAKAILSARLSKSRRLENLIAQLPGEKKNGLFGNLIALSLGLTPNFKSNFDLAEDAKLQLSKDTYDDDLDNLLAQIGDQYADLFLAAKNLSDAILLSDILRVNTEITKAPLSASMIKRYDEHHQDLTLLKALVRQQLPEKYKEIFFDQSKNGYAGYIDGGASQEEFYKFIKPILEKMDGTEELLVKLNREDLLRKQRTFDNGSIPHQIHLGELHAILRRQEDFYPFLKDNREKIEKILTFRIPYYVGPLARGNSRFAWMTRKSEETITPWNFEEVVDKGASAQSFIERMTNFDKNLPNEKVLPKHSLLYEYFTVYNELTKVKYVTEGMRKPAFLSGEQKKAIVDLLFKTNRKVTVKQLKEDYFKKIECFDSVEISGVEDRFNASLGTYHDLLKIIKDKDFLDNEENEDILEDIVLTLTLFEDREMIEERLKTYAHLFDDKVMKQLKRRRYTGWGRLSRKLINGIRDKQSGKTILDFLKSDGFANRNFMQLIHDDSLTFKEDIQKAQVSGQGDSLHEHIANLAGSPAIKKGILQTVKVVDELVKVMGRHKPENIVIEMARENQTTQKGQKNSRERMKRIEEGIKELGSQILKEHPVENTQLQNEKLYLYYLQNGRDMYVDQELDINRLSDYDVDHIVPQSFLKDDSIDNKVLTRSDKARGKSDNVPSEEVVKKMKNYWRQLLNAKLITQRKFDNLTKAERGGLSELDKAGFIKRQLVETRQITKHVAQILDSRMNTKYDENDKLIREVKVITLKSKLVSDFRKDFQFYKVREINNYHHAHDAYLNAVVGTALIKKYPKLESEFVYGDYKVYDVRKMIAKSEQEIGKATAKYFFYSNIMNFFKTEITLANGEIRKRPLIETNGETGEIVWDKGRDFATVRKVLSMPQVNIVKKTEVQTGGFSKESILPKRNSDKLIARKKDWDPKKYGGFDSPTVAYSVLVVAKVEKGKSKKLKSVKELLGITIMERSSFEKNPIDFLEAKGYKEVKKDLIIKLPKYSLFELENGRKRMLASAGELQKGNELALPSKYVNFLYLASHYEKLKGSPEDNEQKQLFVEQHKHYLDEIIEQISEFSKRVILADANLDKVLSAYNKHRDKPIREQAENIIHLFTLTNLGAPAAFKYFDTTIDRKRYTSTKEVLDATLIHQSITGLYETRIDLSQLGGDGGGGSGGGGSSGGTLNIEDEHRLHETSKEPDVSLGSTWLSDFPQAWAETGGMGLAVRQAPLIIPLKATSTPVSIKQYPMSQEARLGIKPHIQRLLDQGILVPCQSPWNTPLLPVKKPGTNDYRPVQDLREVNKRVEDIHPTVPNPYNLLSGLPPSHQWYTVLDLKDAFFCLRLHPTSQPLFAFEWRDPEMGISGQLTWTRLPQGFKNSPTLFNEALHRDLADFRIQHPDLILLQYVDDLLLAATSELDCQQGTRALLQTLGNLGYRASAKKAQICQKQVKYLGYLLKEGQRWLTEARKETVMGQPTPKTPRQLREFLGKAGFCRLFIPGFAEMAAPLYPLTKPGTLFNWGPDQQKAYQEIKQALLTAPALGLPDLTKPFELFVDEKQGYAKGVLTQKLGPWRRPVAYLSKKLDPVAAGWPPCLRMVAAIAVLTKDAGKLTMGQPLVILAPHAVEALVKQPPDRWLSNARMTHYQALLLDTDRVQFGPVVALNPATLLPLPEEGLQHNCLDILAEAHGTRPDLTDQPLPDADHTWYTDGSSLLQEGQRKAGAAVTTETEVIWAKALPAGTSAQRAELIALTQALKMAEGKKLNVYTDSRYAFATAHIHGEIYRRRGWLTSEGKEIKNKDEILALLKALFLPKRLSIIHCPGHQKGHSAEARGNRMADQAARKAAITETPDTSTLLAGKRTADGSEFEKRTADGSEFESPKKKAKVE

SEQ ID NO: 3122 - protein, 2094 aa, synthetic construct
MPAAKRVKLDGGDKKYSIGLDIGTNSVGWAVITDEYKVPSKKFKVLGNTDRHSIKKNLIGALLFDSGETAEATRLKRTARRRYTRRKNRICYLQEIFSNEMAKVDDSFFHRLEESFLVEEDKKHERHPIFGNIVDEVAYHEKYPTIYHLRKKLVDSTDKADLRLIYLALAHMIKFRGHFLIEGDLNPDNSDVDKLFIQLVQTYNQLFEENPINASGVDAKAILSARLSKSRRLENLIAQLPGEKKNGLFGNLIALSLGLTPNFKSNFDLAEDAKLQLSKDTYDDDLDNLLAQIGDQYADLFLAAKNLSDAILLSDILRVNTEITKAPLSASMIKRYDEHHQDLTLLKALVRQQLPEKYKEIFFDQSKNGYAGYIDGGASQEEFYKFIKPILEKMDGTEELLVKLNREDLLRKQRTFDNGSIPHQIHLGELHAILRRQEDFYPFLKDNREKIEKILTFRIPYYVGPLARGNSRFAWMTRKSEETITPWNFEEVVDKGASAQSFIERMTNFDKNLPNEKVLPKHSLLYEYFTVYNELTKVKYVTEGMRKPAFLSGEQKKAIVDLLFKTNRKVTVKQLKEDYFKKIECFDSVEISGVEDRFNASLGTYHDLLKIIKDKDFLDNEENEDILEDIVLTLTLFEDREMIEERLKTYAHLFDDKVMKQLKRRRYTGWGRLSRKLINGIRDKQSGKTILDFLKSDGFANRNFMQLIHDDSLTFKEDIQKAQVSGQGDSLHEHIANLAGSPAIKKGILQTVKVVDELVKVMGRHKPENIVIEMARENQTTQKGQKNSRERMKRIEEGIKELGSQILKEHPVENTQLQNEKLYLYYLQNGRDMYVDQELDINRLSDYDVDHIVPQSFLKDDSIDNKVLTRSDKARGKSDNVPSEEVVKKMKNYWRQLLNAKLITQRKFDNLTKAERGGLSELDKAGFIKRQLVETRQITKHVAQILDSRMNTKYDENDKLIREVKVITLKSKLVSDFRKDFQFYKVREINNYHHAHDAYLNAVVGTALIKKYPKLESEFVYGDYKVYDVRKMIAKSEQEIGKATAKYFFYSNIMNFFKTEITLANGEIRKRPLIETNGETGEIVWDKGRDFATVRKVLSMPQVNIVKKTEVQTGGFSKESILPKRNSDKLIARKKDWDPKKYGGFDSPTVAYSVLVVAKVEKGKSKKLKSVKELLGITIMERSSFEKNPIDFLEAKGYKEVKKDLIIKLPKYSLFELENGRKRMLASAGELQKGNELALPSKYVNFLYLASHYEKLKGSPEDNEQKQLFVEQHKHYLDEIIEQISEFSKRVILADANLDKVLSAYNKHRDKPIREQAENIIHLFTLTNLGAPAAFKYFDTTIDRKRYTSTKEVLDATLIHQSITGLYETRIDLSQLGGDGGGGSGSSPAPGGTLNIEDEHRLHETSKEPDVSLGSTWLSDFPQAWAETGGMGLAVRQAPLIIPLKATSTPVSIKQYPMSQEARLGIKPHIQRLLDQGILVPCQSPWNTPLLPVKKPGTNDYRPVQDLREVNKRVEDIHPTVPNPYNLLSGLPPSHQWYTVLDLKDAFFCLRLHPTSQPLFAFEWRDPEMGISGQLTWTRLPQGFKNSPTLFNEALHRDLADFRIQHPDLILLQYVDDLLLAATSELDCQQGTRALLQTLGNLGYRASAKKAQICQKQVKYLGYLLKEGQRWLTEARKETVMGQPTPKTPRQLREFLGKAGFCRLFIPGFAEMAAPLYPLTKPGTLFNWGPDQQKAYQEIKQALLTAPALGLPDLTKPFELFVDEKQGYAKGVLTQKLGPWRRPVAYLSKKLDPVAAGWPPCLRMVAAIAVLTKDAGKLTMGQPLVILAPHAVEALVKQPPDRWLSNARMTHYQALLLDTDRVQFGPVVALNPATLLPLPEEGLQHNCLDILAEAHGTRPDLTDQPLPDADHTWYTDGSSLLQEGQRKAGAAVTTETEVIWAKALPAGTSAQRAELIALTQALKMAEGKKLNVYTDSRYAFATAHIHGEIYRRRGWLTSEGKEIKNKDEILALLKALFLPKRLSIIHCPGHQKGHSAEARGNRMADQAARKAAITETPDTSTLLAGKRTADGSEFEKRTADGSEFESPKKKAKVE

SEQ ID NO: 3123 - protein, 2090 aa, synthetic construct; identical to SEQ ID NO: 2823

SEQ ID NO: 3124 - protein, 2094 aa, synthetic construct; identical to SEQ ID NO: 2833

SEQ ID NO: 3125 - protein, 2096 aa, synthetic construct; identical to SEQ ID NO: 2794

SEQ ID NO: 3126 - protein, 2100 aa, synthetic construct; identical to SEQ ID NO: 2802

SEQ ID NO: 3127 - protein, 2096 aa, synthetic construct; identical to SEQ ID NO: 2839

SEQ ID NO: 3128 - protein, 2094 aa, synthetic construct; identical to SEQ ID NO: 2841

SEQ ID NO: 3129 - protein, 2096 aa, synthetic construct
MPAAKRVKLDGGDKKYSIGLDIGTNSVGWAVITDEYKVPSKKFKVLGNTDRHSIKKNLIGALLFDSGETAEATRLKRTARRRYTRRKNRICYLQEIFSNEMAKVDDSFFHRLEESFLVEEDKKHERHPIFGNIVDEVAYHEKYPTIYHLRKKLVDSTDKADLRLIYLALAHMIKFRGHFLIEGDLNPDNSDVDKLFIQLVQTYNQLFEENPINASGVDAKAILSARLSKSRRLENLIAQLPGEKKNGLFGNLIALSLGLTPNFKSNFDLAEDAKLQLSKDTYDDDLDNLLAQIGDQYADLFLAAKNLSDAILLSDILRVNTEITKAPLSASMIKRYDEHHQDLTLLKALVRQQLPEKYKEIFFDQSKNGYAGYIDGGASQEEFYKFIKPILEKMDGTEELLVKLNREDLLRKQRTFDNGSIPHQIHLGELHAILRRQEDFYPFLKDNREKIEKILTFRIPYYVGPLARGNSRFAWMTRKSEETITPWNFEEVVDKGASAQSFIERMTNFDKNLPNEKVLPKHSLLYEYFTVYNELTKVKYVTEGMRKPAFLSGEQKKAIVDLLFKTNRKVTVKQLKEDYFKKIECFDSVEISGVEDRFNASLGTYHDLLKIIKDKDFLDNEENEDILEDIVLTLTLFEDREMIEERLKTYAHLFDDKVMKQLKRRRYTGWGRLSRKLINGIRDKQSGKTILDFLKSDGFANRNFMQLIHDDSLTFKEDIQKAQVSGQGDSLHEHIANLAGSPAIKKGILQTVKVVDELVKVMGRHKPENIVIEMARENQTTQKGQKNSRERMKRIEEGIKELGSQILKEHPVENTQLQNEKLYLYYLQNGRDMYVDQELDINRLSDYDVDHIVPQSFLKDDSIDNKVLTRSDKARGKSDNVPSEEVVKKMKNYWRQLLNAKLITQRKFDNLTKAERGGLSELDKAGFIKRQLVETRQITKHVAQILDSRMNTKYDENDKLIREVKVITLKSKLVSDFRKDFQFYKVREINNYHHAHDAYLNAVVGTALIKKYPKLESEFVYGDYKVYDVRKMIAKSEQEIGKATAKYFFYSNIMNFFKTEITLANGEIRKRPLIETNGETGEIVWDKGRDFATVRKVLSMPQVNIVKKTEVQTGGFSKESILPKRNSDKLIARKKDWDPKKYGGFDSPTVAYSVLVVAKVEKGKSKKLKSVKELLGITIMERSSFEKNPIDFLEAKGYKEVKKDLIIKLPKYSLFELENGRKRMLASAGELQKGNELALPSKYVNFLYLASHYEKLKGSPEDNEQKQLFVEQHKHYLDEIIEQISEFSKRVILADANLDKVLSAYNKHRDKPIREQAENIIHLFTLTNLGAPAAFKYFDTTIDRKRYTSTKEVLDATLIHQSITGLYETRIDLSQLGGDGGGGSGGGEAAAKGGTLNIEDEHRLHETSKEPDVSLGSTWLSDFPQAWAETGGMGLAVRQAPLIIPLKATSTPVSIKQYPMSQEARLGIKPHIQRLLDQGILVPCQSPWNTPLLPVKKPGTNDYRPVQDLREVNKRVEDIHPTVPNPYNLLSGLPPSHQWYTVLDLKDAFFCLRLHPTSQPLFAFEWRDPEMGISGQLTWTRLPQGFKNSPTLFNEALHRDLADFRIQHPDLILLQYVDDLLLAATSELDCQQGTRALLQTLGNLGYRASAKKAQICQKQVKYLGYLLKEGQRWLTEARKETVMGQPTPKTPRQLREFLGKAGFCRLFIPGFAEMAAPLYPLTKPGTLFNWGPDQQKAYQEIKQALLTAPALGLPDLTKPFELFVDEKQGYAKGVLTQKLGPWRRPVAYLSKKLDPVAAGWPPCLRMVAAIAVLTKDAGKLTMGQPLVILAPHAVEALVKQPPDRWLSNARMTHYQALLLDTDRVQFGPVVALNPATLLPLPEEGLQHNCLDILAEAHGTRPDLTDQPLPDADHTWYTDGSSLLQEGQRKAGAAVTTETEVIWAKALPAGTSAQRAELIALTQALKMAEGKKLNVYTDSRYAFATAHIHGEIYRRRGWLTSEGKEIKNKDEILALLKALFLPKRLSIIHCPGHQKGHSAEARGNRMADQAARKAAITETPDTSTLLAGKRTADGSEFEKRTADGSEFESPKKKAKVE

SEQ ID NO: 3130 - protein, 2094 aa, synthetic construct; identical to SEQ ID NO: 2801

SEQ ID NO: 3131 - protein, 2096 aa, synthetic construct
MPAAKRVKLDGGDKKYSIGLDIGTNSVGWAVITDEYKVPSKKFKVLGNTDRHSIKKNLIGALLFDSGETAEATRLKRTARRRYTRRKNRICYLQEIFSNEMAKVDDSFFHRLEESFLVEEDKKHERHPIFGNIVDEVAYHEKYPTIYHLRKKLVDSTDKADLRLIYLALAHMIKFRGHFLIEGDLNPDNSDVDKLFIQLVQTYNQLFEENPINASGVDAKAILSARLSKSRRLENLIAQLPGEKKNGLFGNLIALSLGLTPNFKSNFDLAEDAKLQLSKDTYDDDLDNLLAQIGDQYADLFLAAKNLSDAILLSDILRVNTEITKAPLSASMIKRYDEHHQDLTLLKALVRQQLPEKYKEIFFDQSKNGYAGYIDGGASQEEFYKFIKPILEKMDGTEELLVKLNREDLLRKQRTFDNGSIPHQIHLGELHAILRRQEDFYPFLKDNREKIEKILTFRIPYYVGPLARGNSRFAWMTRKSEETITPWNFEEVVDKGASAQSFIERMTNFDKNLPNEKVLPKHSLLYEYFTVYNELTKVKYVTEGMRKPAFLSGEQKKAIVDLLFKTNRKVTVKQLKEDYFKKIECFDSVEISGVEDRFNASLGTYHDLLKIIKDKDFLDNEENEDILEDIVLTLTLFEDREMIEERLKTYAHLFDDKVMKQLKRRRYTGWGRLSRKLINGIRDKQSGKTILDFLKSDGFANRNFMQLIHDDSLTFKEDIQKAQVSGQGDSLHEHIANLAGSPAIKKGILQTVKVVDELVKVMGRHKPENIVIEMARENQTTQKGQKNSRERMKRIEEGIKELGSQILKEHPVENTQLQNEKLYLYYLQNGRDMYVDQELDINRLSDYDVDHIVPQSFLKDDSIDNKVLTRSDKARGKSDNVPSEEVVKKMKNYWRQLLNAKLITQRKFDNLTKAERGGLSELDKAGFIKRQLVETRQITKHVAQILDSRMNTKYDENDKLIREVKVITLKSKLVSDFRKDFQFYKVREINNYHHAHDAYLNAVVGTALIKKYPKLESEFVYGDYKVYDVRKMIAKSEQEIGKATAKYFFYSNIMNFFKTEITLANGEIRKRPLIETNGETGEIVWDKGRDFATVRKVLSMPQVNIVKKTEVQTGGFSKESILPKRNSDKLIARKKDWDPKKYGGFDSPTVAYSVLVVAKVEKGKSKKLKSVKELLGITIMERSSFEKNPIDFLEAKGYKEVKKDLIIKLPKYSLFELENGRKRMLASAGELQKGNELALPSKYVNFLYLASHYEKLKGSPEDNEQKQLFVEQHKHYLDEIIEQISEFSKRVILADANLDKVLSAYNKHRDKPIREQAENIIHLFTLTNLGAPAAFKYFDTTIDRKRYTSTKEVLDATLIHQSITGLYETRIDLSQLGGDGGGSSEAAAKGGSGGTLNIEDEHRLHETSKEPDVSLGSTWLSDFPQAWAETGGMGLAVRQAPLIIPLKATSTPVSIKQYPMSQEARLGIKPHIQRLLDQGILVPCQSPWNTPLLPVKKPGTNDYRPVQDLREVNKRVEDIHPTVPNPYNLLSGLPPSHQWYTVLDLKDAFFCLRLHPTSQPLFAFEWRDPEMGISGQLTWTRLPQGFKNSPTLFNEALHRDLADFRIQHPDLILLQYVDDLLLAATSELDCQQGTRALLQTLGNLGYRASAKKAQICQKQVKYLGYLLKEGQRWLTEARKETVMGQPTPKTPRQLREFLGKAGFCRLFIPGFAEMAAPLYPLTKPGTLFNWGPDQQKAYQEIKQALLTAPALGLPDLTKPFELFVDEKQGYAKGVLTQKLGPWRRPVAYLSKKLDPVAAGWPPCLRMVAAIAVLTKDAGKLTMGQPLVILAPHAVEALVKQPPDRWLSNARMTHYQALLLDTDRVQFGPVVALNPATLLPLPEEGLQHNCLDILAEAHGTRPDLTDQPLPDADHTWYTDGSSLLQEGQRKAGAAVTTETEVIWAKALPAGTSAQRAELIALTQALKMAEGKKLNVYTDSRYAFATAHIHGEIYRRRGWLTSEGKEIKNKDEILALLKALFLPKRLSIIHCPGHQKGHSAEARGNRMADQAARKAAITETPDTSTLLAGKRTADGSEFEKRTADGSEFESPKKKAKVE

SEQ ID NO: 3132 - protein, 2118 aa, synthetic construct
MPAAKRVKLDGGDKKYSIGLDIGTNSVGWAVITDEYKVPSKKFKVLGNTDRHSIKKNLIGALLFDSGETAEATRLKRTARRRYTRRKNRICYLQEIFSNEMAKVDDSFFHRLEESFLVEEDKKHERHPIFGNIVDEVAYHEKYPTIYHLRKKLVDSTDKADLRLIYLALAHMIKFRGHFLIEGDLNPDNSDVDKLFIQLVQTYNQLFEENPINASGVDAKAILSARLSKSRRLENLIAQLPGEKKNGLFGNLIALSLGLTPNFKSNFDLAEDAKLQLSKDTYDDDLDNLLAQIGDQYADLFLAAKNLSDAILLSDILRVNTEITKAPLSASMIKRYDEHHQDLTLLKALVRQQLPEKYKEIFFDQSKNGYAGYIDGGASQEEFYKFIKPILEKMDGTEELLVKLNREDLLRKQRTFDNGSIPHQIHLGELHAILRRQEDFYPFLKDNREKIEKILTFRIPYYVGPLARGNSRFAWMTRKSEETITPWNFEEVVDKGASAQSFIERMTNFDKNLPNEKVLPKHSLLYEYFTVYNELTKVKYVTEGMRKPAFLSGEQKKAIVDLLFKTNRKVTVKQLKEDYFKKIECFDSVEISGVEDRFNASLGTYHDLLKIIKDKDFLDNEENEDILEDIVLTLTLFEDREMIEERLKTYAHLFDDKVMKQLKRRRYTGWGRLSRKLINGIRDKQSGKTILDFLKSDGFANRNFMQLIHDDSLTFKEDIQKAQVSGQGDSLHEHIANLAGSPAIKKGILQTVKVVDELVKVMGRHKPENIVIEMARENQTTQKGQKNSRERMKRIEEGIKELGSQILKEHPVENTQLQNEKLYLYYLQNGRDMYVDQELDINRLSDYDVDHIVPQSFLKDDSIDNKVLTRSDKARGKSDNVPSEEVVKKMKNYWRQLLNAKLITQRKFDNLTKAERGGLSELDKAGFIKRQLVETRQITKHVAQILDSRMNTKYDENDKLIREVKVITLKSKLVSDFRKDFQFYKVREINNYHHAHDAYLNAVVGTALIKKYPKLESEFVYGDYKVYDVRKMIAKSEQEIGKATAKYFFYSNIMNFFKTEITLANGEIRKRPLIETNGETGEIVWDKGRDFATVRKVLSMPQVNIVKKTEVQTGGFSKESILPKRNSDKLIARKKDWDPKKYGGFDSPTVAYSVLVVAKVEKGKSKKLKSVKELLGITIMERSSFEKNPIDFLEAKGYKEVKKDLIIKLPKYSLFELENGRKRMLASAGELQKGNELALPSKYVNFLYLASHYEKLKGSPEDNEQKQLFVEQHKHYLDEIIEQISEFSKRVILADANLDKVLSAYNKHRDKPIREQAENIIHLFTLTNLGAPAAFKYFDTTIDRKRYTSTKEVLDATLIHQSITGLYETRIDLSQLGGDGGSGGSSGGSSGSETPGTSESATPESSGGSSGGSSGGTLNIEDEHRLHETSKEPDVSLGSTWLSDFPQAWAETGGMGLAVRQAPLIIPLKATSTPVSIKQYPMSQEARLGIKPHIQRLLDQGILVPCQSPWNTPLLPVKKPGTNDYRPVQDLREVNKRVEDIHPTVPNPYNLLSGLPPSHQWYTVLDLKDAFFCLRLHPTSQPLFAFEWRDPEMGISGQLTWTRLPQGFKNSPTLFNEALHRDLADFRIQHPDLILLQYVDDLLLAATSELDCQQGTRALLQTLGNLGYRASAKKAQICQKQVKYLGYLLKEGQRWLTEARKETVMGQPTPKTPRQLREFLGKAGFCRLFIPGFAEMAAPLYPLTKPGTLFNWGPDQQKAYQEIKQALLTAPALGLPDLTKPFELFVDEKQGYAKGVLTQKLGPWRRPVAYLSKKLDPVAAGWPPCLRMVAAIAVLTKDAGKLTMGQPLVILAPHAVEALVKQPPDRWLSNARMTHYQALLLDTDRVQFGPVVALNPATLLPLPEEGLQHNCLDILAEAHGTRPDLTDQPLPDADHTWYTDGSSLLQEGQRKAGAAVTTETEVIWAKALPAGTSAQRAELIALTQALKMAEGKKLNVYTDSRYAFATAHIHGEIYRRRGWLTSEGKEIKNKDEILALLKALFLPKRLSIIHCPGHQKGHSAEARGNRMADQAARKAAITETPDTSTLLAGKRTADGSEFEKRTADGSEFESPKKKAKVE

SEQ ID NO: 3133 - protein, 2094 aa, synthetic construct; identical to SEQ ID NO: 2859

SEQ ID NO: 3134 - protein, 2094 aa, synthetic construct; identical to SEQ ID NO: 2854

SEQ ID NO: 3135 - protein, 2091 aa, synthetic construct; identical to SEQ ID NO: 2832

SEQ ID NO: 3136 - protein, 2096 aa, synthetic construct
MPAAKRVKLDGGDKKYSIGLDIGTNSVGWAVITDEYKVPSKKFKVLGNTDRHSIKKNLIGALLFDSGETAEATRLKRTARRRYTRRKNRICYLQEIFSNEMAKVDDSFFHRLEESFLVEEDKKHERHPIFGNIVDEVAYHEKYPTIYHLRKKLVDSTDKADLRLIYLALAHMIKFRGHFLIEGDLNPDNSDVDKLFIQLVQTYNQLFEENPINASGVDAKAILSARLSKSRRLENLIAQLPGEKKNGLFGNLIALSLGLTPNFKSNFDLAEDAKLQLSKDTYDDDLDNLLAQIGDQYADLFLAAKNLSDAILLSDILRVNTEITKAPLSASMIKRYDEHHQDLTLLKALVRQQLPEKYKEIFFDQSKNGYAGYIDGGASQEEFYKFIKPILEKMDGTEELLVKLNREDLLRKQRTFDNGSIPHQIHLGELHAILRRQEDFYPFLKDNREKIEKILTFRIPYYVGPLARGNSRFAWMTRKSEETITPWNFEEVVDKGASAQSFIERMTNFDKNLPNEKVLPKHSLLYEYFTVYNELTKVKYVTEGMRKPAFLSGEQKKAIVDLLFKTNRKVTVKQLKEDYFKKIECFDSVEISGVEDRFNASLGTYHDLLKIIKDKDFLDNEENEDILEDIVLTLTLFEDREMIEERLKTYAHLFDDKVMKQLKRRRYTGWGRLSRKLINGIRDKQSGKTILDFLKSDGFANRNFMQLIHDDSLTFKEDIQKAQVSGQGDSLHEHIANLAGSPAIKKGILQTVKVVDELVKVMGRHKPENIVIEMARENQTTQKGQKNSRERMKRIEEGIKELGSQILKEHPVENTQLQNEKLYLYYLQNGRDMYVDQELDINRLSDYDVDHIVPQSFLKDDSIDNKVLTRSDKARGKSDNVPSEEVVKKMKNYWRQLLNAKLITQRKFDNLTKAERGGLSELDKAGFIKRQLVETRQITKHVAQILDSRMNTKYDENDKLIREVKVITLKSKLVSDFRKDFQFYKVREINNYHHAHDAYLNAVVGTALIKKYPKLESEFVYGDYKVYDVRKMIAKSEQEIGKATAKYFFYSNIMNFFKTEITLANGEIRKRPLIETNGETGEIVWDKGRDFATVRKVLSMPQVNIVKKTEVQTGGFSKESILPKRNSDKLIARKKDWDPKKYGGFDSPTVAYSVLVVAKVEKGKSKKLKSVKELLGITIMERSSFEKNPIDFLEAKGYKEVKKDLIIKLPKYSLFELENGRKRMLASAGELQKGNELALPSKYVNFLYLASHYEKLKGSPEDNEQKQLFVEQHKHYLDEIIEQISEFSKRVILADANLDKVLSAYNKHRDKPIREQAENIIHLFTLTNLGAPAAFKYFDTTIDRKRYTSTKEVLDATLIHQSITGLYETRIDLSQLGGDGGGGGPAPEAAAKGGTLNIEDEHRLHETSKEPDVSLGSTWLSDFPQAWAETGGMGLAVRQAPLIIPLKATSTPVSIKQYPMSQEARLGIKPHIQRLLDQGILVPCQSPWNTPLLPVKKPGTNDYRPVQDLREVNKRVEDIHPTVPNPYNLLSGLPPSHQWYTVLDLKDAFFCLRLHPTSQPLFAFEWRDPEMGISGQLTWTRLPQGFKNSPTLFNEALHRDLADFRIQHPDLILLQYVDDLLLAATSELDCQQGTRALLQTLGNLGYRASAKKAQICQKQVKYLGYLLKEGQRWLTEARKETVMGQPTPKTPRQLREFLGKAGFCRLFIPGFAEMAAPLYPLTKPGTLFNWGPDQQKAYQEIKQALLTAPALGLPDLTKPFELFVDEKQGYAKGVLTQKLGPWRRPVAYLSKKLDPVAAGWPPCLRMVAAIAVLTKDAGKLTMGQPLVILAPHAVEALVKQPPDRWLSNARMTHYQALLLDTDRVQFGPVVALNPATLLPLPEEGLQHNCLDILAEAHGTRPDLTDQPLPDADHTWYTDGSSLLQEGQRKAGAAVTTETEVIWAKALPAGTSAQRAELIALTQALKMAEGKKLNVYTDSRYAFATAHIHGEIYRRRGWLTSEGKEIKNKDEILALLKALFLPKRLSIIHCPGHQKGHSAEARGNRMADQAARKAAITETPDTSTLLAGKRTADGSEFEKRTADGSEFESPKKKAKVE

SEQ ID NO: 3137 - protein, 2091 aa, synthetic construct
MPAAKRVKLDGGDKKYSIGLDIGTNSVGWAVITDEYKVPSKKFKVLGNTDRHSIKKNLIGALLFDSGETAEATRLKRTARRRYTRRKNRICYLQEIFSNEMAKVDDSFFHRLEESFLVEEDKKHERHPIFGNIVDEVAYHEKYPTIYHLRKKLVDSTDKADLRLIYLALAHMIKFRGHFLIEGDLNPDNSDVDKLFIQLVQTYNQLFEENPINASGVDAKAILSARLSKSRRLENLIAQLPGEKKNGLFGNLIALSLGLTPNFKSNFDLAEDAKLQLSKDTYDDDLDNLLAQIGDQYADLFLAAKNLSDAILLSDILRVNTEITKAPLSASMIKRYDEHHQDLTLLKALVRQQLPEKYKEIFFDQSKNGYAGYIDGGASQEEFYKFIKPILEKMDGTEELLVKLNREDLLRKQRTFDNGSIPHQIHLGELHAILRRQEDFYPFLKDNREKIEKILTFRIPYYVGPLARGNSRFAWMTRKSEETITPWNFEEVVDKGASAQSFIERMTNFDKNLPNEKVLPKHSLLYEYFTVYNELTKVKYVTEGMRKPAFLSGEQKKAIVDLLFKTNRKVTVKQLKEDYFKKIECFDSVEISGVEDRFNASLGTYHDLLKIIKDKDFLDNEENEDILEDIVLTLTLFEDREMIEERLKTYAHLFDDKVMKQLKRRRYTGWGRLSRKLINGIRDKQSGKTILDFLKSDGFANRNFMQLIHDDSLTFKEDIQKAQVSGQGDSLHEHIANLAGSPAIKKGILQTVKVVDELVKVMGRHKPENIVIEMARENQTTQKGQKNSRERMKRIEEGIKELGSQILKEHPVENTQLQNEKLYLYYLQNGRDMYVDQELDINRLSDYDVDHIVPQSFLKDDSIDNKVLTRSDKARGKSDNVPSEEVVKKMKNYWRQLLNAKLITQRKFDNLTKAERGGLSELDKAGFIKRQLVETRQITKHVAQILDSRMNTKYDENDKLIREVKVITLKSKLVSDFRKDFQFYKVREINNYHHAHDAYLNAVVGTALIKKYPKLESEFVYGDYKVYDVRKMIAKSEQEIGKATAKYFFYSNIMNFFKTEITLANGEIRKRPLIETNGETGEIVWDKGRDFATVRKVLSMPQVNIVKKTEVQTGGFSKESILPKRNSDKLIARKKDWDPKKYGGFDSPTVAYSVLVVAKVEKGKSKKLKSVKELLGITIMERSSFEKNPIDFLEAKGYKEVKKDLIIKLPKYSLFELENGRKRMLASAGELQKGNELALPSKYVNFLYLASHYEKLKGSPEDNEQKQLFVEQHKHYLDEIIEQISEFSKRVILADANLDKVLSAYNKHRDKPIREQAENIIHLFTLTNLGAPAAFKYFDTTIDRKRYTSTKEVLDATLIHQSITGLYETRIDLSQLGGDGGPAPGGGGGTLNIEDEYRLHEISTEPDVSPGSTWLSDFPQAWAETGGMGLAVRQAPLIIPLKATSTPVSIKQYPMSQEAKLGIKPHIQRLLDQGILVPCQSPWNTPLLPVKKPGTNDYRPVQGLREVNKRVEDIHPTVPNPYNLLSGLPTSHRWYTVLDLKDAFFCLRLHPTSQPLFASEWRDPGMGISGQLTWTRLPQGFKNSPTLFDEALHRGLADFRIQHPDLILLQYVDDLLLAATSELDCQQGTRALLKTLGNLGYRASAKKAQICQKQVKYLGYLLREGQRWLTEARKETVMGQPTPKTPRQLREFLGTAGFCRLWIPRFAEMAAPLYPLTKTGTLFNWGPDQQKAYHEIKQALLTAPALGLPDLTKPFELFVDEKQGYAKGVLTQKLGPWRRPVAYLSKKLDPVAAGWPPCLRMVAAIAVLTKDAGKLTMGQPLVILAPHAVEALVKQPPDRWLSNARMTHYQAMLLDTDRVQFGPVVALNPATLLPLPEEGAPHDCLEILAETHGTEPDLTDQPIPDADHTWYTDGSSFLQEGQRKAGAAVTTETEVIWARALPAGTSAQRAELIALTQALKMAEGKRLNVYTDSRYAFATAHIHGEIYKRRGLLTSEGREIKNKSEILALLKALFLPKRLSIIHCLGHQKGDSAEARGNRLADQAAREAAIKTPPDTSTLLAGKRTADGSEFEKRTADGSEFESPKKKAKVE

SEQ ID NO: 3138 - protein, 2088 aa, synthetic construct
MPAAKRVKLDGGDKKYSIGLDIGTNSVGWAVITDEYKVPSKKFKVLGNTDRHSIKKNLIGALLFDSGETAEATRLKRTARRRYTRRKNRICYLQEIFSNEMAKVDDSFFHRLEESFLVEEDKKHERHPIFGNIVDEVAYHEKYPTIYHLRKKLVDSTDKADLRLIYLALAHMIKFRGHFLIEGDLNPDNSDVDKLFIQLVQTYNQLFEENPINASGVDAKAILSARLSKSRRLENLIAQLPGEKKNGLFGNLIALSLGLTPNFKSNFDLAEDAKLQLSKDTYDDDLDNLLAQIGDQYADLFLAAKNLSDAILLSDILRVNTEITKAPLSASMIKRYDEHHQDLTLLKALVRQQLPEKYKEIFFDQSKNGYAGYIDGGASQEEFYKFIKPILEKMDGTEELLVKLNREDLLRKQRTFDNGSIPHQIHLGELHAILRRQEDFYPFLKDNREKIEKILTFRIPYYVGPLARGNSRFAWMTRKSEETITPWNFEEVVDKGASAQSFIERMTNFDKNLPNEKVLPKHSLLYEYFTVYNELTKVKYVTEGMRKPAFLSGEQKKAIVDLLFKTNRKVTVKQLKEDYFKKIECFDSVEISGVEDRFNASLGTYHDLLKIIKDKDFLDNEENEDILEDIVLTLTLFEDREMIEERLKTYAHLFDDKVMKQLKRRRYTGWGRLSRKLINGIRDKQSGKTILDFLKSDGFANRNFMQLIHDDSLTFKEDIQKAQVSGQGDSLHEHIANLAGSPAIKKGILQTVKVVDELVKVMGRHKPENIVIEMARENQTTQKGQKNSRERMKRIEEGIKELGSQILKEHPVENTQLQNEKLYLYYLQNGRDMYVDQELDINRLSDYDVDHIVPQSFLKDDSIDNKVLTRSDKARGKSDNVPSEEVVKKMKNYWRQLLNAKLITQRKFDNLTKAERGGLSELDKAGFIKRQLVETRQITKHVAQILDSRMNTKYDENDKLIREVKVITLKSKLVSDFRKDFQFYKVREINNYHHAHDAYLNAVVGTALIKKYPKLESEFVYGDYKVYDVRKMIAKSEQEIGKATAKYFFYSNIMNFFKTEITLANGEIRKRPLIETNGETGEIVWDKGRDFATVRKVLSMPQVNIVKKTEVQTGGFSKESILPKRNSDKLIARKKDWDPKKYGGFDSPTVAYSVLVVAKVEKGKSKKLKSVKELLGITIMERSSFEKNPIDFLEAKGYKEVKKDLIIKLPKYSLFELENGRKRMLASAGELQKGNELALPSKYVNFLYLASHYEKLKGSPEDNEQKQLFVEQHKHYLDEIIEQISEFSKRVILADANLDKVLSAYNKHRDKPIREQAENIIHLFTLTNLGAPAAFKYFDTTIDRKRYTSTKEVLDATLIHQSITGLYETRIDLSQLGGDGGGGSGGTLNIEDEYRLHEISTEPDVSPGSTWLSDFPQAWAETGGMGLAVRQAPLIIPLKATSTPVSIKQYPMSQEAKLGIKPHIQRLLDQGILVPCQSPWNTPLLPVKKPGTNDYRPVQGLREVNKRVEDIHPTVPNPYNLLSGLPTSHRWYTVLDLKDAFFCLRLHPTSQPLFASEWRDPGMGISGQLTWTRLPQGFKNSPTLFNEALHRGLADFRIQHPDLILLQYVDDLLLAATSELDCQQGTRALLKTLGNLGYRASAKKAQICQKQVKYLGYLLREGQRWLTEARKETVMGQPTPKTPRQLREFLGTAGFCRLWIPRFAEMAAPLYPLTKPGTLFNWGPDQQKAYHEIKQALLTAPALGLPDLTKPFELFVDEKQGYAKGVLTQKLGPWRRPVAYLSKKLDPVAAGWPPCLRMVAAIAVLTKDAGKLTMGQPLVILAPHAVEALVKQPPDRWLSNARMTHYQAMLLDTDRVQFGPVVALNPATLLPLPEEGAPHDCLEILAETHGTEPDLTDQPIPDADHTWYTDGSSFLQEGQRKAGAAVTTETEVIWARALPAGTSAQRAELIALTQALKMAEGKRLNVYTDSRYAFATAHIHGEIYKRRGWLTSEGREIKNKSEILALLKALFLPKRLSIIHCLGHQKGDSAEARGNRLADQAAREAAIKTPPDTSTLLAGKRTADGSEFEKRTADGSEFESPKKKAKVE

SEQ ID NO: 3139 - protein, 2091 aa, synthetic construct
MPAAKRVKLDGGDKKYSIGLDIGTNSVGWAVITDEYKVPSKKFKVLGNTDRHSIKKNLIGALLFDSGETAEATRLKRTARRRYTRRKNRICYLQEIFSNEMAKVDDSFFHRLEESFLVEEDKKHERHPIFGNIVDEVAYHEKYPTIYHLRKKLVDSTDKADLRLIYLALAHMIKFRGHFLIEGDLNPDNSDVDKLFIQLVQTYNQLFEENPINASGVDAKAILSARLSKSRRLENLIAQLPGEKKNGLFGNLIALSLGLTPNFKSNFDLAEDAKLQLSKDTYDDDLDNLLAQIGDQYADLFLAAKNLSDAILLSDILRVNTEITKAPLSASMIKRYDEHHQDLTLLKALVRQQLPEKYKEIFFDQSKNGYAGYIDGGASQEEFYKFIKPILEKMDGTEELLVKLNREDLLRKQRTFDNGSIPHQIHLGELHAILRRQEDFYPFLKDNREKIEKILTFRIPYYVGPLARGNSRFAWMTRKSEETITPWNFEEVVDKGASAQSFIERMTNFDKNLPNEKVLPKHSLLYEYFTVYNELTKVKYVTEGMRKPAFLSGEQKKAIVDLLFKTNRKVTVKQLKEDYFKKIECFDSVEISGVEDRFNASLGTYHDLLKIIKDKDFLDNEENEDILEDIVLTLTLFEDREMIEERLKTYAHLFDDKVMKQLKRRRYTGWGRLSRKLINGIRDKQSGKTILDFLKSDGFANRNFMQLIHDDSLTFKEDIQKAQVSGQGDSLHEHIANLAGSPAIKKGILQTVKVVDELVKVMGRHKPENIVIEMARENQTTQKGQKNSRERMKRIEEGIKELGSQILKEHPVENTQLQNEKLYLYYLQNGRDMYVDQELDINRLSDYDVDHIVPQSFLKDDSIDNKVLTRSDKARGKSDNVPSEEVVKKMKNYWRQLLNAKLITQRKFDNLTKAERGGLSELDKAGFIKRQLVETRQITKHVAQILDSRMNTKYDENDKLIREVKVITLKSKLVSDFRKDFQFYKVREINNYHHAHDAYLNAVVGTALIKKYPKLESEFVYGDYKVYDVRKMIAKSEQEIGKATAKYFFYSNIMNFFKTEITLANGEIRKRPLIETNGETGEIVWDKGRDFATVRKVLSMPQVNIVKKTEVQTGGFSKESILPKRNSDKLIARKKDWDPKKYGGFDSPTVAYSVLVVAKVEKGKSKKLKSVKELLGITIMERSSFEKNPIDFLEAKGYKEVKKDLIIKLPKYSLFELENGRKRMLASAGELQKGNELALPSKYVNFLYLASHYEKLKGSPEDNEQKQLFVEQHKHYLDEIIEQISEFSKRVILADANLDKVLSAYNKHRDKPIREQAENIIHLFTLTNLGAPAAFKYFDTTIDRKRYTSTKEVLDATLIHQSITGLYETRIDLSQLGGDGGPAPGGSGGTLNIEDEYRLHEISTEPDVSPGSTWLSDFPQAWAETGGMGLAVRQAPLIIPLKATSTPVSIKQYPMSQEAKLGIKPHIQRLLDQGILVPCQSPWNTPLLPVKKPGTNDYRPVQGLREVNKRVEDIHPTVPNPYNLLSGLPTSHRWYTVLDLKDAFFCLRLHPTSQPLFASEWRDPGMGISGQLTWTRLPQGFKNSPTLFNEALHRGLADFRIQHPDLILLQYVDDLLLAATSELDCQQGTRALLKTLGNLGYRASAKKAQICQKQVKYLGYLLREGQRWLTEARKETVMGQPTPKTPRQLREFLGTAGFCRLWIPRFAEMAAPLYPLTKPGTLFNWGPDQQKAYHEIKQALLTAPALGLPDLTKPFELFVDEKQGYAKGVLTQKLGPWRRPVAYLSKKLDPVAAGWPPCLRMVAAIAVLTKDAGKLTMGQPLVILAPHAVEALVKQPPDRWLSNARMTHYQAMLLDTDRVQFGPVVALNPATLLPLPEEGAPHDCLEILAETHGTEPDLTDQPIPDADHTWYTDGSSFLQEGQRKAGAAVTTETEVIWARALPAGTSAQRAELIALTQALKMAEGKRLNVYTDSRYAFATAHIHGEIYKRRGWLTSEGREIKNKSEILALLKALFLPKRLSIIHCLGHQKGDSAEARGNRLADQAAREAAIKTPPDTSTLLAGKRTADGSEFEKRTADGSEFESPKKKAKVE

SEQ ID NO: 3140 - protein, 2105 aa, synthetic construct
MPAAKRVKLDGGDKKYSIGLDIGTNSVGWAVITDEYKVPSKKFKVLGNTDRHSIKKNLIGALLFDSGETAEATRLKRTARRRYTRRKNRICYLQEIFSNEMAKVDDSFFHRLEESFLVEEDKKHERHPIFGNIVDEVAYHEKYPTIYHLRKKLVDSTDKADLRLIYLALAHMIKFRGHFLIEGDLNPDNSDVDKLFIQLVQTYNQLFEENPINASGVDAKAILSARLSKSRRLENLIAQLPGEKKNGLFGNLIALSLGLTPNFKSNFDLAEDAKLQLSKDTYDDDLDNLLAQIGDQYADLFLAAKNLSDAILLSDILRVNTEITKAPLSASMIKRYDEHHQDLTLLKALVRQQLPEKYKEIFFDQSKNGYAGYIDGGASQEEFYKFIKPILEKMDGTEELLVKLNREDLLRKQRTFDNGSIPHQIHLGELHAILRRQEDFYPFLKDNREKIEKILTFRIPYYVGPLARGNSRFAWMTRKSEETITPWNFEEVVDKGASAQSFIERMTNFDKNLPNEKVLPKHSLLYEYFTVYNELTKVKYVTEGMRKPAFLSGEQKKAIVDLLFKTNRKVTVKQLKEDYFKKIECFDSVEISGVEDRFNASLGTYHDLLKIIKDKDFLDNEENEDILEDIVLTLTLFEDREMIEERLKTYAHLFDDKVMKQLKRRRYTGWGRLSRKLINGIRDKQSGKTILDFLKSDGFANRNFMQLIHDDSLTFKEDIQKAQVSGQGDSLHEHIANLAGSPAIKKGILQTVKVVDELVKVMGRHKPENIVIEMARENQTTQKGQKNSRERMKRIEEGIKELGSQILKEHPVENTQLQNEKLYLYYLQNGRDMYVDQELDINRLSDYDVDHIVPQSFLKDDSIDNKVLTRSDKARGKSDNVPSEEVVKKMKNYWRQLLNAKLITQRKFDNLTKAERGGLSELDKAGFIKRQLVETRQITKHVAQILDSRMNTKYDENDKLIREVKVITLKSKLVSDFRKDFQFYKVREINNYHHAHDAYLNAVVGTALIKKYPKLESEFVYGDYKVYDVRKMIAKSEQEIGKATAKYFFYSNIMNFFKTEITLANGEIRKRPLIETNGETGEIVWDKGRDFATVRKVLSMPQVNIVKKTEVQTGGFSKESILPKRNSDKLIARKKDWDPKKYGGFDSPTVAYSVLVVAKVEKGKSKKLKSVKELLGITIMERSSFEKNPIDFLEAKGYKEVKKDLIIKLPKYSLFELENGRKRMLASAGELQKGNELALPSKYVNFLYLASHYEKLKGSPEDNEQKQLFVEQHKHYLDEIIEQISEFSKRVILADANLDKVLSAYNKHRDKPIREQAENIIHLFTLTNLGAPAAFKYFDTTIDRKRYTSTKEVLDATLIHQSITGLYETRIDLSQLGGDGGEAAAKEAAAKEAAAKEAAAKGGTLNIEDEYRLHEISTEPDVSPGSTWLSDFPQAWAETGGMGLAVRQAPLIIPLKATSTPVSIKQYPMSQEAKLGIKPHIQRLLDQGILVPCQSPWNTPLLPVKKPGTNDYRPVQGLREVNKRVEDIHPTVPNPYNLLSGLPTSHRWYTVLDLKDAFFCLRLHPTSQPLFASEWRDPGMGISGQLTWTRLPQGFKNSPTLFNEALHRGLADFRIQHPDLILLQYVDDLLLAATSELDCQQGTRALLKTLGNLGYRASAKKAQICQKQVKYLGYLLREGQRWLTEARKETVMGQPTPKTPRQLREFLGTAGFCRLWIPRFAEMAAPLYPLTKPGTLFNWGPDQQKAYHEIKQALLTAPALGLPDLTKPFELFVDEKQGYAKGVLTQKLGPWRRPVAYLSKKLDPVAAGWPPCLRMVAAIAVLTKDAGKLTMGQPLVILAPHAVEALVKQPPDRWLSNARMTHYQAMLLDTDRVQFGPVVALNPATLLPLPEEGAPHDCLEILAETHGTEPDLTDQPIPDADHTWYTDGSSFLQEGQRKAGAAVTTETEVIWARALPAGTSAQRAELIALTQALKMAEGKRLNVYTDSRYAFATAHIHGEIYKRRGWLTSEGREIKNKSEILALLKALFLPKRLSIIHCLGHQKGDSAEARGNRLADQAAREAAIKTPPDTSTLLAGKRTADGSEFEKRTADGSEFESPKKKAKVE

SEQ ID NO: 3141 - protein, 2151 aa, synthetic construct
MPAAKRVKLDGGDKKYSIGLDIGTNSVGWAVITDEYKVPSKKFKVLGNTDRHSIKKNLIGALLFDSGETAEATRLKRTARRRYTRRKNRICYLQEIFSNEMAKVDDSFFHRLEESFLVEEDKKHERHPIFGNIVDEVAYHEKYPTIYHLRKKLVDSTDKADLRLIYLALAHMIKFRGHFLIEGDLNPDNSDVDKLFIQLVQTYNQLFEENPINASGVDAKAILSARLSKSRRLENLIAQLPGEKKNGLFGNLIALSLGLTPNFKSNFDLAEDAKLQLSKDTYDDDLDNLLAQIGDQYADLFLAAKNLSDAILLSDILRVNTEITKAPLSASMIKRYDEHHQDLTLLKALVRQQLPEKYKEIFFDQSKNGYAGYIDGGASQEEFYKFIKPILEKMDGTEELLVKLNREDLLRKQRTFDNGSIPHQIHLGELHAILRRQEDFYPFLKDNREKIEKILTFRIPYYVGPLARGNSRFAWMTRKSEETITPWNFEEVVDKGASAQSFIERMTNFDKNLPNEKVLPKHSLLYEYFTVYNELTKVKYVTEGMRKPAFLSGEQKKAIVDLLFKTNRKVTVKQLKEDYFKKIECFDSVEISGVEDRFNASLGTYHDLLKIIKDKDFLDNEENEDILEDIVLTLTLFEDREMIEERLKTYAHLFDDKVMKQLKRRRYTGWGRLSRKLINGIRDKQSGKTILDFLKSDGFANRNFMQLIHDDSLTFKEDIQKAQVSGQGDSLHEHIANLAGSPAIKKGILQTVKVVDELVKVMGRHKPENIVIEMARENQTTQKGQKNSRERMKRIEEGIKELGSQILKEHPVENTQLQNEKLYLYYLQNGRDMYVDQELDINRLSDYDVDHIVPQSFLKDDSIDNKVLTRSDKARGKSDNVPSEEVVKKMKNYWRQLLNAKLITQRKFDNLTKAERGGLSELDKAGFIKRQLVETRQITKHVAQILDSRMNTKYDENDKLIREVKVITLKSKLVSDFRKDFQFYKVREINNYHHAHDAYLNAVVGTALIKKYPKLESEFVYGDYKVYDVRKMIAKSEQEIGKATAKYFFYSNIMNFFKTEITLANGEIRKRPLIETNGETGEIVWDKGRDFATVRKVLSMPQVNIVKKTEVQTGGFSKESILPKRNSDKLIARKKDWDPKKYGGFDSPTVAYSVLVVAKVEKGKSKKLKSVKELLGITIMERSSFEKNPIDFLEAKGYKEVKKDLIIKLPKYSLFELENGRKRMLASAGELQKGNELALPSKYVNFLYLASHYEKLKGSPEDNEQKQLFVEQHKHYLDEIIEQISEFSKRVILADANLDKVLSAYNKHRDKPIREQAENIIHLFTLTNLGAPAAFKYFDTTIDRKRYTSTKEVLDATLIHQSITGLYETRIDLSQLGGDGGAEAAAKEAAAKEAAAKEAAAKALEAEAAAKEAAAKEAAAKEAAAKAGGVQEISDSRPMLHIYLNGRRFLGLLDTGADKTCIAGRDWPANWPIHQTESSLQGLGMACGVARSSQPLRWQHEDKSGIIHPFVIPTLPFTLWGRDIMKDIKVRLMTDSPDDSQDLMIGAIESNLFADQISWKSDQPVWLNQWPLKQEKLQALQQLVTEQLQLGHLEESNSPWNTPVFVIKKKSGKWRLLQDLRAVNATMHDMGALQPGLPSPVAVPKGWEIIIIDLQDCFFNIKLHPEDCKRFAFSVPSPNFKRPYQRFQWKVLPQGMKNSPTLCQKFVDKAILTVRDKYQDSYIVHYMDDILLAHPSRSIVDEILTSMIQALNKHGLVVSTEKIQKYDNLKYLGTHIQGDSVSYQKLQIRTDKLRTLNDFQKLLGNINWIRPFLKLTTGELKPLFEILNGDSNPISTRKLTPEACKALQLMNERLSTARVKRLDLSQPWSLCILKTEYTPTACLWQDGVVEWIHLPHISPKVITPYDIFCTQLIIKGRHRSKELFSKDPDYIVVPYTKVQFDLLLQEKEDWPISLLGFLGEVHFHLPKDPLLTFTLQTAIIFPHMTSTTPLEKGIVIFTDGSANGRSVTYIQGREPIIKENTQNTAQQAEIVAVITAFEEVSQPFNLYTDSKYVTGLFPEIETATLSPRTKIYTELKHLQRLIHKRQEKFYIGHIRGHTGLPGPLAQGNAYADSLTRILTAAGKRTADGSEFEKRTADGSEFESPKKKAKVE

SEQ ID NO: 3142 - protein, 2130 aa, synthetic construct
MPAAKRVKLDGGDKKYSIGLDIGTNSVGWAVITDEYKVPSKKFKVLGNTDRHSIKKNLIGALLFDSGETAEATRLKRTARRRYTRRKNRICYLQEIFSNEMAKVDDSFFHRLEESFLVEEDKKHERHPIFGNIVDEVAYHEKYPTIYHLRKKLVDSTDKADLRLIYLALAHMIKFRGHFLIEGDLNPDNSDVDKLFIQLVQTYNQLFEENPINASGVDAKAILSARLSKSRRLENLIAQLPGEKKNGLFGNLIALSLGLTPNFKSNFDLAEDAKLQLSKDTYDDDLDNLLAQIGDQYADLFLAAKNLSDAILLSDILRVNTEITKAPLSASMIKRYDEHHQDLTLLKALVRQQLPEKYKEIFFDQSKNGYAGYIDGGASQEEFYKFIKPILEKMDGTEELLVKLNREDLLRKQRTFDNGSIPHQIHLGELHAILRRQEDFYPFLKDNREKIEKILTFRIPYYVGPLARGNSRFAWMTRKSEETITPWNFEEVVDKGASAQSFIERMTNFDKNLPNEKVLPKHSLLYEYFTVYNELTKVKYVTEGMRKPAFLSGEQKKAIVDLLFKTNRKVTVKQLKEDYFKKIECFDSVEISGVEDRFNASLGTYHDLLKIIKDKDFLDNEENEDILEDIVLTLTLFEDREMIEERLKTYAHLFDDKVMKQLKRRRYTGWGRLSRKLINGIRDKQSGKTILDFLKSDGFANRNFMQLIHDDSLTFKEDIQKAQVSGQGDSLHEHIANLAGSPAIKKGILQTVKVVDELVKVMGRHKPENIVIEMARENQTTQKGQKNSRERMKRIEEGIKELGSQILKEHPVENTQLQNEKLYLYYLQNGRDMYVDQELDINRLSDYDVDHIVPQSFLKDDSIDNKVLTRSDKARGKSDNVPSEEVVKKMKNYWRQLLNAKLITQRKFDNLTKAERGGLSELDKAGFIKRQLVETRQITKHVAQILDSRMNTKYDENDKLIREVKVITLKSKLVSDFRKDFQFYKVREINNYHHAHDAYLNAVVGTALIKKYPKLESEFVYGDYKVYDVRKMIAKSEQEIGKATAKYFFYSNIMNFFKTEITLANGEIRKRPLIETNGETGEIVWDKGRDFATVRKVLSMPQVNIVKKTEVQTGGFSKESILPKRNSDKLIARKKDWDPKKYGGFDSPTVAYSVLVVAKVEKGKSKKLKSVKELLGITIMERSSFEKNPIDFLEAKGYKEVKKDLIIKLPKYSLFELENGRKRMLASAGELQKGNELALPSKYVNFLYLASHYEKLKGSPEDNEQKQLFVEQHKHYLDEIIEQISEFSKRVILADANLDKVLSAYNKHRDKPIREQAENIIHLFTLTNLGAPAAFKYFDTTIDRKRYTSTKEVLDATLIHQSITGLYETRIDLSQLGGDGGEAAAKEAAAKEAAAKEAAAKEAAAKGGVQEISDSRPMLHIYLNGRRFLGLLDTGADKTCIAGRDWPANWPIHQTESSLQGLGMACGVARSSQPLRWQHEDKSGIIHPFVIPTLPFTLWGRDIMKDIKVRLMTDSPDDSQDLMIGAIESNLFADQISWKSDQPVWLNQWPLKQEKLQALQQLVTEQLQLGHLEESNSPWNTPVFVIKKKSGKWRLLQDLRAVNATMHDMGALQPGLPSPVAVPKGWEIIIIDLQDCFFNIKLHPEDCKRFAFSVPSPNFKRPYQRFQWKVLPQGMKNSPTLCQKFVDKAILTVRDKYQDSYIVHYMDDILLAHPSRSIVDEILTSMIQALNKHGLVVSTEKIQKYDNLKYLGTHIQGDSVSYQKLQIRTDKLRTLNDFQKLLGNINWIRPFLKLTTGELKPLFEILNGDSNPISTRKLTPEACKALQLMNERLSTARVKRLDLSQPWSLCILKTEYTPTACLWQDGVVEWIHLPHISPKVITPYDIFCTQLIIKGRHRSKELFSKDPDYIVVPYTKVQFDLLLQEKEDWPISLLGFLGEVHFHLPKDPLLTFTLQTAIIFPHMTSTTPLEKGIVIFTDGSANGRSVTYIQGREPIIKENTQNTAQQAEIVAVITAFEEVSQPFNLYTDSKYVTGLFPEIETATLSPRTKIYTELKHLQRLIHKRQEKFYIGHIRGHTGLPGPLAQGNAYADSLTRILTAAGKRTADGSEFEKRTADGSEFESPKKKAKVE

SEQ ID NO: 3143 - protein, 2138 aa, synthetic construct
MPAAKRVKLDGGDKKYSIGLDIGTNSVGWAVITDEYKVPSKKFKVLGNTDRHSIKKNLIGALLFDSGETAEATRLKRTARRRYTRRKNRICYLQEIFSNEMAKVDDSFFHRLEESFLVEEDKKHERHPIFGNIVDEVAYHEKYPTIYHLRKKLVDSTDKADLRLIYLALAHMIKFRGHFLIEGDLNPDNSDVDKLFIQLVQTYNQLFEENPINASGVDAKAILSARLSKSRRLENLIAQLPGEKKNGLFGNLIALSLGLTPNFKSNFDLAEDAKLQLSKDTYDDDLDNLLAQIGDQYADLFLAAKNLSDAILLSDILRVNTEITKAPLSASMIKRYDEHHQDLTLLKALVRQQLPEKYKEIFFDQSKNGYAGYIDGGASQEEFYKFIKPILEKMDGTEELLVKLNREDLLRKQRTFDNGSIPHQIHLGELHAILRRQEDFYPFLKDNREKIEKILTFRIPYYVGPLARGNSRFAWMTRKSEETITPWNFEEVVDKGASAQSFIERMTNFDKNLPNEKVLPKHSLLYEYFTVYNELTKVKYVTEGMRKPAFLSGEQKKAIVDLLFKTNRKVTVKQLKEDYFKKIECFDSVEISGVEDRFNASLGTYHDLLKIIKDKDFLDNEENEDILEDIVLTLTLFEDREMIEERLKTYAHLFDDKVMKQLKRRRYTGWGRLSRKLINGIRDKQSGKTILDFLKSDGFANRNFMQLIHDDSLTFKEDIQKAQVSGQGDSLHEHIANLAGSPAIKKGILQTVKVVDELVKVMGRHKPENIVIEMARENQTTQKGQKNSRERMKRIEEGIKELGSQILKEHPVENTQLQNEKLYLYYLQNGRDMYVDQELDINRLSDYDVDHIVPQSFLKDDSIDNKVLTRSDKARGKSDNVPSEEVVKKMKNYWRQLLNAKLITQRKFDNLTKAERGGLSELDKAGFIKRQLVETRQITKHVAQILDSRMNTKYDENDKLIREVKVITLKSKLVSDFRKDFQFYKVREINNYHHAHDAYLNAVVGTALIKKYPKLESEFVYGDYKVYDVRKMIAKSEQEIGKATAKYFFYSNIMNFFKTEITLANGEIRKRPLIETNGETGEIVWDKGRDFATVRKVLSMPQVNIVKKTEVQTGGFSKESILPKRNSDKLIARKKDWDPKKYGGFDSPTVAYSVLVVAKVEKGKSKKLKSVKELLGITIMERSSFEKNPIDFLEAKGYKEVKKDLIIKLPKYSLFELENGRKRMLASAGELQKGNELALPSKYVNFLYLASHYEKLKGSPEDNEQKQLFVEQHKHYLDEIIEQISEFSKRVILADANLDKVLSAYNKHRDKPIREQAENIIHLFTLTNLGAPAAFKYFDTTIDRKRYTSTKEVLDATLIHQSITGLYETRIDLSQLGGDGGSGGSSGGSSGSETPGTSESATPESSGGSSGGSSGGVQEISDSRPMLHIYLNGRRFLGLLDTGADKTCIAGRDWPANWPIHQTESSLQGLGMACGVARSSQPLRWQHEDKSGIIHPFVIPTLPFTLWGRDIMKDIKVRLMTDSPDDSQDLMIGAIESNLFADQISWKSDQPVWLNQWPLKQEKLQALQQLVTEQLQLGHLEESNSPWNTPVFVIKKKSGKWRLLQDLRAVNATMHDMGALQPGLPSPVAVPKGWEIIIIDLQDCFFNIKLHPEDCKRFAFSVPSPNFKRPYQRFQWKVLPQGMKNSPTLCQKFVDKAILTVRDKYQDSYIVHYMDDILLAHPSRSIVDEILTSMIQALNKHGLVVSTEKIQKYDNLKYLGTHIQGDSVSYQKLQIRTDKLRTLNDFQKLLGNINWIRPFLKLTTGELKPLFEILNGDSNPISTRKLTPEACKALQLMNERLSTARVKRLDLSQPWSLCILKTEYTPTACLWQDGVVEWIHLPHISPKVITPYDIFCTQLIIKGRHRSKELFSKDPDYIVVPYTKVQFDLLLQEKEDWPISLLGFLGEVHFHLPKDPLLTFTLQTAIIFPHMTSTTPLEKGIVIFTDGSANGRSVTYIQGREPIIKENTQNTAQQAEIVAVITAFEEVSQPFNLYTDSKYVTGLFPEIETATLSPRTKIYTELKHLQRLIHKRQEKFYIGHIRGHTGLPGPLAQGNAYADSLTRILTAAGKRTADGSEFEKRTADGSEFESPKKKAKVE

SEQ ID NO: 3144 - protein, 2116 aa, synthetic construct
MPAAKRVKLDGGDKKYSIGLDIGTNSVGWAVITDEYKVPSKKFKVLGNTDRHSIKKNLIGALLFDSGETAEATRLKRTARRRYTRRKNRICYLQEIFSNEMAKVDDSFFHRLEESFLVEEDKKHERHPIFGNIVDEVAYHEKYPTIYHLRKKLVDSTDKADLRLIYLALAHMIKFRGHFLIEGDLNPDNSDVDKLFIQLVQTYNQLFEENPINASGVDAKAILSARLSKSRRLENLIAQLPGEKKNGLFGNLIALSLGLTPNFKSNFDLAEDAKLQLSKDTYDDDLDNLLAQIGDQYADLFLAAKNLSDAILLSDILRVNTEITKAPLSASMIKRYDEHHQDLTLLKALVRQQLPEKYKEIFFDQSKNGYAGYIDGGASQEEFYKFIKPILEKMDGTEELLVKLNREDLLRKQRTFDNGSIPHQIHLGELHAILRRQEDFYPFLKDNREKIEKILTFRIPYYVGPLARGNSRFAWMTRKSEETITPWNFEEVVDKGASAQSFIERMTNFDKNLPNEKVLPKHSLLYEYFTVYNELTKVKYVTEGMRKPAFLSGEQKKAIVDLLFKTNRKVTVKQLKEDYFKKIECFDSVEISGVEDRFNASLGTYHDLLKIIKDKDFLDNEENEDILEDIVLTLTLFEDREMIEERLKTYAHLFDDKVMKQLKRRRYTGWGRLSRKLINGIRDKQSGKTILDFLKSDGFANRNFMQLIHDDSLTFKEDIQKAQVSGQGDSLHEHIANLAGSPAIKKGILQTVKVVDELVKVMGRHKPENIVIEMARENQTTQKGQKNSRERMKRIEEGIKELGSQILKEHPVENTQLQNEKLYLYYLQNGRDMYVDQELDINRLSDYDVDHIVPQSFLKDDSIDNKVLTRSDKARGKSDNVPSEEVVKKMKNYWRQLLNAKLITQRKFDNLTKAERGGLSELDKAGFIKRQLVETRQITKHVAQILDSRMNTKYDENDKLIREVKVITLKSKLVSDFRKDFQFYKVREINNYHHAHDAYLNAVVGTALIKKYPKLESEFVYGDYKVYDVRKMIAKSEQEIGKATAKYFFYSNIMNFFKTEITLANGEIRKRPLIETNGETGEIVWDKGRDFATVRKVLSMPQVNIVKKTEVQTGGFSKESILPKRNSDKLIARKKDWDPKKYGGFDSPTVAYSVLVVAKVEKGKSKKLKSVKELLGITIMERSSFEKNPIDFLEAKGYKEVKKDLIIKLPKYSLFELENGRKRMLASAGELQKGNELALPSKYVNFLYLASHYEKLKGSPEDNEQKQLFVEQHKHYLDEIIEQISEFSKRVILADANLDKVLSAYNKHRDKPIREQAENIIHLFTLTNLGAPAAFKYFDTTIDRKRYTSTKEVLDATLIHQSITGLYETRIDLSQLGGDGGGGGEAAAKGGSGGVQEISDSRPMLHIYLNGRRFLGLLDTGADKTCIAGRDWPANWPIHQTESSLQGLGMACGVARSSQPLRWQHEDKSGIIHPFVIPTLPFTLWGRDIMKDIKVRLMTDSPDDSQDLMIGAIESNLFADQISWKSDQPVWLNQWPLKQEKLQALQQLVTEQLQLGHLEESNSPWNTPVFVIKKKSGKWRLLQDLRAVNATMHDMGALQPGLPSPVAVPKGWEIIIIDLQDCFFNIKLHPEDCKRFAFSVPSPNFKRPYQRFQWKVLPQGMKNSPTLCQKFVDKAILTVRDKYQDSYIVHYMDDILLAHPSRSIVDEILTSMIQALNKHGLVVSTEKIQKYDNLKYLGTHIQGDSVSYQKLQIRTDKLRTLNDFQKLLGNINWIRPFLKLTTGELKPLFEILNGDSNPISTRKLTPEACKALQLMNERLSTARVKRLDLSQPWSLCILKTEYTPTACLWQDGVVEWIHLPHISPKVITPYDIFCTQLIIKGRHRSKELFSKDPDYIVVPYTKVQFDLLLQEKEDWPISLLGFLGEVHFHLPKDPLLTFTLQTAIIFPHMTSTTPLEKGIVIFTDGSANGRSVTYIQGREPIIKENTQNTAQQAEIVAVITAFEEVSQPFNLYTDSKYVTGLFPEIETATLSPRTKIYTELKHLQRLIHKRQEKFYIGHIRGHTGLPGPLAQGNAYADSLTRILTAAGKRTADGSEFEKRTADGSEFESPKKKAKVE

SEQ ID NO: 3145 - protein, 2113 aa, synthetic construct
MPAAKRVKLDGGDKKYSIGLDIGTNSVGWAVITDEYKVPSKKFKVLGNTDRHSIKKNLIGALLFDSGETAEATRLKRTARRRYTRRKNRICYLQEIFSNEMAKVDDSFFHRLEESFLVEEDKKHERHPIFGNIVDEVAYHEKYPTIYHLRKKLVDSTDKADLRLIYLALAHMIKFRGHFLIEGDLNPDNSDVDKLFIQLVQTYNQLFEENPINASGVDAKAILSARLSKSRRLENLIAQLPGEKKNGLFGNLIALSLGLTPNFKSNFDLAEDAKLQLSKDTYDDDLDNLLAQIGDQYADLFLAAKNLSDAILLSDILRVNTEITKAPLSASMIKRYDEHHQDLTLLKALVRQQLPEKYKEIFFDQSKNGYAGYIDGGASQEEFYKFIKPILEKMDGTEELLVKLNREDLLRKQRTFDNGSIPHQIHLGELHAILRRQEDFYPFLKDNREKIEKILTFRIPYYVGPLARGNSRFAWMTRKSEETITPWNFEEVVDKGASAQSFIERMTNFDKNLPNEKVLPKHSLLYEYFTVYNELTKVKYVTEGMRKPAFLSGEQKKAIVDLLFKTNRKVTVKQLKEDYFKKIECFDSVEISGVEDRFNASLGTYHDLLKIIKDKDFLDNEENEDILEDIVLTLTLFEDREMIEERLKTYAHLFDDKVMKQLKRRRYTGWGRLSRKLINGIRDKQSGKTILDFLKSDGFANRNFMQLIHDDSLTFKEDIQKAQVSGQGDSLHEHIANLAGSPAIKKGILQTVKVVDELVKVMGRHKPENIVIEMARENQTTQKGQKNSRERMKRIEEGIKELGSQILKEHPVENTQLQNEKLYLYYLQNGRDMYVDQELDINRLSDYDVDHIVPQSFLKDDSIDNKVLTRSDKARGKSDNVPSEEVVKKMKNYWRQLLNAKLITQRKFDNLTKAERGGLSELDKAGFIKRQLVETRQITKHVAQILDSRMNTKYDENDKLIREVKVITLKSKLVSDFRKDFQFYKVREINNYHHAHDAYLNAVVGTALIKKYPKLESEFVYGDYKVYDVRKMIAKSEQEIGKATAKYFFYSNIMNFFKTEITLANGEIRKRPLIETNGETGEIVWDKGRDFATVRKVLSMPQVNIVKKTEVQTGGFSKESILPKRNSDKLIARKKDWDPKKYGGFDSPTVAYSVLVVAKVEKGKSKKLKSVKELLGITIMERSSFEKNPIDFLEAKGYKEVKKDLIIKLPKYSLFELENGRKRMLASAGELQKGNELALPSKYVNFLYLASHYEKLKGSPEDNEQKQLFVEQHKHYLDEIIEQISEFSKRVILADANLDKVLSAYNKHRDKPIREQAENIIHLFTLTNLGAPAAFKYFDTTIDRKRYTSTKEVLDATLIHQSITGLYETRIDLSQLGGDGGPAPEAAAKGGVQEISDSRPMLHIYLNGRRFLGLLDTGADKTCIAGRDWPANWPIHQTESSLQGLGMACGVARSSQPLRWQHEDKSGIIHPFVIPTLPFTLWGRDIMKDIKVRLMTDSPDDSQDLMIGAIESNLFADQISWKSDQPVWLNQWPLKQEKLQALQQLVTEQLQLGHLEESNSPWNTPVFVIKKKSGKWRLLQDLRAVNATMHDMGALQPGLPSPVAVPKGWEIIIIDLQDCFFNIKLHPEDCKRFAFSVPSPNFKRPYQRFQWKVLPQGMKNSPTLCQKFVDKAILTVRDKYQDSYIVHYMDDILLAHPSRSIVDEILTSMIQALNKHGLVVSTEKIQKYDNLKYLGTHIQGDSVSYQKLQIRTDKLRTLNDFQKLLGNINWIRPFLKLTTGELKPLFEILNGDSNPISTRKLTPEACKALQLMNERLSTARVKRLDLSQPWSLCILKTEYTPTACLWQDGVVEWIHLPHISPKVITPYDIFCTQLIIKGRHRSKELFSKDPDYIVVPYTKVQFDLLLQEKEDWPISLLGFLGEVHFHLPKDPLLTFTLQTAIIFPHMTSTTPLEKGIVIFTDGSANGRSVTYIQGREPIIKENTQNTAQQAEIVAVITAFEEVSQPFNLYTDSKYVTGLFPEIETATLSPRTKIYTELKHLQRLIHKRQEKFYIGHIRGHTGLPGPLAQGNAYADSLTRILTAAGKRTADGSEFEKRTADGSEFESPKKKAKVE

SEQ ID NO: 3146 - protein, 2116 aa, synthetic construct
MPAAKRVKLDGGDKKYSIGLDIGTNSVGWAVITDEYKVPSKKFKVLGNTDRHSIKKNLIGALLFDSGETAEATRLKRTARRRYTRRKNRICYLQEIFSNEMAKVDDSFFHRLEESFLVEEDKKHERHPIFGNIVDEVAYHEKYPTIYHLRKKLVDSTDKADLRLIYLALAHMIKFRGHFLIEGDLNPDNSDVDKLFIQLVQTYNQLFEENPINASGVDAKAILSARLSKSRRLENLIAQLPGEKKNGLFGNLIALSLGLTPNFKSNFDLAEDAKLQLSKDTYDDDLDNLLAQIGDQYADLFLAAKNLSDAILLSDILRVNTEITKAPLSASMIKRYDEHHQDLTLLKALVRQQLPEKYKEIFFDQSKNGYAGYIDGGASQEEFYKFIKPILEKMDGTEELLVKLNREDLLRKQRTFDNGSIPHQIHLGELHAILRRQEDFYPFLKDNREKIEKILTFRIPYYVGPLARGNSRFAWMTRKSEETITPWNFEEVVDKGASAQSFIERMTNFDKNLPNEKVLPKHSLLYEYFTVYNELTKVKYVTEGMRKPAFLSGEQKKAIVDLLFKTNRKVTVKQLKEDYFKKIECFDSVEISGVEDRFNASLGTYHDLLKIIKDKDFLDNEENEDILEDIVLTLTLFEDREMIEERLKTYAHLFDDKVMKQLKRRRYTGWGRLSRKLINGIRDKQSGKTILDFLKSDGFANRNFMQLIHDDSLTFKEDIQKAQVSGQGDSLHEHIANLAGSPAIKKGILQTVKVVDELVKVMGRHKPENIVIEMARENQTTQKGQKNSRERMKRIEEGIKELGSQILKEHPVENTQLQNEKLYLYYLQNGRDMYVDQELDINRLSDYDVDHIVPQSFLKDDSIDNKVLTRSDKARGKSDNVPSEEVVKKMKNYWRQLLNAKLITQRKFDNLTKAERGGLSELDKAGFIKRQLVETRQITKHVAQILDSRMNTKYDENDKLIREVKVITLKSKLVSDFRKDFQFYKVREINNYHHAHDAYLNAVVGTALIKKYPKLESEFVYGDYKVYDVRKMIAKSEQEIGKATAKYFFYSNIMNFFKTEITLANGEIRKRPLIETNGETGEIVWDKGRDFATVRKVLSMPQVNIVKKTEVQTGGFSKESILPKRNSDKLIARKKDWDPKKYGGFDSPTVAYSVLVVAKVEKGKSKKLKSVKELLGITIMERSSFEKNPIDFLEAKGYKEVKKDLIIKLPKYSLFELENGRKRMLASAGELQKGNELALPSKYVNFLYLASHYEKLKGSPEDNEQKQLFVEQHKHYLDEIIEQISEFSKRVILADANLDKVLSAYNKHRDKPIREQAENIIHLFTLTNLGAPAAFKYFDTTIDRKRYTSTKEVLDATLIHQSITGLYETRIDLSQLGGDGGPAPGGGEAAAKGGVQEISDSRPMLHIYLNGRRFLGLLDTGADKTCIAGRDWPANWPIHQTESSLQGLGMACGVARSSQPLRWQHEDKSGIIHPFVIPTLPFTLWGRDIMKDIKVRLMTDSPDDSQDLMIGAIESNLFADQISWKSDQPVWLNQWPLKQEKLQALQQLVTEQLQLGHLEESNSPWNTPVFVIKKKSGKWRLLQDLRAVNATMHDMGALQPGLPSPVAVPKGWEIIIIDLQDCFFNIKLHPEDCKRFAFSVPSPNFKRPYQRFQWKVLPQGMKNSPTLCQKFVDKAILTVRDKYQDSYIVHYMDDILLAHPSRSIVDEILTSMIQALNKHGLVVSTEKIQKYDNLKYLGTHIQGDSVSYQKLQIRTDKLRTLNDFQKLLGNINWIRPFLKLTTGELKPLFEILNGDSNPISTRKLTPEACKALQLMNERLSTARVKRLDLSQPWSLCILKTEYTPTACLWQDGVVEWIHLPHISPKVITPYDIFCTQLIIKGRHRSKELFSKDPDYIVVPYTKVQFDLLLQEKEDWPISLLGFLGEVHFHLPKDPLLTFTLQTAIIFPHMTSTTPLEKGIVIFTDGSANGRSVTYIQGREPIIKENTQNTAQQAEIVAVITAFEEVSQPFNLYTDSKYVTGLFPEIETATLSPRTKIYTELKHLQRLIHKRQEKFYIGHIRGHTGLPGPLAQGNAYADSLTRILTAAGKRTADGSEFEKRTADGSEFESPKKKAKVE

SEQ ID NO: 3147 - protein, 2116 aa, synthetic construct
MPAAKRVKLDGGDKKYSIGLDIGTNSVGWAVITDEYKVPSKKFKVLGNTDRHSIKKNLIGALLFDSGETAEATRLKRTARRRYTRRKNRICYLQEIFSNEMAKVDDSFFHRLEESFLVEEDKKHERHPIFGNIVDEVAYHEKYPTIYHLRKKLVDSTDKADLRLIYLALAHMIKFRGHFLIEGDLNPDNSDVDKLFIQLVQTYNQLFEENPINASGVDAKAILSARLSKSRRLENLIAQLPGEKKNGLFGNLIALSLGLTPNFKSNFDLAEDAKLQLSKDTYDDDLDNLLAQIGDQYADLFLAAKNLSDAILLSDILRVNTEITKAPLSASMIKRYDEHHQDLTLLKALVRQQLPEKYKEIFFDQSKNGYAGYIDGGASQEEFYKFIKPILEKMDGTEELLVKLNREDLLRKQRTFDNGSIPHQIHLGELHAILRRQEDFYPFLKDNREKIEKILTFRIPYYVGPLARGNSRFAWMTRKSEETITPWNFEEVVDKGASAQSFIERMTNFDKNLPNEKVLPKHSLLYEYFTVYNELTKVKYVTEGMRKPAFLSGEQKKAIVDLLFKTNRKVTVKQLKEDYFKKIECFDSVEISGVEDRFNASLGTYHDLLKIIKDKDFLDNEENEDILEDIVLTLTLFEDREMIEERLKTYAHLFDDKVMKQLKRRRYTGWGRLSRKLINGIRDKQSGKTILDFLKSDGFANRNFMQLIHDDSLTFKEDIQKAQVSGQGDSLHEHIANLAGSPAIKKGILQTVKVVDELVKVMGRHKPENIVIEMARENQTTQKGQKNSRERMKRIEEGIKELGSQILKEHPVENTQLQNEKLYLYYLQNGRDMYVDQELDINRLSDYDVDHIVPQSFLKDDSIDNKVLTRSDKARGKSDNVPSEEVVKKMKNYWRQLLNAKLITQRKFDNLTKAERGGLSELDKAGFIKRQLVETRQITKHVAQILDSRMNTKYDENDKLIREVKVITLKSKLVSDFRKDFQFYKVREINNYHHAHDAYLNAVVGTALIKKYPKLESEFVYGDYKVYDVRKMIAKSEQEIGKATAKYFFYSNIMNFFKTEITLANGEIRKRPLIETNGETGEIVWDKGRDFATVRKVLSMPQVNIVKKTEVQTGGFSKESILPKRNSDKLIARKKDWDPKKYGGFDSPTVAYSVLVVAKVEKGKSKKLKSVKELLGITIMERSSFEKNPIDFLEAKGYKEVKKDLIIKLPKYSLFELENGRKRMLASAGELQKGNELALPSKYVNFLYLASHYEKLKGSPEDNEQKQLFVEQHKHYLDEIIEQISEFSKRVILADANLDKVLSAYNKHRDKPIREQAENIIHLFTLTNLGAPAAFKYFDTTIDRKRYTSTKEVLDATLIHQSITGLYETRIDLSQLGGDGGGSSEAAAKGGGGGVQEISDSRPMLHIYLNGRRFLGLLDTGADKTCIAGRDWPANWPIHQTESSLQGLGMACGVARSSQPLRWQHEDKSGIIHPFVIPTLPFTLWGRDIMKDIKVRLMTDSPDDSQDLMIGAIESNLFADQISWKSDQPVWLNQWPLKQEKLQALQQLVTEQLQLGHLEESNSPWNTPVFVIKKKSGKWRLLQDLRAVNATMHDMGALQPGLPSPVAVPKGWEIIIIDLQDCFFNIKLHPEDCKRFAFSVPSPNFKRPYQRFQWKVLPQGMKNSPTLCQKFVDKAILTVRDKYQDSYIVHYMDDILLAHPSRSIVDEILTSMIQALNKHGLVVSTEKIQKYDNLKYLGTHIQGDSVSYQKLQIRTDKLRTLNDFQKLLGNINWIRPFLKLTTGELKPLFEILNGDSNPISTRKLTPEACKALQLMNERLSTARVKRLDLSQPWSLCILKTEYTPTACLWQDGVVEWIHLPHISPKVITPYDIFCTQLIIKGRHRSKELFSKDPDYIVVPYTKVQFDLLLQEKEDWPISLLGFLGEVHFHLPKDPLLTFTLQTAIIFPHMTSTTPLEKGIVIFTDGSANGRSVTYIQGREPIIKENTQNTAQQAEIVAVITAFEEVSQPFNLYTDSKYVTGLFPEIETATLSPRTKIYTELKHLQRLIHKRQEKFYIGHIRGHTGLPGPLAQGNAYADSLTRILTAAGKRTADGSEFEKRTADGSEFESPKKKAKVE

SEQ ID NO: 3148 - protein, 2116 aa, synthetic construct
MPAAKRVKLDGGDKKYSIGLDIGTNSVGWAVITDEYKVPSKKFKVLGNTDRHSIKKNLIGALLFDSGETAEATRLKRTARRRYTRRKNRICYLQEIFSNEMAKVDDSFFHRLEESFLVEEDKKHERHPIFGNIVDEVAYHEKYPTIYHLRKKLVDSTDKADLRLIYLALAHMIKFRGHFLIEGDLNPDNSDVDKLFIQLVQTYNQLFEENPINASGVDAKAILSARLSKSRRLENLIAQLPGEKKNGLFGNLIALSLGLTPNFKSNFDLAEDAKLQLSKDTYDDDLDNLLAQIGDQYADLFLAAKNLSDAILLSDILRVNTEITKAPLSASMIKRYDEHHQDLTLLKALVRQQLPEKYKEIFFDQSKNGYAGYIDGGASQEEFYKFIKPILEKMDGTEELLVKLNREDLLRKQRTFDNGSIPHQIHLGELHAILRRQEDFYPFLKDNREKIEKILTFRIPYYVGPLARGNSRFAWMTRKSEETITPWNFEEVVDKGASAQSFIERMTNFDKNLPNEKVLPKHSLLYEYFTVYNELTKVKYVTEGMRKPAFLSGEQKKAIVDLLFKTNRKVTVKQLKEDYFKKIECFDSVEISGVEDRFNASLGTYHDLLKIIKDKDFLDNEENEDILEDIVLTLTLFEDREMIEERLKTYAHLFDDKVMKQLKRRRYTGWGRLSRKLINGIRDKQSGKTILDFLKSDGFANRNFMQLIHDDSLTFKEDIQKAQVSGQGDSLHEHIANLAGSPAIKKGILQTVKVVDELVKVMGRHKPENIVIEMARENQTTQKGQKNSRERMKRIEEGIKELGSQILKEHPVENTQLQNEKLYLYYLQNGRDMYVDQELDINRLSDYDVDHIVPQSFLKDDSIDNKVLTRSDKARGKSDNVPSEEVVKKMKNYWRQLLNAKLITQRKFDNLTKAERGGLSELDKAGFIKRQLVETRQITKHVAQILDSRMNTKYDENDKLIREVKVITLKSKLVSDFRKDFQFYKVREINNYHHAHDAYLNAVVGTALIKKYPKLESEFVYGDYKVYDVRKMIAKSEQEIGKATAKYFFYSNIMNFFKTEITLANGEIRKRPLIETNGETGEIVWDKGRDFATVRKVLSMPQVNIVKKTEVQTGGFSKESILPKRNSDKLIARKKDWDPKKYGGFDSPTVAYSVLVVAKVEKGKSKKLKSVKELLGITIMERSSFEKNPIDFLEAKGYKEVKKDLIIKLPKYSLFELENGRKRMLASAGELQKGNELALPSKYVNFLYLASHYEKLKGSPEDNEQKQLFVEQHKHYLDEIIEQISEFSKRVILADANLDKVLSAYNKHRDKPIREQAENIIHLFTLTNLGAPAAFKYFDTTIDRKRYTSTKEVLDATLIHQSITGLYETRIDLSQLGGDGGEAAAKGGSGSSGGVQEISDSRPMLHIYLNGRRFLGLLDTGADKTCIAGRDWPANWPIHQTESSLQGLGMACGVARSSQPLRWQHEDKSGIIHPFVIPTLPFTLWGRDIMKDIKVRLMTDSPDDSQDLMIGAIESNLFADQISWKSDQPVWLNQWPLKQEKLQALQQLVTEQLQLGHLEESNSPWNTPVFVIKKKSGKWRLLQDLRAVNATMHDMGALQPGLPSPVAVPKGWEIIIIDLQDCFFNIKLHPEDCKRFAFSVPSPNFKRPYQRFQWKVLPQGMKNSPTLCQKFVDKAILTVRDKYQDSYIVHYMDDILLAHPSRSIVDEILTSMIQALNKHGLVVSTEKIQKYDNLKYLGTHIQGDSVSYQKLQIRTDKLRTLNDFQKLLGNINWIRPFLKLTTGELKPLFEILNGDSNPISTRKLTPEACKALQLMNERLSTARVKRLDLSQPWSLCILKTEYTPTACLWQDGVVEWIHLPHISPKVITPYDIFCTQLIIKGRHRSKELFSKDPDYIVVPYTKVQFDLLLQEKEDWPISLLGFLGEVHFHLPKDPLLTFTLQTAIIFPHMTSTTPLEKGIVIFTDGSANGRSVTYIQGREPIIKENTQNTAQQAEIVAVITAFEEVSQPFNLYTDSKYVTGLFPEIETATLSPRTKIYTELKHLQRLIHKRQEKFYIGHIRGHTGLPGPLAQGNAYADSLTRILTAAGKRTADGSEFEKRTADGSEFESPKKKAKVE

SEQ ID NO: 3149 - protein, 2116 aa, synthetic construct
MPAAKRVKLDGGDKKYSIGLDIGTNSVGWAVITDEYKVPSKKFKVLGNTDRHSIKKNLIGALLFDSGETAEATRLKRTARRRYTRRKNRICYLQEIFSNEMAKVDDSFFHRLEESFLVEEDKKHERHPIFGNIVDEVAYHEKYPTIYHLRKKLVDSTDKADLRLIYLALAHMIKFRGHFLIEGDLNPDNSDVDKLFIQLVQTYNQLFEENPINASGVDAKAILSARLSKSRRLENLIAQLPGEKKNGLFGNLIALSLGLTPNFKSNFDLAEDAKLQLSKDTYDDDLDNLLAQIGDQYADLFLAAKNLSDAILLSDILRVNTEITKAPLSASMIKRYDEHHQDLTLLKALVRQQLPEKYKEIFFDQSKNGYAGYIDGGASQEEFYKFIKPILEKMDGTEELLVKLNREDLLRKQRTFDNGSIPHQIHLGELHAILRRQEDFYPFLKDNREKIEKILTFRIPYYVGPLARGNSRFAWMTRKSEETITPWNFEEVVDKGASAQSFIERMTNFDKNLPNEKVLPKHSLLYEYFTVYNELTKVKYVTEGMRKPAFLSGEQKKAIVDLLFKTNRKVTVKQLKEDYFKKIECFDSVEISGVEDRFNASLGTYHDLLKIIKDKDFLDNEENEDILEDIVLTLTLFEDREMIEERLKTYAHLFDDKVMKQLKRRRYTGWGRLSRKLINGIRDKQSGKTILDFLKSDGFANRNFMQLIHDDSLTFKEDIQKAQVSGQGDSLHEHIANLAGSPAIKKGILQTVKVVDELVKVMGRHKPENIVIEMARENQTTQKGQKNSRERMKRIEEGIKELGSQILKEHPVENTQLQNEKLYLYYLQNGRDMYVDQELDINRLSDYDVDHIVPQSFLKDDSIDNKVLTRSDKARGKSDNVPSEEVVKKMKNYWRQLLNAKLITQRKFDNLTKAERGGLSELDKAGFIKRQLVETRQITKHVAQILDSRMNTKYDENDKLIREVKVITLKSKLVSDFRKDFQFYKVREINNYHHAHDAYLNAVVGTALIKKYPKLESEFVYGDYKVYDVRKMIAKSEQEIGKATAKYFFYSNIMNFFKTEITLANGEIRKRPLIETNGETGEIVWDKGRDFATVRKVLSMPQVNIVKKTEVQTGGFSKESILPKRNSDKLIARKKDWDPKKYGGFDSPTVAYSVLVVAKVEKGKSKKLKSVKELLGITIMERSSFEKNPIDFLEAKGYKEVKKDLIIKLPKYSLFELENGRKRMLASAGELQKGNELALPSKYVNFLYLASHYEKLKGSPEDNEQKQLFVEQHKHYLDEIIEQISEFSKRVILADANLDKVLSAYNKHRDKPIREQAENIIHLFTLTNLGAPAAFKYFDTTIDRKRYTSTKEVLDATLIHQSITGLYETRIDLSQLGGDGGGSSPAPEAAAKGGVQEISDSRPMLHIYLNGRRFLGLLDTGADKTCIAGRDWPANWPIHQTESSLQGLGMACGVARSSQPLRWQHEDKSGIIHPFVIPTLPFTLWGRDIMKDIKVRLMTDSPDDSQDLMIGAIESNLFADQISWKSDQPVWLNQWPLKQEKLQALQQLVTEQLQLGHLEESNSPWNTPVFVIKKKSGKWRLLQDLRAVNATMHDMGALQPGLPSPVAVPKGWEIIIIDLQDCFFNIKLHPEDCKRFAFSVPSPNFKRPYQRFQWKVLPQGMKNSPTLCQKFVDKAILTVRDKYQDSYIVHYMDDILLAHPSRSIVDEILTSMIQALNKHGLVVSTEKIQKYDNLKYLGTHIQGDSVSYQKLQIRTDKLRTLNDFQKLLGNINWIRPFLKLTTGELKPLFEILNGDSNPISTRKLTPEACKALQLMNERLSTARVKRLDLSQPWSLCILKTEYTPTACLWQDGVVEWIHLPHISPKVITPYDIFCTQLIIKGRHRSKELFSKDPDYIVVPYTKVQFDLLLQEKEDWPISLLGFLGEVHFHLPKDPLLTFTLQTAIIFPHMTSTTPLEKGIVIFTDGSANGRSVTYIQGREPIIKENTQNTAQQAEIVAVITAFEEVSQPFNLYTDSKYVTGLFPEIETATLSPRTKIYTELKHLQRLIHKRQEKFYIGHIRGHTGLPGPLAQGNAYADSLTRILTAAGKRTADGSEFEKRTADGSEFESPKKKAKVE

SEQ ID NO: 3150 - protein, 2114 aa, synthetic construct
MPAAKRVKLDGGDKKYSIGLDIGTNSVGWAVITDEYKVPSKKFKVLGNTDRHSIKKNLIGALLFDSGETAEATRLKRTARRRYTRRKNRICYLQEIFSNEMAKVDDSFFHRLEESFLVEEDKKHERHPIFGNIVDEVAYHEKYPTIYHLRKKLVDSTDKADLRLIYLALAHMIKFRGHFLIEGDLNPDNSDVDKLFIQLVQTYNQLFEENPINASGVDAKAILSARLSKSRRLENLIAQLPGEKKNGLFGNLIALSLGLTPNFKSNFDLAEDAKLQLSKDTYDDDLDNLLAQIGDQYADLFLAAKNLSDAILLSDILRVNTEITKAPLSASMIKRYDEHHQDLTLLKALVRQQLPEKYKEIFFDQSKNGYAGYIDGGASQEEFYKFIKPILEKMDGTEELLVKLNREDLLRKQRTFDNGSIPHQIHLGELHAILRRQEDFYPFLKDNREKIEKILTFRIPYYVGPLARGNSRFAWMTRKSEETITPWNFEEVVDKGASAQSFIERMTNFDKNLPNEKVLPKHSLLYEYFTVYNELTKVKYVTEGMRKPAFLSGEQKKAIVDLLFKTNRKVTVKQLKEDYFKKIECFDSVEISGVEDRFNASLGTYHDLLKIIKDKDFLDNEENEDILEDIVLTLTLFEDREMIEERLKTYAHLFDDKVMKQLKRRRYTGWGRLSRKLINGIRDKQSGKTILDFLKSDGFANRNFMQLIHDDSLTFKEDIQKAQVSGQGDSLHEHIANLAGSPAIKKGILQTVKVVDELVKVMGRHKPENIVIEMARENQTTQKGQKNSRERMKRIEEGIKELGSQILKEHPVENTQLQNEKLYLYYLQNGRDMYVDQELDINRLSDYDVDHIVPQSFLKDDSIDNKVLTRSDKARGKSDNVPSEEVVKKMKNYWRQLLNAKLITQRKFDNLTKAERGGLSELDKAGFIKRQLVETRQITKHVAQILDSRMNTKYDENDKLIREVKVITLKSKLVSDFRKDFQFYKVREINNYHHAHDAYLNAVVGTALIKKYPKLESEFVYGDYKVYDVRKMIAKSEQEIGKATAKYFFYSNIMNFFKTEITLANGEIRKRPLIETNGETGEIVWDKGRDFATVRKVLSMPQVNIVKKTEVQTGGFSKESILPKRNSDKLIARKKDWDPKKYGGFDSPTVAYSVLVVAKVEKGKSKKLKSVKELLGITIMERSSFEKNPIDFLEAKGYKEVKKDLIIKLPKYSLFELENGRKRMLASAGELQKGNELALPSKYVNFLYLASHYEKLKGSPEDNEQKQLFVEQHKHYLDEIIEQISEFSKRVILADANLDKVLSAYNKHRDKPIREQAENIIHLFTLTNLGAPAAFKYFDTTIDRKRYTSTKEVLDATLIHQSITGLYETRIDLSQLGGDGGGGSGSSPAPGGVQEISDSRPMLHIYLNGRRFLGLLDTGADKTCIAGRDWPANWPIHQTESSLQGLGMACGVARSSQPLRWQHEDKSGIIHPFVIPTLPFTLWGRDIMKDIKVRLMTDSPDDSQDLMIGAIESNLFADQISWKSDQPVWLNQWPLKQEKLQALQQLVTEQLQLGHLEESNSPWNTPVFVIKKKSGKWRLLQDLRAVNATMHDMGALQPGLPSPVAVPKGWEIIIIDLQDCFFNIKLHPEDCKRFAFSVPSPNFKRPYQRFQWKVLPQGMKNSPTLCQKFVDKAILTVRDKYQDSYIVHYMDDILLAHPSRSIVDEILTSMIQALNKHGLVVSTEKIQKYDNLKYLGTHIQGDSVSYQKLQIRTDKLRTLNDFQKLLGNINWIRPFLKLTTGELKPLFEILNGDSNPISTRKLTPEACKALQLMNERLSTARVKRLDLSQPWSLCILKTEYTPTACLWQDGVVEWIHLPHISPKVITPYDIFCTQLIIKGRHRSKELFSKDPDYIVVPYTKVQFDLLLQEKEDWPISLLGFLGEVHFHLPKDPLLTFTLQTAIIFPHMTSTTPLEKGIVIFTDGSANGRSVTYIQGREPIIKENTQNTAQQAEIVAVITAFEEVSQPFNLYTDSKYVTGLFPEIETATLSPRTKIYTELKHLQRLIHKRQEKFYIGHIRGHTGLPGPLAQGNAYADSLTRILTAAGKRTADGSEFEKRTADGSEFESPKKKAKVE

SEQ ID NO: 3151 - protein, 2120 aa, synthetic construct
MPAAKRVKLDGGDKKYSIGLDIGTNSVGWAVITDEYKVPSKKFKVLGNTDRHSIKKNLIGALLFDSGETAEATRLKRTARRRYTRRKNRICYLQEIFSNEMAKVDDSFFHRLEESFLVEEDKKHERHPIFGNIVDEVAYHEKYPTIYHLRKKLVDSTDKADLRLIYLALAHMIKFRGHFLIEGDLNPDNSDVDKLFIQLVQTYNQLFEENPINASGVDAKAILSARLSKSRRLENLIAQLPGEKKNGLFGNLIALSLGLTPNFKSNFDLAEDAKLQLSKDTYDDDLDNLLAQIGDQYADLFLAAKNLSDAILLSDILRVNTEITKAPLSASMIKRYDEHHQDLTLLKALVRQQLPEKYKEIFFDQSKNGYAGYIDGGASQEEFYKFIKPILEKMDGTEELLVKLNREDLLRKQRTFDNGSIPHQIHLGELHAILRRQEDFYPFLKDNREKIEKILTFRIPYYVGPLARGNSRFAWMTRKSEETITPWNFEEVVDKGASAQSFIERMTNFDKNLPNEKVLPKHSLLYEYFTVYNELTKVKYVTEGMRKPAFLSGEQKKAIVDLLFKTNRKVTVKQLKEDYFKKIECFDSVEISGVEDRFNASLGTYHDLLKIIKDKDFLDNEENEDILEDIVLTLTLFEDREMIEERLKTYAHLFDDKVMKQLKRRRYTGWGRLSRKLINGIRDKQSGKTILDFLKSDGFANRNFMQLIHDDSLTFKEDIQKAQVSGQGDSLHEHIANLAGSPAIKKGILQTVKVVDELVKVMGRHKPENIVIEMARENQTTQKGQKNSRERMKRIEEGIKELGSQILKEHPVENTQLQNEKLYLYYLQNGRDMYVDQELDINRLSDYDVDHIVPQSFLKDDSIDNKVLTRSDKARGKSDNVPSEEVVKKMKNYWRQLLNAKLITQRKFDNLTKAERGGLSELDKAGFIKRQLVETRQITKHVAQILDSRMNTKYDENDKLIREVKVITLKSKLVSDFRKDFQFYKVREINNYHHAHDAYLNAVVGTALIKKYPKLESEFVYGDYKVYDVRKMIAKSEQEIGKATAKYFFYSNIMNFFKTEITLANGEIRKRPLIETNGETGEIVWDKGRDFATVRKVLSMPQVNIVKKTEVQTGGFSKESILPKRNSDKLIARKKDWDPKKYGGFDSPTVAYSVLVVAKVEKGKSKKLKSVKELLGITIMERSSFEKNPIDFLEAKGYKEVKKDLIIKLPKYSLFELENGRKRMLASAGELQKGNELALPSKYVNFLYLASHYEKLKGSPEDNEQKQLFVEQHKHYLDEIIEQISEFSKRVILADANLDKVLSAYNKHRDKPIREQAENIIHLFTLTNLGAPAAFKYFDTTIDRKRYTSTKEVLDATLIHQSITGLYETRIDLSQLGGDGGEAAAKGGGGSEAAAKGGVQEISDSRPMLHIYLNGRRFLGLLDTGADKTCIAGRDWPANWPIHQTESSLQGLGMACGVARSSQPLRWQHEDKSGIIHPFVIPTLPFTLWGRDIMKDIKVRLMTDSPDDSQDLMIGAIESNLFADQISWKSDQPVWLNQWPLKQEKLQALQQLVTEQLQLGHLEESNSPWNTPVFVIKKKSGKWRLLQDLRAVNATMHDMGALQPGLPSPVAVPKGWEIIIIDLQDCFFNIKLHPEDCKRFAFSVPSPNFKRPYQRFQWKVLPQGMKNSPTLCQKFVDKAILTVRDKYQDSYIVHYMDDILLAHPSRSIVDEILTSMIQALNKHGLVVSTEKIQKYDNLKYLGTHIQGDSVSYQKLQIRTDKLRTLNDFQKLLGNINWIRPFLKLTTGELKPLFEILNGDSNPISTRKLTPEACKALQLMNERLSTARVKRLDLSQPWSLCILKTEYTPTACLWQDGVVEWIHLPHISPKVITPYDIFCTQLIIKGRHRSKELFSKDPDYIVVPYTKVQFDLLLQEKEDWPISLLGFLGEVHFHLPKDPLLTFTLQTAIIFPHMTSTTPLEKGIVIFTDGSANGRSVTYIQGREPIIKENTQNTAQQAEIVAVITAFEEVSQPFNLYTDSKYVTGLFPEIETATLSPRTKIYTELKHLQRLIHKRQEKFYIGHIRGHTGLPGPLAQGNAYADSLTRILTAAGKRTADGSEFEKRTADGSEFESPKKKAKVE

SEQ ID NO: 3152 - protein, 2116 aa, synthetic construct
MPAAKRVKLDGGDKKYSIGLDIGTNSVGWAVITDEYKVPSKKFKVLGNTDRHSIKKNLIGALLFDSGETAEATRLKRTARRRYTRRKNRICYLQEIFSNEMAKVDDSFFHRLEESFLVEEDKKHERHPIFGNIVDEVAYHEKYPTIYHLRKKLVDSTDKADLRLIYLALAHMIKFRGHFLIEGDLNPDNSDVDKLFIQLVQTYNQLFEENPINASGVDAKAILSARLSKSRRLENLIAQLPGEKKNGLFGNLIALSLGLTPNFKSNFDLAEDAKLQLSKDTYDDDLDNLLAQIGDQYADLFLAAKNLSDAILLSDILRVNTEITKAPLSASMIKRYDEHHQDLTLLKALVRQQLPEKYKEIFFDQSKNGYAGYIDGGASQEEFYKFIKPILEKMDGTEELLVKLNREDLLRKQRTFDNGSIPHQIHLGELHAILRRQEDFYPFLKDNREKIEKILTFRIPYYVGPLARGNSRFAWMTRKSEETITPWNFEEVVDKGASAQSFIERMTNFDKNLPNEKVLPKHSLLYEYFTVYNELTKVKYVTEGMRKPAFLSGEQKKAIVDLLFKTNRKVTVKQLKEDYFKKIECFDSVEISGVEDRFNASLGTYHDLLKIIKDKDFLDNEENEDILEDIVLTLTLFEDREMIEERLKTYAHLFDDKVMKQLKRRRYTGWGRLSRKLINGIRDKQSGKTILDFLKSDGFANRNFMQLIHDDSLTFKEDIQKAQVSGQGDSLHEHIANLAGSPAIKKGILQTVKVVDELVKVMGRHKPENIVIEMARENQTTQKGQKNSRERMKRIEEGIKELGSQILKEHPVENTQLQNEKLYLYYLQNGRDMYVDQELDINRLSDYDVDHIVPQSFLKDDSIDNKVLTRSDKARGKSDNVPSEEVVKKMKNYWRQLLNAKLITQRKFDNLTKAERGGLSELDKAGFIKRQLVETRQITKHVAQILDSRMNTKYDENDKLIREVKVITLKSKLVSDFRKDFQFYKVREINNYHHAHDAYLNAVVGTALIKKYPKLESEFVYGDYKVYDVRKMIAKSEQEIGKATAKYFFYSNIMNFFKTEITLANGEIRKRPLIETNGETGEIVWDKGRDFATVRKVLSMPQVNIVKKTEVQTGGFSKESILPKRNSDKLIARKKDWDPKKYGGFDSPTVAYSVLVVAKVEKGKSKKLKSVKELLGITIMERSSFEKNPIDFLEAKGYKEVKKDLIIKLPKYSLFELENGRKRMLASAGELQKGNELALPSKYVNFLYLASHYEKLKGSPEDNEQKQLFVEQHKHYLDEIIEQISEFSKRVILADANLDKVLSAYNKHRDKPIREQAENIIHLFTLTNLGAPAAFKYFDTTIDRKRYTSTKEVLDATLIHQSITGLYETRIDLSQLGGDGGPAPEAAAKGSSGGVQEISDSRPMLHIYLNGRRFLGLLDTGADKTCIAGRDWPANWPIHQTESSLQGLGMACGVARSSQPLRWQHEDKSGIIHPFVIPTLPFTLWGRDIMKDIKVRLMTDSPDDSQDLMIGAIESNLFADQISWKSDQPVWLNQWPLKQEKLQALQQLVTEQLQLGHLEESNSPWNTPVFVIKKKSGKWRLLQDLRAVNATMHDMGALQPGLPSPVAVPKGWEIIIIDLQDCFFNIKLHPEDCKRFAFSVPSPNFKRPYQRFQWKVLPQGMKNSPTLCQKFVDKAILTVRDKYQDSYIVHYMDDILLAHPSRSIVDEILTSMIQALNKHGLVVSTEKIQKYDNLKYLGTHIQGDSVSYQKLQIRTDKLRTLNDFQKLLGNINWIRPFLKLTTGELKPLFEILNGDSNPISTRKLTPEACKALQLMNERLSTARVKRLDLSQPWSLCILKTEYTPTACLWQDGVVEWIHLPHISPKVITPYDIFCTQLIIKGRHRSKELFSKDPDYIVVPYTKVQFDLLLQEKEDWPISLLGFLGEVHFHLPKDPLLTFTLQTAIIFPHMTSTTPLEKGIVIFTDGSANGRSVTYIQGREPIIKENTQNTAQQAEIVAVITAFEEVSQPFNLYTDSKYVTGLFPEIETATLSPRTKIYTELKHLQRLIHKRQEKFYIGHIRGHTGLPGPLAQGNAYADSLTRILTAAGKRTADGSEFEKRTADGSEFESPKKKAKVE

SEQ ID NO: 3153 - protein, 2121 aa, synthetic construct
MPAAKRVKLDGGDKKYSIGLDIGTNSVGWAVITDEYKVPSKKFKVLGNTDRHSIKKNLIGALLFDSGETAEATRLKRTARRRYTRRKNRICYLQEIFSNEMAKVDDSFFHRLEESFLVEEDKKHERHPIFGNIVDEVAYHEKYPTIYHLRKKLVDSTDKADLRLIYLALAHMIKFRGHFLIEGDLNPDNSDVDKLFIQLVQTYNQLFEENPINASGVDAKAILSARLSKSRRLENLIAQLPGEKKNGLFGNLIALSLGLTPNFKSNFDLAEDAKLQLSKDTYDDDLDNLLAQIGDQYADLFLAAKNLSDAILLSDILRVNTEITKAPLSASMIKRYDEHHQDLTLLKALVRQQLPEKYKEIFFDQSKNGYAGYIDGGASQEEFYKFIKPILEKMDGTEELLVKLNREDLLRKQRTFDNGSIPHQIHLGELHAILRRQEDFYPFLKDNREKIEKILTFRIPYYVGPLARGNSRFAWMTRKSEETITPWNFEEVVDKGASAQSFIERMTNFDKNLPNEKVLPKHSLLYEYFTVYNELTKVKYVTEGMRKPAFLSGEQKKAIVDLLFKTNRKVTVKQLKEDYFKKIECFDSVEISGVEDRFNASLGTYHDLLKIIKDKDFLDNEENEDILEDIVLTLTLFEDREMIEERLKTYAHLFDDKVMKQLKRRRYTGWGRLSRKLINGIRDKQSGKTILDFLKSDGFANRNFMQLIHDDSLTFKEDIQKAQVSGQGDSLHEHIANLAGSPAIKKGILQTVKVVDELVKVMGRHKPENIVIEMARENQTTQKGQKNSRERMKRIEEGIKELGSQILKEHPVENTQLQNEKLYLYYLQNGRDMYVDQELDINRLSDYDVDHIVPQSFLKDDSIDNKVLTRSDKARGKSDNVPSEEVVKKMKNYWRQLLNAKLITQRKFDNLTKAERGGLSELDKAGFIKRQLVETRQITKHVAQILDSRMNTKYDENDKLIREVKVITLKSKLVSDFRKDFQFYKVREINNYHHAHDAYLNAVVGTALIKKYPKLESEFVYGDYKVYDVRKMIAKSEQEIGKATAKYFFYSNIMNFFKTEITLANGEIRKRPLIETNGETGEIVWDKGRDFATVRKVLSMPQVNIVKKTEVQTGGFSKESILPKRNSDKLIARKKDWDPKKYGGFDSPTVAYSVLVVAKVEKGKSKKLKSVKELLGITIMERSSFEKNPIDFLEAKGYKEVKKDLIIKLPKYSLFELENGRKRMLASAGELQKGNELALPSKYVNFLYLASHYEKLKGSPEDNEQKQLFVEQHKHYLDEIIEQISEFSKRVILADANLDKVLSAYNKHRDKPIREQAENIIHLFTLTNLGAPAAFKYFDTTIDRKRYTSTKEVLDATLIHQSITGLYETRIDLSQLGGDGGSGSETPGTSESATPESGGVQEISDSRPMLHIYLNGRRFLGLLDTGADKTCIAGRDWPANWPIHQTESSLQGLGMACGVARSSQPLRWQHEDKSGIIHPFVIPTLPFTLWGRDIMKDIKVRLMTDSPDDSQDLMIGAIESNLFADQISWKSDQPVWLNQWPLKQEKLQALQQLVTEQLQLGHLEESNSPWNTPVFVIKKKSGKWRLLQDLRAVNATMHDMGALQPGLPSPVAVPKGWEIIIIDLQDCFFNIKLHPEDCKRFAFSVPSPNFKRPYQRFQWKVLPQGMKNSPTLCQKFVDKAILTVRDKYQDSYIVHYMDDILLAHPSRSIVDEILTSMIQALNKHGLVVSTEKIQKYDNLKYLGTHIQGDSVSYQKLQIRTDKLRTLNDFQKLLGNINWIRPFLKLTTGELKPLFEILNGDSNPISTRKLTPEACKALQLMNERLSTARVKRLDLSQPWSLCILKTEYTPTACLWQDGVVEWIHLPHISPKVITPYDIFCTQLIIKGRHRSKELFSKDPDYIVVPYTKVQFDLLLQEKEDWPISLLGFLGEVHFHLPKDPLLTFTLQTAIIFPHMTSTTPLEKGIVIFTDGSANGRSVTYIQGREPIIKENTQNTAQQAEIVAVITAFEEVSQPFNLYTDSKYVTGLFPEIETATLSPRTKIYTELKHLQRLIHKRQEKFYIGHIRGHTGLPGPLAQGNAYADSLTRILTAAGKRTADGSEFEKRTADGSEFESPKKKAKVE

SEQ ID NO: 3154 - protein, 2116 aa, synthetic construct
MPAAKRVKLDGGDKKYSIGLDIGTNSVGWAVITDEYKVPSKKFKVLGNTDRHSIKKNLIGALLFDSGETAEATRLKRTARRRYTRRKNRICYLQEIFSNEMAKVDDSFFHRLEESFLVEEDKKHERHPIFGNIVDEVAYHEKYPTIYHLRKKLVDSTDKADLRLIYLALAHMIKFRGHFLIEGDLNPDNSDVDKLFIQLVQTYNQLFEENPINASGVDAKAILSARLSKSRRLENLIAQLPGEKKNGLFGNLIALSLGLTPNFKSNFDLAEDAKLQLSKDTYDDDLDNLLAQIGDQYADLFLAAKNLSDAILLSDILRVNTEITKAPLSASMIKRYDEHHQDLTLLKALVRQQLPEKYKEIFFDQSKNGYAGYIDGGASQEEFYKFIKPILEKMDGTEELLVKLNREDLLRKQRTFDNGSIPHQIHLGELHAILRRQEDFYPFLKDNREKIEKILTFRIPYYVGPLARGNSRFAWMTRKSEETITPWNFEEVVDKGASAQSFIERMTNFDKNLPNEKVLPKHSLLYEYFTVYNELTKVKYVTEGMRKPAFLSGEQKKAIVDLLFKTNRKVTVKQLKEDYFKKIECFDSVEISGVEDRFNASLGTYHDLLKIIKDKDFLDNEENEDILEDIVLTLTLFEDREMIEERLKTYAHLFDDKVMKQLKRRRYTGWGRLSRKLINGIRDKQSGKTILDFLKSDGFANRNFMQLIHDDSLTFKEDIQKAQVSGQGDSLHEHIANLAGSPAIKKGILQTVKVVDELVKVMGRHKPENIVIEMARENQTTQKGQKNSRERMKRIEEGIKELGSQILKEHPVENTQLQNEKLYLYYLQNGRDMYVDQELDINRLSDYDVDHIVPQSFLKDDSIDNKVLTRSDKARGKSDNVPSEEVVKKMKNYWRQLLNAKLITQRKFDNLTKAERGGLSELDKAGFIKRQLVETRQITKHVAQILDSRMNTKYDENDKLIREVKVITLKSKLVSDFRKDFQFYKVREINNYHHAHDAYLNAVVGTALIKKYPKLESEFVYGDYKVYDVRKMIAKSEQEIGKATAKYFFYSNIMNFFKTEITLANGEIRKRPLIETNGETGEIVWDKGRDFATVRKVLSMPQVNIVKKTEVQTGGFSKESILPKRNSDKLIARKKDWDPKKYGGFDSPTVAYSVLVVAKVEKGKSKKLKSVKELLGITIMERSSFEKNPIDFLEAKGYKEVKKDLIIKLPKYSLFELENGRKRMLASAGELQKGNELALPSKYVNFLYLASHYEKLKGSPEDNEQKQLFVEQHKHYLDEIIEQISEFSKRVILADANLDKVLSAYNKHRDKPIREQAENIIHLFTLTNLGAPAAFKYFDTTIDRKRYTSTKEVLDATLIHQSITGLYETRIDLSQLGGDGGGGSEAAAKGGGGGVQEISDSRPMLHIYLNGRRFLGLLDTGADKTCIAGRDWPANWPIHQTESSLQGLGMACGVARSSQPLRWQHEDKSGIIHPFVIPTLPFTLWGRDIMKDIKVRLMTDSPDDSQDLMIGAIESNLFADQISWKSDQPVWLNQWPLKQEKLQALQQLVTEQLQLGHLEESNSPWNTPVFVIKKKSGKWRLLQDLRAVNATMHDMGALQPGLPSPVAVPKGWEIIIIDLQDCFFNIKLHPEDCKRFAFSVPSPNFKRPYQRFQWKVLPQGMKNSPTLCQKFVDKAILTVRDKYQDSYIVHYMDDILLAHPSRSIVDEILTSMIQALNKHGLVVSTEKIQKYDNLKYLGTHIQGDSVSYQKLQIRTDKLRTLNDFQKLLGNINWIRPFLKLTTGELKPLFEILNGDSNPISTRKLTPEACKALQLMNERLSTARVKRLDLSQPWSLCILKTEYTPTACLWQDGVVEWIHLPHISPKVITPYDIFCTQLIIKGRHRSKELFSKDPDYIVVPYTKVQFDLLLQEKEDWPISLLGFLGEVHFHLPKDPLLTFTLQTAIIFPHMTSTTPLEKGIVIFTDGSANGRSVTYIQGREPIIKENTQNTAQQAEIVAVITAFEEVSQPFNLYTDSKYVTGLFPEIETATLSPRTKIYTELKHLQRLIHKRQEKFYIGHIRGHTGLPGPLAQGNAYADSLTRILTAAGKRTADGSEFEKRTADGSEFESPKKKAKVE

SEQ ID NO: 3155 - protein, 2114 aa, synthetic construct
MPAAKRVKLDGGDKKYSIGLDIGTNSVGWAVITDEYKVPSKKFKVLGNTDRHSIKKNLIGALLFDSGETAEATRLKRTARRRYTRRKNRICYLQEIFSNEMAKVDDSFFHRLEESFLVEEDKKHERHPIFGNIVDEVAYHEKYPTIYHLRKKLVDSTDKADLRLIYLALAHMIKFRGHFLIEGDLNPDNSDVDKLFIQLVQTYNQLFEENPINASGVDAKAILSARLSKSRRLENLIAQLPGEKKNGLFGNLIALSLGLTPNFKSNFDLAEDAKLQLSKDTYDDDLDNLLAQIGDQYADLFLAAKNLSDAILLSDILRVNTEITKAPLSASMIKRYDEHHQDLTLLKALVRQQLPEKYKEIFFDQSKNGYAGYIDGGASQEEFYKFIKPILEKMDGTEELLVKLNREDLLRKQRTFDNGSIPHQIHLGELHAILRRQEDFYPFLKDNREKIEKILTFRIPYYVGPLARGNSRFAWMTRKSEETITPWNFEEVVDKGASAQSFIERMTNFDKNLPNEKVLPKHSLLYEYFTVYNELTKVKYVTEGMRKPAFLSGEQKKAIVDLLFKTNRKVTVKQLKEDYFKKIECFDSVEISGVEDRFNASLGTYHDLLKIIKDKDFLDNEENEDILEDIVLTLTLFEDREMIEERLKTYAHLFDDKVMKQLKRRRYTGWGRLSRKLINGIRDKQSGKTILDFLKSDGFANRNFMQLIHDDSLTFKEDIQKAQVSGQGDSLHEHIANLAGSPAIKKGILQTVKVVDELVKVMGRHKPENIVIEMARENQTTQKGQKNSRERMKRIEEGIKELGSQILKEHPVENTQLQNEKLYLYYLQNGRDMYVDQELDINRLSDYDVDHIVPQSFLKDDSIDNKVLTRSDKARGKSDNVPSEEVVKKMKNYWRQLLNAKLITQRKFDNLTKAERGGLSELDKAGFIKRQLVETRQITKHVAQILDSRMNTKYDENDKLIREVKVITLKSKLVSDFRKDFQFYKVREINNYHHAHDAYLNAVVGTALIKKYPKLESEFVYGDYKVYDVRKMIAKSEQEIGKATAKYFFYSNIMNFFKTEITLANGEIRKRPLIETNGETGEIVWDKGRDFATVRKVLSMPQVNIVKKTEVQTGGFSKESILPKRNSDKLIARKKDWDPKKYGGFDSPTVAYSVLVVAKVEKGKSKKLKSVKELLGITIMERSSFEKNPIDFLEAKGYKEVKKDLIIKLPKYSLFELENGRKRMLASAGELQKGNELALPSKYVNFLYLASHYEKLKGSPEDNEQKQLFVEQHKHYLDEIIEQISEFSKRVILADANLDKVLSAYNKHRDKPIREQAENIIHLFTLTNLGAPAAFKYFDTTIDRKRYTSTKEVLDATLIHQSITGLYETRIDLSQLGGDGGPAPGGSGSSGGVQEISDSRPMLHIYLNGRRFLGLLDTGADKTCIAGRDWPANWPIHQTESSLQGLGMACGVARSSQPLRWQHEDKSGIIHPFVIPTLPFTLWGRDIMKDIKVRLMTDSPDDSQDLMIGAIESNLFADQISWKSDQPVWLNQWPLKQEKLQALQQLVTEQLQLGHLEESNSPWNTPVFVIKKKSGKWRLLQDLRAVNATMHDMGALQPGLPSPVAVPKGWEIIIIDLQDCFFNIKLHPEDCKRFAFSVPSPNFKRPYQRFQWKVLPQGMKNSPTLCQKFVDKAILTVRDKYQDSYIVHYMDDILLAHPSRSIVDEILTSMIQALNKHGLVVSTEKIQKYDNLKYLGTHIQGDSVSYQKLQIRTDKLRTLNDFQKLLGNINWIRPFLKLTTGELKPLFEILNGDSNPISTRKLTPEACKALQLMNERLSTARVKRLDLSQPWSLCILKTEYTPTACLWQDGVVEWIHLPHISPKVITPYDIFCTQLIIKGRHRSKELFSKDPDYIVVPYTKVQFDLLLQEKEDWPISLLGFLGEVHFHLPKDPLLTFTLQTAIIFPHMTSTTPLEKGIVIFTDGSANGRSVTYIQGREPIIKENTQNTAQQAEIVAVITAFEEVSQPFNLYTDSKYVTGLFPEIETATLSPRTKIYTELKHLQRLIHKRQEKFYIGHIRGHTGLPGPLAQGNAYADSLTRILTAAGKRTADGSEFEKRTADGSEFESPKKKAKVE

SEQ ID NO: 3156 - protein, 2116 aa, synthetic construct
MPAAKRVKLDGGDKKYSIGLDIGTNSVGWAVITDEYKVPSKKFKVLGNTDRHSIKKNLIGALLFDSGETAEATRLKRTARRRYTRRKNRICYLQEIFSNEMAKVDDSFFHRLEESFLVEEDKKHERHPIFGNIVDEVAYHEKYPTIYHLRKKLVDSTDKADLRLIYLALAHMIKFRGHFLIEGDLNPDNSDVDKLFIQLVQTYNQLFEENPINASGVDAKAILSARLSKSRRLENLIAQLPGEKKNGLFGNLIALSLGLTPNFKSNFDLAEDAKLQLSKDTYDDDLDNLLAQIGDQYADLFLAAKNLSDAILLSDILRVNTEITKAPLSASMIKRYDEHHQDLTLLKALVRQQLPEKYKEIFFDQSKNGYAGYIDGGASQEEFYKFIKPILEKMDGTEELLVKLNREDLLRKQRTFDNGSIPHQIHLGELHAILRRQEDFYPFLKDNREKIEKILTFRIPYYVGPLARGNSRFAWMTRKSEETITPWNFEEVVDKGASAQSFIERMTNFDKNLPNEKVLPKHSLLYEYFTVYNELTKVKYVTEGMRKPAFLSGEQKKAIVDLLFKTNRKVTVKQLKEDYFKKIECFDSVEISGVEDRFNASLGTYHDLLKIIKDKDFLDNEENEDILEDIVLTLTLFEDREMIEERLKTYAHLFDDKVMKQLKRRRYTGWGRLSRKLINGIRDKQSGKTILDFLKSDGFANRNFMQLIHDDSLTFKEDIQKAQVSGQGDSLHEHIANLAGSPAIKKGILQTVKVVDELVKVMGRHKPENIVIEMARENQTTQKGQKNSRERMKRIEEGIKELGSQILKEHPVENTQLQNEKLYLYYLQNGRDMYVDQELDINRLSDYDVDHIVPQSFLKDDSIDNKVLTRSDKARGKSDNVPSEEVVKKMKNYWRQLLNAKLITQRKFDNLTKAERGGLSELDKAGFIKRQLVETRQITKHVAQILDSRMNTKYDENDKLIREVKVITLKSKLVSDFRKDFQFYKVREINNYHHAHDAYLNAVVGTALIKKYPKLESEFVYGDYKVYDVRKMIAKSEQEIGKATAKYFFYSNIMNFFKTEITLANGEIRKRPLIETNGETGEIVWDKGRDFATVRKVLSMPQVNIVKKTEVQTGGFSKESILPKRNSDKLIARKKDWDPKKYGGFDSPTVAYSVLVVAKVEKGKSKKLKSVKELLGITIMERSSFEKNPIDFLEAKGYKEVKKDLIIKLPKYSLFELENGRKRMLASAGELQKGNELALPSKYVNFLYLASHYEKLKGSPEDNEQKQLFVEQHKHYLDEIIEQISEFSKRVILADANLDKVLSAYNKHRDKPIREQAENIIHLFTLTNLGAPAAFKYFDTTIDRKRYTSTKEVLDATLIHQSITGLYETRIDLSQLGGDGGEAAAKGGGGGSGGVQEISDSRPMLHIYLNGRRFLGLLDTGADKTCIAGRDWPANWPIHQTESSLQGLGMACGVARSSQPLRWQHEDKSGIIHPFVIPTLPFTLWGRDIMKDIKVRLMTDSPDDSQDLMIGAIESNLFADQISWKSDQPVWLNQWPLKQEKLQALQQLVTEQLQLGHLEESNSPWNTPVFVIKKKSGKWRLLQDLRAVNATMHDMGALQPGLPSPVAVPKGWEIIIIDLQDCFFNIKLHPEDCKRFAFSVPSPNFKRPYQRFQWKVLPQGMKNSPTLCQKFVDKAILTVRDKYQDSYIVHYMDDILLAHPSRSIVDEILTSMIQALNKHGLVVSTEKIQKYDNLKYLGTHIQGDSVSYQKLQIRTDKLRTLNDFQKLLGNINWIRPFLKLTTGELKPLFEILNGDSNPISTRKLTPEACKALQLMNERLSTARVKRLDLSQPWSLCILKTEYTPTACLWQDGVVEWIHLPHISPKVITPYDIFCTQLIIKGRHRSKELFSKDPDYIVVPYTKVQFDLLLQEKEDWPISLLGFLGEVHFHLPKDPLLTFTLQTAIIFPHMTSTTPLEKGIVIFTDGSANGRSVTYIQGREPIIKENTQNTAQQAEIVAVITAFEEVSQPFNLYTDSKYVTGLFPEIETATLSPRTKIYTELKHLQRLIHKRQEKFYIGHIRGHTGLPGPLAQGNAYADSLTRILTAAGKRTADGSEFEKRTADGSEFESPKKKAKVE

SEQ ID NO: 3157 - protein, 2125 aa, synthetic construct
MPAAKRVKLDGGDKKYSIGLDIGTNSVGWAVITDEYKVPSKKFKVLGNTDRHSIKKNLIGALLFDSGETAEATRLKRTARRRYTRRKNRICYLQEIFSNEMAKVDDSFFHRLEESFLVEEDKKHERHPIFGNIVDEVAYHEKYPTIYHLRKKLVDSTDKADLRLIYLALAHMIKFRGHFLIEGDLNPDNSDVDKLFIQLVQTYNQLFEENPINASGVDAKAILSARLSKSRRLENLIAQLPGEKKNGLFGNLIALSLGLTPNFKSNFDLAEDAKLQLSKDTYDDDLDNLLAQIGDQYADLFLAAKNLSDAILLSDILRVNTEITKAPLSASMIKRYDEHHQDLTLLKALVRQQLPEKYKEIFFDQSKNGYAGYIDGGASQEEFYKFIKPILEKMDGTEELLVKLNREDLLRKQRTFDNGSIPHQIHLGELHAILRRQEDFYPFLKDNREKIEKILTFRIPYYVGPLARGNSRFAWMTRKSEETITPWNFEEVVDKGASAQSFIERMTNFDKNLPNEKVLPKHSLLYEYFTVYNELTKVKYVTEGMRKPAFLSGEQKKAIVDLLFKTNRKVTVKQLKEDYFKKIECFDSVEISGVEDRFNASLGTYHDLLKIIKDKDFLDNEENEDILEDIVLTLTLFEDREMIEERLKTYAHLFDDKVMKQLKRRRYTGWGRLSRKLINGIRDKQSGKTILDFLKSDGFANRNFMQLIHDDSLTFKEDIQKAQVSGQGDSLHEHIANLAGSPAIKKGILQTVKVVDELVKVMGRHKPENIVIEMARENQTTQKGQKNSRERMKRIEEGIKELGSQILKEHPVENTQLQNEKLYLYYLQNGRDMYVDQELDINRLSDYDVDHIVPQSFLKDDSIDNKVLTRSDKARGKSDNVPSEEVVKKMKNYWRQLLNAKLITQRKFDNLTKAERGGLSELDKAGFIKRQLVETRQITKHVAQILDSRMNTKYDENDKLIREVKVITLKSKLVSDFRKDFQFYKVREINNYHHAHDAYLNAVVGTALIKKYPKLESEFVYGDYKVYDVRKMIAKSEQEIGKATAKYFFYSNIMNFFKTEITLANGEIRKRPLIETNGETGEIVWDKGRDFATVRKVLSMPQVNIVKKTEVQTGGFSKESILPKRNSDKLIARKKDWDPKKYGGFDSPTVAYSVLVVAKVEKGKSKKLKSVKELLGITIMERSSFEKNPIDFLEAKGYKEVKKDLIIKLPKYSLFELENGRKRMLASAGELQKGNELALPSKYVNFLYLASHYEKLKGSPEDNEQKQLFVEQHKHYLDEIIEQISEFSKRVILADANLDKVLSAYNKHRDKPIREQAENIIHLFTLTNLGAPAAFKYFDTTIDRKRYTSTKEVLDATLIHQSITGLYETRIDLSQLGGDGGEAAAKEAAAKEAAAKEAAAKGGVQEISDSRPMLHIYLNGRRFLGLLDTGADKTCIAGRDWPANWPIHQTESSLQGLGMACGVARSSQPLRWQHEDKSGIIHPFVIPTLPFTLWGRDIMKDIKVRLMTDSPDDSQDLMIGAIESNLFADQISWKSDQPVWLNQWPLKQEKLQALQQLVTEQLQLGHLEESNSPWNTPVFVIKKKSGKWRLLQDLRAVNATMHDMGALQPGLPSPVAVPKGWEIIIIDLQDCFFNIKLHPEDCKRFAFSVPSPNFKRPYQRFQWKVLPQGMKNSPTLCQKFVDKAILTVRDKYQDSYIVHYMDDILLAHPSRSIVDEILTSMIQALNKHGLVVSTEKIQKYDNLKYLGTHIQGDSVSYQKLQIRTDKLRTLNDFQKLLGNINWIRPFLKLTTGELKPLFEILNGDSNPISTRKLTPEACKALQLMNERLSTARVKRLDLSQPWSLCILKTEYTPTACLWQDGVVEWIHLPHISPKVITPYDIFCTQLIIKGRHRSKELFSKDPDYIVVPYTKVQFDLLLQEKEDWPISLLGFLGEVHFHLPKDPLLTFTLQTAIIFPHMTSTTPLEKGIVIFTDGSANGRSVTYIQGREPIIKENTQNTAQQAEIVAVITAFEEVSQPFNLYTDSKYVTGLFPEIETATLSPRTKIYTELKHLQRLIHKRQEKFYIGHIRGHTGLPGPLAQGNAYADSLTRILTAAGKRTADGSEFEKRTADGSEFESPKKKAKVE

SEQ ID NO: 3158 - protein, 2116 aa, synthetic construct
MPAAKRVKLDGGDKKYSIGLDIGTNSVGWAVITDEYKVPSKKFKVLGNTDRHSIKKNLIGALLFDSGETAEATRLKRTARRRYTRRKNRICYLQEIFSNEMAKVDDSFFHRLEESFLVEEDKKHERHPIFGNIVDEVAYHEKYPTIYHLRKKLVDSTDKADLRLIYLALAHMIKFRGHFLIEGDLNPDNSDVDKLFIQLVQTYNQLFEENPINASGVDAKAILSARLSKSRRLENLIAQLPGEKKNGLFGNLIALSLGLTPNFKSNFDLAEDAKLQLSKDTYDDDLDNLLAQIGDQYADLFLAAKNLSDAILLSDILRVNTEITKAPLSASMIKRYDEHHQDLTLLKALVRQQLPEKYKEIFFDQSKNGYAGYIDGGASQEEFYKFIKPILEKMDGTEELLVKLNREDLLRKQRTFDNGSIPHQIHLGELHAILRRQEDFYPFLKDNREKIEKILTFRIPYYVGPLARGNSRFAWMTRKSEETITPWNFEEVVDKGASAQSFIERMTNFDKNLPNEKVLPKHSLLYEYFTVYNELTKVKYVTEGMRKPAFLSGEQKKAIVDLLFKTNRKVTVKQLKEDYFKKIECFDSVEISGVEDRFNASLGTYHDLLKIIKDKDFLDNEENEDILEDIVLTLTLFEDREMIEERLKTYAHLFDDKVMKQLKRRRYTGWGRLSRKLINGIRDKQSGKTILDFLKSDGFANRNFMQLIHDDSLTFKEDIQKAQVSGQGDSLHEHIANLAGSPAIKKGILQTVKVVDELVKVMGRHKPENIVIEMARENQTTQKGQKNSRERMKRIEEGIKELGSQILKEHPVENTQLQNEKLYLYYLQNGRDMYVDQELDINRLSDYDVDHIVPQSFLKDDSIDNKVLTRSDKARGKSDNVPSEEVVKKMKNYWRQLLNAKLITQRKFDNLTKAERGGLSELDKAGFIKRQLVETRQITKHVAQILDSRMNTKYDENDKLIREVKVITLKSKLVSDFRKDFQFYKVREINNYHHAHDAYLNAVVGTALIKKYPKLESEFVYGDYKVYDVRKMIAKSEQEIGKATAKYFFYSNIMNFFKTEITLANGEIRKRPLIETNGETGEIVWDKGRDFATVRKVLSMPQVNIVKKTEVQTGGFSKESILPKRNSDKLIARKKDWDPKKYGGFDSPTVAYSVLVVAKVEKGKSKKLKSVKELLGITIMERSSFEKNPIDFLEAKGYKEVKKDLIIKLPKYSLFELENGRKRMLASAGELQKGNELALPSKYVNFLYLASHYEKLKGSPEDNEQKQLFVEQHKHYLDEIIEQISEFSKRVILADANLDKVLSAYNKHRDKPIREQAENIIHLFTLTNLGAPAAFKYFDTTIDRKRYTSTKEVLDATLIHQSITGLYETRIDLSQLGGDGGGGSEAAAKGSSGGVQEISDSRPMLHIYLNGRRFLGLLDTGADKTCIAGRDWPANWPIHQTESSLQGLGMACGVARSSQPLRWQHEDKSGIIHPFVIPTLPFTLWGRDIMKDIKVRLMTDSPDDSQDLMIGAIESNLFADQISWKSDQPVWLNQWPLKQEKLQALQQLVTEQLQLGHLEESNSPWNTPVFVIKKKSGKWRLLQDLRAVNATMHDMGALQPGLPSPVAVPKGWEIIIIDLQDCFFNIKLHPEDCKRFAFSVPSPNFKRPYQRFQWKVLPQGMKNSPTLCQKFVDKAILTVRDKYQDSYIVHYMDDILLAHPSRSIVDEILTSMIQALNKHGLVVSTEKIQKYDNLKYLGTHIQGDSVSYQKLQIRTDKLRTLNDFQKLLGNINWIRPFLKLTTGELKPLFEILNGDSNPISTRKLTPEACKALQLMNERLSTARVKRLDLSQPWSLCILKTEYTPTACLWQDGVVEWIHLPHISPKVITPYDIFCTQLIIKGRHRSKELFSKDPDYIVVPYTKVQFDLLLQEKEDWPISLLGFLGEVHFHLPKDPLLTFTLQTAIIFPHMTSTTPLEKGIVIFTDGSANGRSVTYIQGREPIIKENTQNTAQQAEIVAVITAFEEVSQPFNLYTDSKYVTGLFPEIETATLSPRTKIYTELKHLQRLIHKRQEKFYIGHIRGHTGLPGPLAQGNAYADSLTRILTAAGKRTADGSEFEKRTADGSEFESPKKKAKVE

SEQ ID NO: 3159 - protein, 2114 aa, synthetic construct
MPAAKRVKLDGGDKKYSIGLDIGTNSVGWAVITDEYKVPSKKFKVLGNTDRHSIKKNLIGALLFDSGETAEATRLKRTARRRYTRRKNRICYLQEIFSNEMAKVDDSFFHRLEESFLVEEDKKHERHPIFGNIVDEVAYHEKYPTIYHLRKKLVDSTDKADLRLIYLALAHMIKFRGHFLIEGDLNPDNSDVDKLFIQLVQTYNQLFEENPINASGVDAKAILSARLSKSRRLENLIAQLPGEKKNGLFGNLIALSLGLTPNFKSNFDLAEDAKLQLSKDTYDDDLDNLLAQIGDQYADLFLAAKNLSDAILLSDILRVNTEITKAPLSASMIKRYDEHHQDLTLLKALVRQQLPEKYKEIFFDQSKNGYAGYIDGGASQEEFYKFIKPILEKMDGTEELLVKLNREDLLRKQRTFDNGSIPHQIHLGELHAILRRQEDFYPFLKDNREKIEKILTFRIPYYVGPLARGNSRFAWMTRKSEETITPWNFEEVVDKGASAQSFIERMTNFDKNLPNEKVLPKHSLLYEYFTVYNELTKVKYVTEGMRKPAFLSGEQKKAIVDLLFKTNRKVTVKQLKEDYFKKIECFDSVEISGVEDRFNASLGTYHDLLKIIKDKDFLDNEENEDILEDIVLTLTLFEDREMIEERLKTYAHLFDDKVMKQLKRRRYTGWGRLSRKLINGIRDKQSGKTILDFLKSDGFANRNFMQLIHDDSLTFKEDIQKAQVSGQGDSLHEHIANLAGSPAIKKGILQTVKVVDELVKVMGRHKPENIVIEMARENQTTQKGQKNSRERMKRIEEGIKELGSQILKEHPVENTQLQNEKLYLYYLQNGRDMYVDQELDINRLSDYDVDHIVPQSFLKDDSIDNKVLTRSDKARGKSDNVPSEEVVKKMKNYWRQLLNAKLITQRKFDNLTKAERGGLSELDKAGFIKRQLVETRQITKHVAQILDSRMNTKYDENDKLIREVKVITLKSKLVSDFRKDFQFYKVREINNYHHAHDAYLNAVVGTALIKKYPKLESEFVYGDYKVYDVRKMIAKSEQEIGKATAKYFFYSNIMNFFKTEITLANGEIRKRPLIETNGETGEIVWDKGRDFATVRKVLSMPQVNIVKKTEVQTGGFSKESILPKRNSDKLIARKKDWDPKKYGGFDSPTVAYSVLVVAKVEKGKSKKLKSVKELLGITIMERSSFEKNPIDFLEAKGYKEVKKDLIIKLPKYSLFELENGRKRMLASAGELQKGNELALPSKYVNFLYLASHYEKLKGSPEDNEQKQLFVEQHKHYLDEIIEQISEFSKRVILADANLDKVLSAYNKHRDKPIREQAENIIHLFTLTNLGAPAAFKYFDTTIDRKRYTSTKEVLDATLIHQSITGLYETRIDLSQLGGDGGGGGGSSGGSGGVQEISDSRPMLHIYLNGRRFLGLLDTGADKTCIAGRDWPANWPIHQTESSLQGLGMACGVARSSQPLRWQHEDKSGIIHPFVIPTLPFTLWGRDIMKDIKVRLMTDSPDDSQDLMIGAIESNLFADQISWKSDQPVWLNQWPLKQEKLQALQQLVTEQLQLGHLEESNSPWNTPVFVIKKKSGKWRLLQDLRAVNATMHDMGALQPGLPSPVAVPKGWEIIIIDLQDCFFNIKLHPEDCKRFAFSVPSPNFKRPYQRFQWKVLPQGMKNSPTLCQKFVDKAILTVRDKYQDSYIVHYMDDILLAHPSRSIVDEILTSMIQALNKHGLVVSTEKIQKYDNLKYLGTHIQGDSVSYQKLQIRTDKLRTLNDFQKLLGNINWIRPFLKLTTGELKPLFEILNGDSNPISTRKLTPEACKALQLMNERLSTARVKRLDLSQPWSLCILKTEYTPTACLWQDGVVEWIHLPHISPKVITPYDIFCTQLIIKGRHRSKELFSKDPDYIVVPYTKVQFDLLLQEKEDWPISLLGFLGEVHFHLPKDPLLTFTLQTAIIFPHMTSTTPLEKGIVIFTDGSANGRSVTYIQGREPIIKENTQNTAQQAEIVAVITAFEEVSQPFNLYTDSKYVTGLFPEIETATLSPRTKIYTELKHLQRLIHKRQEKFYIGHIRGHTGLPGPLAQGNAYADSLTRILTAAGKRTADGSEFEKRTADGSEFESPKKKAKVE

SEQ ID NO: 3160 - protein, 2111 aa, synthetic construct
MPAAKRVKLDGGDKKYSIGLDIGTNSVGWAVITDEYKVPSKKFKVLGNTDRHSIKKNLIGALLFDSGETAEATRLKRTARRRYTRRKNRICYLQEIFSNEMAKVDDSFFHRLEESFLVEEDKKHERHPIFGNIVDEVAYHEKYPTIYHLRKKLVDSTDKADLRLIYLALAHMIKFRGHFLIEGDLNPDNSDVDKLFIQLVQTYNQLFEENPINASGVDAKAILSARLSKSRRLENLIAQLPGEKKNGLFGNLIALSLGLTPNFKSNFDLAEDAKLQLSKDTYDDDLDNLLAQIGDQYADLFLAAKNLSDAILLSDILRVNTEITKAPLSASMIKRYDEHHQDLTLLKALVRQQLPEKYKEIFFDQSKNGYAGYIDGGASQEEFYKFIKPILEKMDGTEELLVKLNREDLLRKQRTFDNGSIPHQIHLGELHAILRRQEDFYPFLKDNREKIEKILTFRIPYYVGPLARGNSRFAWMTRKSEETITPWNFEEVVDKGASAQSFIERMTNFDKNLPNEKVLPKHSLLYEYFTVYNELTKVKYVTEGMRKPAFLSGEQKKAIVDLLFKTNRKVTVKQLKEDYFKKIECFDSVEISGVEDRFNASLGTYHDLLKIIKDKDFLDNEENEDILEDIVLTLTLFEDREMIEERLKTYAHLFDDKVMKQLKRRRYTGWGRLSRKLINGIRDKQSGKTILDFLKSDGFANRNFMQLIHDDSLTFKEDIQKAQVSGQGDSLHEHIANLAGSPAIKKGILQTVKVVDELVKVMGRHKPENIVIEMARENQTTQKGQKNSRERMKRIEEGIKELGSQILKEHPVENTQLQNEKLYLYYLQNGRDMYVDQELDINRLSDYDVDHIVPQSFLKDDSIDNKVLTRSDKARGKSDNVPSEEVVKKMKNYWRQLLNAKLITQRKFDNLTKAERGGLSELDKAGFIKRQLVETRQITKHVAQILDSRMNTKYDENDKLIREVKVITLKSKLVSDFRKDFQFYKVREINNYHHAHDAYLNAVVGTALIKKYPKLESEFVYGDYKVYDVRKMIAKSEQEIGKATAKYFFYSNIMNFFKTEITLANGEIRKRPLIETNGETGEIVWDKGRDFATVRKVLSMPQVNIVKKTEVQTGGFSKESILPKRNSDKLIARKKDWDPKKYGGFDSPTVAYSVLVVAKVEKGKSKKLKSVKELLGITIMERSSFEKNPIDFLEAKGYKEVKKDLIIKLPKYSLFELENGRKRMLASAGELQKGNELALPSKYVNFLYLASHYEKLKGSPEDNEQKQLFVEQHKHYLDEIIEQISEFSKRVILADANLDKVLSAYNKHRDKPIREQAENIIHLFTLTNLGAPAAFKYFDTTIDRKRYTSTKEVLDATLIHQSITGLYETRIDLSQLGGDGGGGSPAPGGVQEISDSRPMLHIYLNGRRFLGLLDTGADKTCIAGRDWPANWPIHQTESSLQGLGMACGVARSSQPLRWQHEDKSGIIHPFVIPTLPFTLWGRDIMKDIKVRLMTDSPDDSQDLMIGAIESNLFADQISWKSDQPVWLNQWPLKQEKLQALQQLVTEQLQLGHLEESNSPWNTPVFVIKKKSGKWRLLQDLRAVNATMHDMGALQPGLPSPVAVPKGWEIIIIDLQDCFFNIKLHPEDCKRFAFSVPSPNFKRPYQRFQWKVLPQGMKNSPTLCQKFVDKAILTVRDKYQDSYIVHYMDDILLAHPSRSIVDEILTSMIQALNKHGLVVSTEKIQKYDNLKYLGTHIQGDSVSYQKLQIRTDKLRTLNDFQKLLGNINWIRPFLKLTTGELKPLFEILNGDSNPISTRKLTPEACKALQLMNERLSTARVKRLDLSQPWSLCILKTEYTPTACLWQDGVVEWIHLPHISPKVITPYDIFCTQLIIKGRHRSKELFSKDPDYIVVPYTKVQFDLLLQEKEDWPISLLGFLGEVHFHLPKDPLLTFTLQTAIIFPHMTSTTPLEKGIVIFTDGSANGRSVTYIQGREPIIKENTQNTAQQAEIVAVITAFEEVSQPFNLYTDSKYVTGLFPEIETATLSPRTKIYTELKHLQRLIHKRQEKFYIGHIRGHTGLPGPLAQGNAYADSLTRILTAAGKRTADGSEFEKRTADGSEFESPKKKAKVE

SEQ ID NO: 3161 - protein, 2114 aa, synthetic construct
MPAAKRVKLDGGDKKYSIGLDIGTNSVGWAVITDEYKVPSKKFKVLGNTDRHSIKKNLIGALLFDSGETAEATRLKRTARRRYTRRKNRICYLQEIFSNEMAKVDDSFFHRLEESFLVEEDKKHERHPIFGNIVDEVAYHEKYPTIYHLRKKLVDSTDKADLRLIYLALAHMIKFRGHFLIEGDLNPDNSDVDKLFIQLVQTYNQLFEENPINASGVDAKAILSARLSKSRRLENLIAQLPGEKKNGLFGNLIALSLGLTPNFKSNFDLAEDAKLQLSKDTYDDDLDNLLAQIGDQYADLFLAAKNLSDAILLSDILRVNTEITKAPLSASMIKRYDEHHQDLTLLKALVRQQLPEKYKEIFFDQSKNGYAGYIDGGASQEEFYKFIKPILEKMDGTEELLVKLNREDLLRKQRTFDNGSIPHQIHLGELHAILRRQEDFYPFLKDNREKIEKILTFRIPYYVGPLARGNSRFAWMTRKSEETITPWNFEEVVDKGASAQSFIERMTNFDKNLPNEKVLPKHSLLYEYFTVYNELTKVKYVTEGMRKPAFLSGEQKKAIVDLLFKTNRKVTVKQLKEDYFKKIECFDSVEISGVEDRFNASLGTYHDLLKIIKDKDFLDNEENEDILEDIVLTLTLFEDREMIEERLKTYAHLFDDKVMKQLKRRRYTGWGRLSRKLINGIRDKQSGKTILDFLKSDGFANRNFMQLIHDDSLTFKEDIQKAQVSGQGDSLHEHIANLAGSPAIKKGILQTVKVVDELVKVMGRHKPENIVIEMARENQTTQKGQKNSRERMKRIEEGIKELGSQILKEHPVENTQLQNEKLYLYYLQNGRDMYVDQELDINRLSDYDVDHIVPQSFLKDDSIDNKVLTRSDKARGKSDNVPSEEVVKKMKNYWRQLLNAKLITQRKFDNLTKAERGGLSELDKAGFIKRQLVETRQITKHVAQILDSRMNTKYDENDKLIREVKVITLKSKLVSDFRKDFQFYKVREINNYHHAHDAYLNAVVGTALIKKYPKLESEFVYGDYKVYDVRKMIAKSEQEIGKATAKYFFYSNIMNFFKTEITLANGEIRKRPLIETNGETGEIVWDKGRDFATVRKVLSMPQVNIVKKTEVQTGGFSKESILPKRNSDKLIARKKDWDPKKYGGFDSPTVAYSVLVVAKVEKGKSKKLKSVKELLGITIMERSSFEKNPIDFLEAKGYKEVKKDLIIKLPKYSLFELENGRKRMLASAGELQKGNELALPSKYVNFLYLASHYEKLKGSPEDNEQKQLFVEQHKHYLDEIIEQISEFSKRVILADANLDKVLSAYNKHRDKPIREQAENIIHLFTLTNLGAPAAFKYFDTTIDRKRYTSTKEVLDATLIHQSITGLYETRIDLSQLGGDGGPAPGSSGGSGGVQEISDSRPMLHIYLNGRRFLGLLDTGADKTCIAGRDWPANWPIHQTESSLQGLGMACGVARSSQPLRWQHEDKSGIIHPFVIPTLPFTLWGRDIMKDIKVRLMTDSPDDSQDLMIGAIESNLFADQISWKSDQPVWLNQWPLKQEKLQALQQLVTEQLQLGHLEESNSPWNTPVFVIKKKSGKWRLLQDLRAVNATMHDMGALQPGLPSPVAVPKGWEIIIIDLQDCFFNIKLHPEDCKRFAFSVPSPNFKRPYQRFQWKVLPQGMKNSPTLCQKFVDKAILTVRDKYQDSYIVHYMDDILLAHPSRSIVDEILTSMIQALNKHGLVVSTEKIQKYDNLKYLGTHIQGDSVSYQKLQIRTDKLRTLNDFQKLLGNINWIRPFLKLTTGELKPLFEILNGDSNPISTRKLTPEACKALQLMNERLSTARVKRLDLSQPWSLCILKTEYTPTACLWQDGVVEWIHLPHISPKVITPYDIFCTQLIIKGRHRSKELFSKDPDYIVVPYTKVQFDLLLQEKEDWPISLLGFLGEVHFHLPKDPLLTFTLQTAIIFPHMTSTTPLEKGIVIFTDGSANGRSVTYIQGREPIIKENTQNTAQQAEIVAVITAFEEVSQPFNLYTDSKYVTGLFPEIETATLSPRTKIYTELKHLQRLIHKRQEKFYIGHIRGHTGLPGPLAQGNAYADSLTRILTAAGKRTADGSEFEKRTADGSEFESPKKKAKVE

SEQ ID NO: 3162 - protein, 2116 aa, synthetic construct
MPAAKRVKLDGGDKKYSIGLDIGTNSVGWAVITDEYKVPSKKFKVLGNTDRHSIKKNLIGALLFDSGETAEATRLKRTARRRYTRRKNRICYLQEIFSNEMAKVDDSFFHRLEESFLVEEDKKHERHPIFGNIVDEVAYHEKYPTIYHLRKKLVDSTDKADLRLIYLALAHMIKFRGHFLIEGDLNPDNSDVDKLFIQLVQTYNQLFEENPINASGVDAKAILSARLSKSRRLENLIAQLPGEKKNGLFGNLIALSLGLTPNFKSNFDLAEDAKLQLSKDTYDDDLDNLLAQIGDQYADLFLAAKNLSDAILLSDILRVNTEITKAPLSASMIKRYDEHHQDLTLLKALVRQQLPEKYKEIFFDQSKNGYAGYIDGGASQEEFYKFIKPILEKMDGTEELLVKLNREDLLRKQRTFDNGSIPHQIHLGELHAILRRQEDFYPFLKDNREKIEKILTFRIPYYVGPLARGNSRFAWMTRKSEETITPWNFEEVVDKGASAQSFIERMTNFDKNLPNEKVLPKHSLLYEYFTVYNELTKVKYVTEGMRKPAFLSGEQKKAIVDLLFKTNRKVTVKQLKEDYFKKIECFDSVEISGVEDRFNASLGTYHDLLKIIKDKDFLDNEENEDILEDIVLTLTLFEDREMIEERLKTYAHLFDDKVMKQLKRRRYTGWGRLSRKLINGIRDKQSGKTILDFLKSDGFANRNFMQLIHDDSLTFKEDIQKAQVSGQGDSLHEHIANLAGSPAIKKGILQTVKVVDELVKVMGRHKPENIVIEMARENQTTQKGQKNSRERMKRIEEGIKELGSQILKEHPVENTQLQNEKLYLYYLQNGRDMYVDQELDINRLSDYDVDHIVPQSFLKDDSIDNKVLTRSDKARGKSDNVPSEEVVKKMKNYWRQLLNAKLITQRKFDNLTKAERGGLSELDKAGFIKRQLVETRQITKHVAQILDSRMNTKYDENDKLIREVKVITLKSKLVSDFRKDFQFYKVREINNYHHAHDAYLNAVVGTALIKKYPKLESEFVYGDYKVYDVRKMIAKSEQEIGKATAKYFFYSNIMNFFKTEITLANGEIRKRPLIETNGETGEIVWDKGRDFATVRKVLSMPQVNIVKKTEVQTGGFSKESILPKRNSDKLIARKKDWDPKKYGGFDSPTVAYSVLVVAKVEKGKSKKLKSVKELLGITIMERSSFEKNPIDFLEAKGYKEVKKDLIIKLPKYSLFELENGRKRMLASAGELQKGNELALPSKYVNFLYLASHYEKLKGSPEDNEQKQLFVEQHKHYLDEIIEQISEFSKRVILADANLDKVLSAYNKHRDKPIREQAENIIHLFTLTNLGAPAAFKYFDTTIDRKRYTSTKEVLDATLIHQSITGLYETRIDLSQLGGDGGGGSGGGEAAAKGGVQEISDSRPMLHIYLNGRRFLGLLDTGADKTCIAGRDWPANWPIHQTESSLQGLGMACGVARSSQPLRWQHEDKSGIIHPFVIPTLPFTLWGRDIMKDIKVRLMTDSPDDSQDLMIGAIESNLFADQISWKSDQPVWLNQWPLKQEKLQALQQLVTEQLQLGHLEESNSPWNTPVFVIKKKSGKWRLLQDLRAVNATMHDMGALQPGLPSPVAVPKGWEIIIIDLQDCFFNIKLHPEDCKRFAFSVPSPNFKRPYQRFQWKVLPQGMKNSPTLCQKFVDKAILTVRDKYQDSYIVHYMDDILLAHPSRSIVDEILTSMIQALNKHGLVVSTEKIQKYDNLKYLGTHIQGDSVSYQKLQIRTDKLRTLNDFQKLLGNINWIRPFLKLTTGELKPLFEILNGDSNPISTRKLTPEACKALQLMNERLSTARVKRLDLSQPWSLCILKTEYTPTACLWQDGVVEWIHLPHISPKVITPYDIFCTQLIIKGRHRSKELFSKDPDYIVVPYTKVQFDLLLQEKEDWPISLLGFLGEVHFHLPKDPLLTFTLQTAIIFPHMTSTTPLEKGIVIFTDGSANGRSVTYIQGREPIIKENTQNTAQQAEIVAVITAFEEVSQPFNLYTDSKYVTGLFPEIETATLSPRTKIYTELKHLQRLIHKRQEKFYIGHIRGHTGLPGPLAQGNAYADSLTRILTAAGKRTADGSEFEKRTADGSEFESPKKKAKVE

SEQ ID NO: 3163 - protein, 2116 aa, synthetic construct
MPAAKRVKLDGGDKKYSIGLDIGTNSVGWAVITDEYKVPSKKFKVLGNTDRHSIKKNLIGALLFDSGETAEATRLKRTARRRYTRRKNRICYLQEIFSNEMAKVDDSFFHRLEESFLVEEDKKHERHPIFGNIVDEVAYHEKYPTIYHLRKKLVDSTDKADLRLIYLALAHMIKFRGHFLIEGDLNPDNSDVDKLFIQLVQTYNQLFEENPINASGVDAKAILSARLSKSRRLENLIAQLPGEKKNGLFGNLIALSLGLTPNFKSNFDLAEDAKLQLSKDTYDDDLDNLLAQIGDQYADLFLAAKNLSDAILLSDILRVNTEITKAPLSASMIKRYDEHHQDLTLLKALVRQQLPEKYKEIFFDQSKNGYAGYIDGGASQEEFYKFIKPILEKMDGTEELLVKLNREDLLRKQRTFDNGSIPHQIHLGELHAILRRQEDFYPFLKDNREKIEKILTFRIPYYVGPLARGNSRFAWMTRKSEETITPWNFEEVVDKGASAQSFIERMTNFDKNLPNEKVLPKHSLLYEYFTVYNELTKVKYVTEGMRKPAFLSGEQKKAIVDLLFKTNRKVTVKQLKEDYFKKIECFDSVEISGVEDRFNASLGTYHDLLKIIKDKDFLDNEENEDILEDIVLTLTLFEDREMIEERLKTYAHLFDDKVMKQLKRRRYTGWGRLSRKLINGIRDKQSGKTILDFLKSDGFANRNFMQLIHDDSLTFKEDIQKAQVSGQGDSLHEHIANLAGSPAIKKGILQTVKVVDELVKVMGRHKPENIVIEMARENQTTQKGQKNSRERMKRIEEGIKELGSQILKEHPVENTQLQNEKLYLYYLQNGRDMYVDQELDINRLSDYDVDHIVPQSFLKDDSIDNKVLTRSDKARGKSDNVPSEEVVKKMKNYWRQLLNAKLITQRKFDNLTKAERGGLSELDKAGFIKRQLVETRQITKHVAQILDSRMNTKYDENDKLIREVKVITLKSKLVSDFRKDFQFYKVREINNYHHAHDAYLNAVVGTALIKKYPKLESEFVYGDYKVYDVRKMIAKSEQEIGKATAKYFFYSNIMNFFKTEITLANGEIRKRPLIETNGETGEIVWDKGRDFATVRKVLSMPQVNIVKKTEVQTGGFSKESILPKRNSDKLIARKKDWDPKKYGGFDSPTVAYSVLVVAKVEKGKSKKLKSVKELLGITIMERSSFEKNPIDFLEAKGYKEVKKDLIIKLPKYSLFELENGRKRMLASAGELQKGNELALPSKYVNFLYLASHYEKLKGSPEDNEQKQLFVEQHKHYLDEIIEQISEFSKRVILADANLDKVLSAYNKHRDKPIREQAENIIHLFTLTNLGAPAAFKYFDTTIDRKRYTSTKEVLDATLIHQSITGLYETRIDLSQLGGDGGGGGGSSEAAAKGGVQEISDSRPMLHIYLNGRRFLGLLDTGADKTCIAGRDWPANWPIHQTESSLQGLGMACGVARSSQPLRWQHEDKSGIIHPFVIPTLPFTLWGRDIMKDIKVRLMTDSPDDSQDLMIGAIESNLFADQISWKSDQPVWLNQWPLKQEKLQALQQLVTEQLQLGHLEESNSPWNTPVFVIKKKSGKWRLLQDLRAVNATMHDMGALQPGLPSPVAVPKGWEIIIIDLQDCFFNIKLHPEDCKRFAFSVPSPNFKRPYQRFQWKVLPQGMKNSPTLCQKFVDKAILTVRDKYQDSYIVHYMDDILLAHPSRSIVDEILTSMIQALNKHGLVVSTEKIQKYDNLKYLGTHIQGDSVSYQKLQIRTDKLRTLNDFQKLLGNINWIRPFLKLTTGELKPLFEILNGDSNPISTRKLTPEACKALQLMNERLSTARVKRLDLSQPWSLCILKTEYTPTACLWQDGVVEWIHLPHISPKVITPYDIFCTQLIIKGRHRSKELFSKDPDYIVVPYTKVQFDLLLQEKEDWPISLLGFLGEVHFHLPKDPLLTFTLQTAIIFPHMTSTTPLEKGIVIFTDGSANGRSVTYIQGREPIIKENTQNTAQQAEIVAVITAFEEVSQPFNLYTDSKYVTGLFPEIETATLSPRTKIYTELKHLQRLIHKRQEKFYIGHIRGHTGLPGPLAQGNAYADSLTRILTAAGKRTADGSEFEKRTADGSEFESPKKKAKVE

SEQ ID NO: 3164 - protein, 2116 aa, synthetic construct
MPAAKRVKLDGGDKKYSIGLDIGTNSVGWAVITDEYKVPSKKFKVLGNTDRHSIKKNLIGALLFDSGETAEATRLKRTARRRYTRRKNRICYLQEIFSNEMAKVDDSFFHRLEESFLVEEDKKHERHPIFGNIVDEVAYHEKYPTIYHLRKKLVDSTDKADLRLIYLALAHMIKFRGHFLIEGDLNPDNSDVDKLFIQLVQTYNQLFEENPINASGVDAKAILSARLSKSRRLENLIAQLPGEKKNGLFGNLIALSLGLTPNFKSNFDLAEDAKLQLSKDTYDDDLDNLLAQIGDQYADLFLAAKNLSDAILLSDILRVNTEITKAPLSASMIKRYDEHHQDLTLLKALVRQQLPEKYKEIFFDQSKNGYAGYIDGGASQEEFYKFIKPILEKMDGTEELLVKLNREDLLRKQRTFDNGSIPHQIHLGELHAILRRQEDFYPFLKDNREKIEKILTFRIPYYVGPLARGNSRFAWMTRKSEETITPWNFEEVVDKGASAQSFIERMTNFDKNLPNEKVLPKHSLLYEYFTVYNELTKVKYVTEGMRKPAFLSGEQKKAIVDLLFKTNRKVTVKQLKEDYFKKIECFDSVEISGVEDRFNASLGTYHDLLKIIKDKDFLDNEENEDILEDIVLTLTLFEDREMIEERLKTYAHLFDDKVMKQLKRRRYTGWGRLSRKLINGIRDKQSGKTILDFLKSDGFANRNFMQLIHDDSLTFKEDIQKAQVSGQGDSLHEHIANLAGSPAIKKGILQTVKVVDELVKVMGRHKPENIVIEMARENQTTQKGQKNSRERMKRIEEGIKELGSQILKEHPVENTQLQNEKLYLYYLQNGRDMYVDQELDINRLSDYDVDHIVPQSFLKDDSIDNKVLTRSDKARGKSDNVPSEEVVKKMKNYWRQLLNAKLITQRKFDNLTKAERGGLSELDKAGFIKRQLVETRQITKHVAQILDSRMNTKYDENDKLIREVKVITLKSKLVSDFRKDFQFYKVREINNYHHAHDAYLNAVVGTALIKKYPKLESEFVYGDYKVYDVRKMIAKSEQEIGKATAKYFFYSNIMNFFKTEITLANGEIRKRPLIETNGETGEIVWDKGRDFATVRKVLSMPQVNIVKKTEVQTGGFSKESILPKRNSDKLIARKKDWDPKKYGGFDSPTVAYSVLVVAKVEKGKSKKLKSVKELLGITIMERSSFEKNPIDFLEAKGYKEVKKDLIIKLPKYSLFELENGRKRMLASAGELQKGNELALPSKYVNFLYLASHYEKLKGSPEDNEQKQLFVEQHKHYLDEIIEQISEFSKRVILADANLDKVLSAYNKHRDKPIREQAENIIHLFTLTNLGAPAAFKYFDTTIDRKRYTSTKEVLDATLIHQSITGLYETRIDLSQLGGDGGGGSPAPEAAAKGGVQEISDSRPMLHIYLNGRRFLGLLDTGADKTCIAGRDWPANWPIHQTESSLQGLGMACGVARSSQPLRWQHEDKSGIIHPFVIPTLPFTLWGRDIMKDIKVRLMTDSPDDSQDLMIGAIESNLFADQISWKSDQPVWLNQWPLKQEKLQALQQLVTEQLQLGHLEESNSPWNTPVFVIKKKSGKWRLLQDLRAVNATMHDMGALQPGLPSPVAVPKGWEIIIIDLQDCFFNIKLHPEDCKRFAFSVPSPNFKRPYQRFQWKVLPQGMKNSPTLCQKFVDKAILTVRDKYQDSYIVHYMDDILLAHPSRSIVDEILTSMIQALNKHGLVVSTEKIQKYDNLKYLGTHIQGDSVSYQKLQIRTDKLRTLNDFQKLLGNINWIRPFLKLTTGELKPLFEILNGDSNPISTRKLTPEACKALQLMNERLSTARVKRLDLSQPWSLCILKTEYTPTACLWQDGVVEWIHLPHISPKVITPYDIFCTQLIIKGRHRSKELFSKDPDYIVVPYTKVQFDLLLQEKEDWPISLLGFLGEVHFHLPKDPLLTFTLQTAIIFPHMTSTTPLEKGIVIFTDGSANGRSVTYIQGREPIIKENTQNTAQQAEIVAVITAFEEVSQPFNLYTDSKYVTGLFPEIETATLSPRTKIYTELKHLQRLIHKRQEKFYIGHIRGHTGLPGPLAQGNAYADSLTRILTAAGKRTADGSEFEKRTADGSEFESPKKKAKVE

SEQ ID NO: 3165 - protein, 2117 aa, synthetic construct
MPAAKRVKLDGGDKKYSIGLDIGTNSVGWAVITDEYKVPSKKFKVLGNTDRHSIKKNLIGALLFDSGETAEATRLKRTARRRYTRRKNRICYLQEIFSNEMAKVDDSFFHRLEESFLVEEDKKHERHPIFGNIVDEVAYHEKYPTIYHLRKKLVDSTDKADLRLIYLALAHMIKFRGHFLIEGDLNPDNSDVDKLFIQLVQTYNQLFEENPINASGVDAKAILSARLSKSRRLENLIAQLPGEKKNGLFGNLIALSLGLTPNFKSNFDLAEDAKLQLSKDTYDDDLDNLLAQIGDQYADLFLAAKNLSDAILLSDILRVNTEITKAPLSASMIKRYDEHHQDLTLLKALVRQQLPEKYKEIFFDQSKNGYAGYIDGGASQEEFYKFIKPILEKMDGTEELLVKLNREDLLRKQRTFDNGSIPHQIHLGELHAILRRQEDFYPFLKDNREKIEKILTFRIPYYVGPLARGNSRFAWMTRKSEETITPWNFEEVVDKGASAQSFIERMTNFDKNLPNEKVLPKHSLLYEYFTVYNELTKVKYVTEGMRKPAFLSGEQKKAIVDLLFKTNRKVTVKQLKEDYFKKIECFDSVEISGVEDRFNASLGTYHDLLKIIKDKDFLDNEENEDILEDIVLTLTLFEDREMIEERLKTYAHLFDDKVMKQLKRRRYTGWGRLSRKLINGIRDKQSGKTILDFLKSDGFANRNFMQLIHDDSLTFKEDIQKAQVSGQGDSLHEHIANLAGSPAIKKGILQTVKVVDELVKVMGRHKPENIVIEMARENQTTQKGQKNSRERMKRIEEGIKELGSQILKEHPVENTQLQNEKLYLYYLQNGRDMYVDQELDINRLSDYDVDHIVPQSFLKDDSIDNKVLTRSDKARGKSDNVPSEEVVKKMKNYWRQLLNAKLITQRKFDNLTKAERGGLSELDKAGFIKRQLVETRQITKHVAQILDSRMNTKYDENDKLIREVKVITLKSKLVSDFRKDFQFYKVREINNYHHAHDAYLNAVVGTALIKKYPKLESEFVYGDYKVYDVRKMIAKSEQEIGKATAKYFFYSNIMNFFKTEITLANGEIRKRPLIETNGETGEIVWDKGRDFATVRKVLSMPQVNIVKKTEVQTGGFSKESILPKRNSDKLIARKKDWDPKKYGGFDSPTVAYSVLVVAKVEKGKSKKLKSVKELLGITIMERSSFEKNPIDFLEAKGYKEVKKDLIIKLPKYSLFELENGRKRMLASAGELQKGNELALPSKYVNFLYLASHYEKLKGSPEDNEQKQLFVEQHKHYLDEIIEQISEFSKRVILADANLDKVLSAYNKHRDKPIREQAENIIHLFTLTNLGAPAAFKYFDTTIDRKRYTSTKEVLDATLIHQSITGLYETRIDLSQLGGDGGGSAGSAAGSGEFGGVQEISDSRPMLHIYLNGRRFLGLLDTGADKTCIAGRDWPANWPIHQTESSLQGLGMACGVARSSQPLRWQHEDKSGIIHPFVIPTLPFTLWGRDIMKDIKVRLMTDSPDDSQDLMIGAIESNLFADQISWKSDQPVWLNQWPLKQEKLQALQQLVTEQLQLGHLEESNSPWNTPVFVIKKKSGKWRLLQDLRAVNATMHDMGALQPGLPSPVAVPKGWEIIIIDLQDCFFNIKLHPEDCKRFAFSVPSPNFKRPYQRFQWKVLPQGMKNSPTLCQKFVDKAILTVRDKYQDSYIVHYMDDILLAHPSRSIVDEILTSMIQALNKHGLVVSTEKIQKYDNLKYLGTHIQGDSVSYQKLQIRTDKLRTLNDFQKLLGNINWIRPFLKLTTGELKPLFEILNGDSNPISTRKLTPEACKALQLMNERLSTARVKRLDLSQPWSLCILKTEYTPTACLWQDGVVEWIHLPHISPKVITPYDIFCTQLIIKGRHRSKELFSKDPDYIVVPYTKVQFDLLLQEKEDWPISLLGFLGEVHFHLPKDPLLTFTLQTAIIFPHMTSTTPLEKGIVIFTDGSANGRSVTYIQGREPIIKENTQNTAQQAEIVAVITAFEEVSQPFNLYTDSKYVTGLFPEIETATLSPRTKIYTELKHLQRLIHKRQEKFYIGHIRGHTGLPGPLAQGNAYADSLTRILTAAGKRTADGSEFEKRTADGSEFESPKKKAKVE

SEQ ID NO: 3166 - protein, 2111 aa, synthetic construct
MPAAKRVKLDGGDKKYSIGLDIGTNSVGWAVITDEYKVPSKKFKVLGNTDRHSIKKNLIGALLFDSGETAEATRLKRTARRRYTRRKNRICYLQEIFSNEMAKVDDSFFHRLEESFLVEEDKKHERHPIFGNIVDEVAYHEKYPTIYHLRKKLVDSTDKADLRLIYLALAHMIKFRGHFLIEGDLNPDNSDVDKLFIQLVQTYNQLFEENPINASGVDAKAILSARLSKSRRLENLIAQLPGEKKNGLFGNLIALSLGLTPNFKSNFDLAEDAKLQLSKDTYDDDLDNLLAQIGDQYADLFLAAKNLSDAILLSDILRVNTEITKAPLSASMIKRYDEHHQDLTLLKALVRQQLPEKYKEIFFDQSKNGYAGYIDGGASQEEFYKFIKPILEKMDGTEELLVKLNREDLLRKQRTFDNGSIPHQIHLGELHAILRRQEDFYPFLKDNREKIEKILTFRIPYYVGPLARGNSRFAWMTRKSEETITPWNFEEVVDKGASAQSFIERMTNFDKNLPNEKVLPKHSLLYEYFTVYNELTKVKYVTEGMRKPAFLSGEQKKAIVDLLFKTNRKVTVKQLKEDYFKKIECFDSVEISGVEDRFNASLGTYHDLLKIIKDKDFLDNEENEDILEDIVLTLTLFEDREMIEERLKTYAHLFDDKVMKQLKRRRYTGWGRLSRKLINGIRDKQSGKTILDFLKSDGFANRNFMQLIHDDSLTFKEDIQKAQVSGQGDSLHEHIANLAGSPAIKKGILQTVKVVDELVKVMGRHKPENIVIEMARENQTTQKGQKNSRERMKRIEEGIKELGSQILKEHPVENTQLQNEKLYLYYLQNGRDMYVDQELDINRLSDYDVDHIVPQSFLKDDSIDNKVLTRSDKARGKSDNVPSEEVVKKMKNYWRQLLNAKLITQRKFDNLTKAERGGLSELDKAGFIKRQLVETRQITKHVAQILDSRMNTKYDENDKLIREVKVITLKSKLVSDFRKDFQFYKVREINNYHHAHDAYLNAVVGTALIKKYPKLESEFVYGDYKVYDVRKMIAKSEQEIGKATAKYFFYSNIMNFFKTEITLANGEIRKRPLIETNGETGEIVWDKGRDFATVRKVLSMPQVNIVKKTEVQTGGFSKESILPKRNSDKLIARKKDWDPKKYGGFDSPTVAYSVLVVAKVEKGKSKKLKSVKELLGITIMERSSFEKNPIDFLEAKGYKEVKKDLIIKLPKYSLFELENGRKRMLASAGELQKGNELALPSKYVNFLYLASHYEKLKGSPEDNEQKQLFVEQHKHYLDEIIEQISEFSKRVILADANLDKVLSAYNKHRDKPIREQAENIIHLFTLTNLGAPAAFKYFDTTIDRKRYTSTKEVLDATLIHQSITGLYETRIDLSQLGGDGGGGGGGSGGVQEISDSRPMLHIYLNGRRFLGLLDTGADKTCIAGRDWPANWPIHQTESSLQGLGMACGVARSSQPLRWQHEDKSGIIHPFVIPTLPFTLWGRDIMKDIKVRLMTDSPDDSQDLMIGAIESNLFADQISWKSDQPVWLNQWPLKQEKLQALQQLVTEQLQLGHLEESNSPWNTPVFVIKKKSGKWRLLQDLRAVNATMHDMGALQPGLPSPVAVPKGWEIIIIDLQDCFFNIKLHPEDCKRFAFSVPSPNFKRPYQRFQWKVLPQGMKNSPTLCQKFVDKAILTVRDKYQDSYIVHYMDDILLAHPSRSIVDEILTSMIQALNKHGLVVSTEKIQKYDNLKYLGTHIQGDSVSYQKLQIRTDKLRTLNDFQKLLGNINWIRPFLKLTTGELKPLFEILNGDSNPISTRKLTPEACKALQLMNERLSTARVKRLDLSQPWSLCILKTEYTPTACLWQDGVVEWIHLPHISPKVITPYDIFCTQLIIKGRHRSKELFSKDPDYIVVPYTKVQFDLLLQEKEDWPISLLGFLGEVHFHLPKDPLLTFTLQTAIIFPHMTSTTPLEKGIVIFTDGSANGRSVTYIQGREPIIKENTQNTAQQAEIVAVITAFEEVSQPFNLYTDSKYVTGLFPEIETATLSPRTKIYTELKHLQRLIHKRQEKFYIGHIRGHTGLPGPLAQGNAYADSLTRILTAAGKRTADGSEFEKRTADGSEFESPKKKAKVE

SEQ ID NO: 3167 - protein, 2113 aa, synthetic construct
MPAAKRVKLDGGDKKYSIGLDIGTNSVGWAVITDEYKVPSKKFKVLGNTDRHSIKKNLIGALLFDSGETAEATRLKRTARRRYTRRKNRICYLQEIFSNEMAKVDDSFFHRLEESFLVEEDKKHERHPIFGNIVDEVAYHEKYPTIYHLRKKLVDSTDKADLRLIYLALAHMIKFRGHFLIEGDLNPDNSDVDKLFIQLVQTYNQLFEENPINASGVDAKAILSARLSKSRRLENLIAQLPGEKKNGLFGNLIALSLGLTPNFKSNFDLAEDAKLQLSKDTYDDDLDNLLAQIGDQYADLFLAAKNLSDAILLSDILRVNTEITKAPLSASMIKRYDEHHQDLTLLKALVRQQLPEKYKEIFFDQSKNGYAGYIDGGASQEEFYKFIKPILEKMDGTEELLVKLNREDLLRKQRTFDNGSIPHQIHLGELHAILRRQEDFYPFLKDNREKIEKILTFRIPYYVGPLARGNSRFAWMTRKSEETITPWNFEEVVDKGASAQSFIERMTNFDKNLPNEKVLPKHSLLYEYFTVYNELTKVKYVTEGMRKPAFLSGEQKKAIVDLLFKTNRKVTVKQLKEDYFKKIECFDSVEISGVEDRFNASLGTYHDLLKIIKDKDFLDNEENEDILEDIVLTLTLFEDREMIEERLKTYAHLFDDKVMKQLKRRRYTGWGRLSRKLINGIRDKQSGKTILDFLKSDGFANRNFMQLIHDDSLTFKEDIQKAQVSGQGDSLHEHIANLAGSPAIKKGILQTVKVVDELVKVMGRHKPENIVIEMARENQTTQKGQKNSRERMKRIEEGIKELGSQILKEHPVENTQLQNEKLYLYYLQNGRDMYVDQELDINRLSDYDVDHIVPQSFLKDDSIDNKVLTRSDKARGKSDNVPSEEVVKKMKNYWRQLLNAKLITQRKFDNLTKAERGGLSELDKAGFIKRQLVETRQITKHVAQILDSRMNTKYDENDKLIREVKVITLKSKLVSDFRKDFQFYKVREINNYHHAHDAYLNAVVGTALIKKYPKLESEFVYGDYKVYDVRKMIAKSEQEIGKATAKYFFYSNIMNFFKTEITLANGEIRKRPLIETNGETGEIVWDKGRDFATVRKVLSMPQVNIVKKTEVQTGGFSKESILPKRNSDKLIARKKDWDPKKYGGFDSPTVAYSVLVVAKVEKGKSKKLKSVKELLGITIMERSSFEKNPIDFLEAKGYKEVKKDLIIKLPKYSLFELENGRKRMLASAGELQKGNELALPSKYVNFLYLASHYEKLKGSPEDNEQKQLFVEQHKHYLDEIIEQISEFSKRVILADANLDKVLSAYNKHRDKPIREQAENIIHLFTLTNLGAPAAFKYFDTTIDRKRYTSTKEVLDATLIHQSITGLYETRIDLSQLGGDGGGGGEAAAKGGVQEISDSRPMLHIYLNGRRFLGLLDTGADKTCIAGRDWPANWPIHQTESSLQGLGMACGVARSSQPLRWQHEDKSGIIHPFVIPTLPFTLWGRDIMKDIKVRLMTDSPDDSQDLMIGAIESNLFADQISWKSDQPVWLNQWPLKQEKLQALQQLVTEQLQLGHLEESNSPWNTPVFVIKKKSGKWRLLQDLRAVNATMHDMGALQPGLPSPVAVPKGWEIIIIDLQDCFFNIKLHPEDCKRFAFSVPSPNFKRPYQRFQWKVLPQGMKNSPTLCQKFVDKAILTVRDKYQDSYIVHYMDDILLAHPSRSIVDEILTSMIQALNKHGLVVSTEKIQKYDNLKYLGTHIQGDSVSYQKLQIRTDKLRTLNDFQKLLGNINWIRPFLKLTTGELKPLFEILNGDSNPISTRKLTPEACKALQLMNERLSTARVKRLDLSQPWSLCILKTEYTPTACLWQDGVVEWIHLPHISPKVITPYDIFCTQLIIKGRHRSKELFSKDPDYIVVPYTKVQFDLLLQEKEDWPISLLGFLGEVHFHLPKDPLLTFTLQTAIIFPHMTSTTPLEKGIVIFTDGSANGRSVTYIQGREPIIKENTQNTAQQAEIVAVITAFEEVSQPFNLYTDSKYVTGLFPEIETATLSPRTKIYTELKHLQRLIHKRQEKFYIGHIRGHTGLPGPLAQGNAYADSLTRILTAAGKRTADGSEFEKRTADGSEFESPKKKAKVE

SEQ ID NO: 3168 - protein, 2111 aa, synthetic construct
MPAAKRVKLDGGDKKYSIGLDIGTNSVGWAVITDEYKVPSKKFKVLGNTDRHSIKKNLIGALLFDSGETAEATRLKRTARRRYTRRKNRICYLQEIFSNEMAKVDDSFFHRLEESFLVEEDKKHERHPIFGNIVDEVAYHEKYPTIYHLRKKLVDSTDKADLRLIYLALAHMIKFRGHFLIEGDLNPDNSDVDKLFIQLVQTYNQLFEENPINASGVDAKAILSARLSKSRRLENLIAQLPGEKKNGLFGNLIALSLGLTPNFKSNFDLAEDAKLQLSKDTYDDDLDNLLAQIGDQYADLFLAAKNLSDAILLSDILRVNTEITKAPLSASMIKRYDEHHQDLTLLKALVRQQLPEKYKEIFFDQSKNGYAGYIDGGASQEEFYKFIKPILEKMDGTEELLVKLNREDLLRKQRTFDNGSIPHQIHLGELHAILRRQEDFYPFLKDNREKIEKILTFRIPYYVGPLARGNSRFAWMTRKSEETITPWNFEEVVDKGASAQSFIERMTNFDKNLPNEKVLPKHSLLYEYFTVYNELTKVKYVTEGMRKPAFLSGEQKKAIVDLLFKTNRKVTVKQLKEDYFKKIECFDSVEISGVEDRFNASLGTYHDLLKIIKDKDFLDNEENEDILEDIVLTLTLFEDREMIEERLKTYAHLFDDKVMKQLKRRRYTGWGRLSRKLINGIRDKQSGKTILDFLKSDGFANRNFMQLIHDDSLTFKEDIQKAQVSGQGDSLHEHIANLAGSPAIKKGILQTVKVVDELVKVMGRHKPENIVIEMARENQTTQKGQKNSRERMKRIEEGIKELGSQILKEHPVENTQLQNEKLYLYYLQNGRDMYVDQELDINRLSDYDVDHIVPQSFLKDDSIDNKVLTRSDKARGKSDNVPSEEVVKKMKNYWRQLLNAKLITQRKFDNLTKAERGGLSELDKAGFIKRQLVETRQITKHVAQILDSRMNTKYDENDKLIREVKVITLKSKLVSDFRKDFQFYKVREINNYHHAHDAYLNAVVGTALIKKYPKLESEFVYGDYKVYDVRKMIAKSEQEIGKATAKYFFYSNIMNFFKTEITLANGEIRKRPLIETNGETGEIVWDKGRDFATVRKVLSMPQVNIVKKTEVQTGGFSKESILPKRNSDKLIARKKDWDPKKYGGFDSPTVAYSVLVVAKVEKGKSKKLKSVKELLGITIMERSSFEKNPIDFLEAKGYKEVKKDLIIKLPKYSLFELENGRKRMLASAGELQKGNELALPSKYVNFLYLASHYEKLKGSPEDNEQKQLFVEQHKHYLDEIIEQISEFSKRVILADANLDKVLSAYNKHRDKPIREQAENIIHLFTLTNLGAPAAFKYFDTTIDRKRYTSTKEVLDATLIHQSITGLYETRIDLSQLGGDGGGGSGGSGGVQEISDSRPMLHIYLNGRRFLGLLDTGADKTCIAGRDWPANWPIHQTESSLQGLGMACGVARSSQPLRWQHEDKSGIIHPFVIPTLPFTLWGRDIMKDIKVRLMTDSPDDSQDLMIGAIESNLFADQISWKSDQPVWLNQWPLKQEKLQALQQLVTEQLQLGHLEESNSPWNTPVFVIKKKSGKWRLLQDLRAVNATMHDMGALQPGLPSPVAVPKGWEIIIIDLQDCFFNIKLHPEDCKRFAFSVPSPNFKRPYQRFQWKVLPQGMKNSPTLCQKFVDKAILTVRDKYQDSYIVHYMDDILLAHPSRSIVDEILTSMIQALNKHGLVVSTEKIQKYDNLKYLGTHIQGDSVSYQKLQIRTDKLRTLNDFQKLLGNINWIRPFLKLTTGELKPLFEILNGDSNPISTRKLTPEACKALQLMNERLSTARVKRLDLSQPWSLCILKTEYTPTACLWQDGVVEWIHLPHISPKVITPYDIFCTQLIIKGRHRSKELFSKDPDYIVVPYTKVQFDLLLQEKEDWPISLLGFLGEVHFHLPKDPLLTFTLQTAIIFPHMTSTTPLEKGIVIFTDGSANGRSVTYIQGREPIIKENTQNTAQQAEIVAVITAFEEVSQPFNLYTDSKYVTGLFPEIETATLSPRTKIYTELKHLQRLIHKRQEKFYIGHIRGHTGLPGPLAQGNAYADSLTRILTAAGKRTADGSEFEKRTADGSEFESPKKKAKVE

SEQ ID NO: 3169 - protein, 2116 aa, synthetic construct
MPAAKRVKLDGGDKKYSIGLDIGTNSVGWAVITDEYKVPSKKFKVLGNTDRHSIKKNLIGALLFDSGETAEATRLKRTARRRYTRRKNRICYLQEIFSNEMAKVDDSFFHRLEESFLVEEDKKHERHPIFGNIVDEVAYHEKYPTIYHLRKKLVDSTDKADLRLIYLALAHMIKFRGHFLIEGDLNPDNSDVDKLFIQLVQTYNQLFEENPINASGVDAKAILSARLSKSRRLENLIAQLPGEKKNGLFGNLIALSLGLTPNFKSNFDLAEDAKLQLSKDTYDDDLDNLLAQIGDQYADLFLAAKNLSDAILLSDILRVNTEITKAPLSASMIKRYDEHHQDLTLLKALVRQQLPEKYKEIFFDQSKNGYAGYIDGGASQEEFYKFIKPILEKMDGTEELLVKLNREDLLRKQRTFDNGSIPHQIHLGELHAILRRQEDFYPFLKDNREKIEKILTFRIPYYVGPLARGNSRFAWMTRKSEETITPWNFEEVVDKGASAQSFIERMTNFDKNLPNEKVLPKHSLLYEYFTVYNELTKVKYVTEGMRKPAFLSGEQKKAIVDLLFKTNRKVTVKQLKEDYFKKIECFDSVEISGVEDRFNASLGTYHDLLKIIKDKDFLDNEENEDILEDIVLTLTLFEDREMIEERLKTYAHLFDDKVMKQLKRRRYTGWGRLSRKLINGIRDKQSGKTILDFLKSDGFANRNFMQLIHDDSLTFKEDIQKAQVSGQGDSLHEHIANLAGSPAIKKGILQTVKVVDELVKVMGRHKPENIVIEMARENQTTQKGQKNSRERMKRIEEGIKELGSQILKEHPVENTQLQNEKLYLYYLQNGRDMYVDQELDINRLSDYDVDHIVPQSFLKDDSIDNKVLTRSDKARGKSDNVPSEEVVKKMKNYWRQLLNAKLITQRKFDNLTKAERGGLSELDKAGFIKRQLVETRQITKHVAQILDSRMNTKYDENDKLIREVKVITLKSKLVSDFRKDFQFYKVREINNYHHAHDAYLNAVVGTALIKKYPKLESEFVYGDYKVYDVRKMIAKSEQEIGKATAKYFFYSNIMNFFKTEITLANGEIRKRPLIETNGETGEIVWDKGRDFATVRKVLSMPQVNIVKKTEVQTGGFSKESILPKRNSDKLIARKKDWDPKKYGGFDSPTVAYSVLVVAKVEKGKSKKLKSVKELLGITIMERSSFEKNPIDFLEAKGYKEVKKDLIIKLPKYSLFELENGRKRMLASAGELQKGNELALPSKYVNFLYLASHYEKLKGSPEDNEQKQLFVEQHKHYLDEIIEQISEFSKRVILADANLDKVLSAYNKHRDKPIREQAENIIHLFTLTNLGAPAAFKYFDTTIDRKRYTSTKEVLDATLIHQSITGLYETRIDLSQLGGDGGPAPAPAPAPAPGGVQEISDSRPMLHIYLNGRRFLGLLDTGADKTCIAGRDWPANWPIHQTESSLQGLGMACGVARSSQPLRWQHEDKSGIIHPFVIPTLPFTLWGRDIMKDIKVRLMTDSPDDSQDLMIGAIESNLFADQISWKSDQPVWLNQWPLKQEKLQALQQLVTEQLQLGHLEESNSPWNTPVFVIKKKSGKWRLLQDLRAVNATMHDMGALQPGLPSPVAVPKGWEIIIIDLQDCFFNIKLHPEDCKRFAFSVPSPNFKRPYQRFQWKVLPQGMKNSPTLCQKFVDKAILTVRDKYQDSYIVHYMDDILLAHPSRSIVDEILTSMIQALNKHGLVVSTEKIQKYDNLKYLGTHIQGDSVSYQKLQIRTDKLRTLNDFQKLLGNINWIRPFLKLTTGELKPLFEILNGDSNPISTRKLTPEACKALQLMNERLSTARVKRLDLSQPWSLCILKTEYTPTACLWQDGVVEWIHLPHISPKVITPYDIFCTQLIIKGRHRSKELFSKDPDYIVVPYTKVQFDLLLQEKEDWPISLLGFLGEVHFHLPKDPLLTFTLQTAIIFPHMTSTTPLEKGIVIFTDGSANGRSVTYIQGREPIIKENTQNTAQQAEIVAVITAFEEVSQPFNLYTDSKYVTGLFPEIETATLSPRTKIYTELKHLQRLIHKRQEKFYIGHIRGHTGLPGPLAQGNAYADSLTRILTAAGKRTADGSEFEKRTADGSEFESPKKKAKVE

SEQ ID NO: 3170 - protein, 2116 aa, synthetic construct
MPAAKRVKLDGGDKKYSIGLDIGTNSVGWAVITDEYKVPSKKFKVLGNTDRHSIKKNLIGALLFDSGETAEATRLKRTARRRYTRRKNRICYLQEIFSNEMAKVDDSFFHRLEESFLVEEDKKHERHPIFGNIVDEVAYHEKYPTIYHLRKKLVDSTDKADLRLIYLALAHMIKFRGHFLIEGDLNPDNSDVDKLFIQLVQTYNQLFEENPINASGVDAKAILSARLSKSRRLENLIAQLPGEKKNGLFGNLIALSLGLTPNFKSNFDLAEDAKLQLSKDTYDDDLDNLLAQIGDQYADLFLAAKNLSDAILLSDILRVNTEITKAPLSASMIKRYDEHHQDLTLLKALVRQQLPEKYKEIFFDQSKNGYAGYIDGGASQEEFYKFIKPILEKMDGTEELLVKLNREDLLRKQRTFDNGSIPHQIHLGELHAILRRQEDFYPFLKDNREKIEKILTFRIPYYVGPLARGNSRFAWMTRKSEETITPWNFEEVVDKGASAQSFIERMTNFDKNLPNEKVLPKHSLLYEYFTVYNELTKVKYVTEGMRKPAFLSGEQKKAIVDLLFKTNRKVTVKQLKEDYFKKIECFDSVEISGVEDRFNASLGTYHDLLKIIKDKDFLDNEENEDILEDIVLTLTLFEDREMIEERLKTYAHLFDDKVMKQLKRRRYTGWGRLSRKLINGIRDKQSGKTILDFLKSDGFANRNFMQLIHDDSLTFKEDIQKAQVSGQGDSLHEHIANLAGSPAIKKGILQTVKVVDELVKVMGRHKPENIVIEMARENQTTQKGQKNSRERMKRIEEGIKELGSQILKEHPVENTQLQNEKLYLYYLQNGRDMYVDQELDINRLSDYDVDHIVPQSFLKDDSIDNKVLTRSDKARGKSDNVPSEEVVKKMKNYWRQLLNAKLITQRKFDNLTKAERGGLSELDKAGFIKRQLVETRQITKHVAQILDSRMNTKYDENDKLIREVKVITLKSKLVSDFRKDFQFYKVREINNYHHAHDAYLNAVVGTALIKKYPKLESEFVYGDYKVYDVRKMIAKSEQEIGKATAKYFFYSNIMNFFKTEITLANGEIRKRPLIETNGETGEIVWDKGRDFATVRKVLSMPQVNIVKKTEVQTGGFSKESILPKRNSDKLIARKKDWDPKKYGGFDSPTVAYSVLVVAKVEKGKSKKLKSVKELLGITIMERSSFEKNPIDFLEAKGYKEVKKDLIIKLPKYSLFELENGRKRMLASAGELQKGNELALPSKYVNFLYLASHYEKLKGSPEDNEQKQLFVEQHKHYLDEIIEQISEFSKRVILADANLDKVLSAYNKHRDKPIREQAENIIHLFTLTNLGAPAAFKYFDTTIDRKRYTSTKEVLDATLIHQSITGLYETRIDLSQLGGDGGGGSEAAAKPAPGGVQEISDSRPMLHIYLNGRRFLGLLDTGADKTCIAGRDWPANWPIHQTESSLQGLGMACGVARSSQPLRWQHEDKSGIIHPFVIPTLPFTLWGRDIMKDIKVRLMTDSPDDSQDLMIGAIESNLFADQISWKSDQPVWLNQWPLKQEKLQALQQLVTEQLQLGHLEESNSPWNTPVFVIKKKSGKWRLLQDLRAVNATMHDMGALQPGLPSPVAVPKGWEIIIIDLQDCFFNIKLHPEDCKRFAFSVPSPNFKRPYQRFQWKVLPQGMKNSPTLCQKFVDKAILTVRDKYQDSYIVHYMDDILLAHPSRSIVDEILTSMIQALNKHGLVVSTEKIQKYDNLKYLGTHIQGDSVSYQKLQIRTDKLRTLNDFQKLLGNINWIRPFLKLTTGELKPLFEILNGDSNPISTRKLTPEACKALQLMNERLSTARVKRLDLSQPWSLCILKTEYTPTACLWQDGVVEWIHLPHISPKVITPYDIFCTQLIIKGRHRSKELFSKDPDYIVVPYTKVQFDLLLQEKEDWPISLLGFLGEVHFHLPKDPLLTFTLQTAIIFPHMTSTTPLEKGIVIFTDGSANGRSVTYIQGREPIIKENTQNTAQQAEIVAVITAFEEVSQPFNLYTDSKYVTGLFPEIETATLSPRTKIYTELKHLQRLIHKRQEKFYIGHIRGHTGLPGPLAQGNAYADSLTRILTAAGKRTADGSEFEKRTADGSEFESPKKKAKVE

SEQ ID NO: 3171 - protein, 2116 aa, synthetic construct
MPAAKRVKLDGGDKKYSIGLDIGTNSVGWAVITDEYKVPSKKFKVLGNTDRHSIKKNLIGALLFDSGETAEATRLKRTARRRYTRRKNRICYLQEIFSNEMAKVDDSFFHRLEESFLVEEDKKHERHPIFGNIVDEVAYHEKYPTIYHLRKKLVDSTDKADLRLIYLALAHMIKFRGHFLIEGDLNPDNSDVDKLFIQLVQTYNQLFEENPINASGVDAKAILSARLSKSRRLENLIAQLPGEKKNGLFGNLIALSLGLTPNFKSNFDLAEDAKLQLSKDTYDDDLDNLLAQIGDQYADLFLAAKNLSDAILLSDILRVNTEITKAPLSASMIKRYDEHHQDLTLLKALVRQQLPEKYKEIFFDQSKNGYAGYIDGGASQEEFYKFIKPILEKMDGTEELLVKLNREDLLRKQRTFDNGSIPHQIHLGELHAILRRQEDFYPFLKDNREKIEKILTFRIPYYVGPLARGNSRFAWMTRKSEETITPWNFEEVVDKGASAQSFIERMTNFDKNLPNEKVLPKHSLLYEYFTVYNELTKVKYVTEGMRKPAFLSGEQKKAIVDLLFKTNRKVTVKQLKEDYFKKIECFDSVEISGVEDRFNASLGTYHDLLKIIKDKDFLDNEENEDILEDIVLTLTLFEDREMIEERLKTYAHLFDDKVMKQLKRRRYTGWGRLSRKLINGIRDKQSGKTILDFLKSDGFANRNFMQLIHDDSLTFKEDIQKAQVSGQGDSLHEHIANLAGSPAIKKGILQTVKVVDELVKVMGRHKPENIVIEMARENQTTQKGQKNSRERMKRIEEGIKELGSQILKEHPVENTQLQNEKLYLYYLQNGRDMYVDQELDINRLSDYDVDHIVPQSFLKDDSIDNKVLTRSDKARGKSDNVPSEEVVKKMKNYWRQLLNAKLITQRKFDNLTKAERGGLSELDKAGFIKRQLVETRQITKHVAQILDSRMNTKYDENDKLIREVKVITLKSKLVSDFRKDFQFYKVREINNYHHAHDAYLNAVVGTALIKKYPKLESEFVYGDYKVYDVRKMIAKSEQEIGKATAKYFFYSNIMNFFKTEITLANGEIRKRPLIETNGETGEIVWDKGRDFATVRKVLSMPQVNIVKKTEVQTGGFSKESILPKRNSDKLIARKKDWDPKKYGGFDSPTVAYSVLVVAKVEKGKSKKLKSVKELLGITIMERSSFEKNPIDFLEAKGYKEVKKDLIIKLPKYSLFELENGRKRMLASAGELQKGNELALPSKYVNFLYLASHYEKLKGSPEDNEQKQLFVEQHKHYLDEIIEQISEFSKRVILADANLDKVLSAYNKHRDKPIREQAENIIHLFTLTNLGAPAAFKYFDTTIDRKRYTSTKEVLDATLIHQSITGLYETRIDLSQLGGDGGEAAAKGSSGGSGGWVQEISDSRPMLHIYLNGRRFLGLLNTGADKTCIAGRDWPANWPIHQTESSLQGLGMACGVARSSQPLRWQHEDKSGIIHPFVIPTLPFTLWGRDIMKDIKVRLMTDSPDDSQDLMIGAIESNLFADQISWKSDQPVWLNQWPLKQEKLQALQQLVTEQLQLGHLEESNSPWNTPVFVIKKKSGKWRLLQDLRAVNATMHDMGALQPGLPSPVAVPKGWEIIIIDLQDCFFNIKLHPEDCKRFAFSVPSPNFKRPYQRFQWKVLPQGMKNSPTLCQKFVDKAILTVRDKYQDSYIVHYMDDILLAHPSRSIVDEILTSMIQALNKHGLVVSTEKIQKYDNLKYLGTHIQGDSVSYQKLQIRTDKLRTLNDFQKLLGNINWIRPFLKLTTGELKPLFEILNGDSNPISTRKLTPEACKALQLMNERLSTARVKRLDLSQPWSLCILKTEYTPTACLWQDGVVEWIHLPHISPKVITPYDIFCTQLIIKGRHRSKELFSKDPDYIVVPYTKVQFDLLLQEKEDWPISLLGFLGEVHFHLPKDPLLTFTLQTAIIFPHMTSTTPLEKGIVIFTDGSANGRSVTYIQGREPIIKENTQNTAQQAEIVAVITAFEEVSQPFNLYTDSKYVTGLFPEIETATLSPRTKIYTELKHLQRLIHKRQEKFYIGHIRGHTGLPGPLAQGNAYADSLTRILTAGKRTADGSEFEKRTADGSEFESPKKKAKVE

SEQ ID NO: 3172 - protein, 2135 aa, synthetic construct
MPAAKRVKLDGGDKKYSIGLDIGTNSVGWAVITDEYKVPSKKFKVLGNTDRHSIKKNLIGALLFDSGETAEATRLKRTARRRYTRRKNRICYLQEIFSNEMAKVDDSFFHRLEESFLVEEDKKHERHPIFGNIVDEVAYHEKYPTIYHLRKKLVDSTDKADLRLIYLALAHMIKFRGHFLIEGDLNPDNSDVDKLFIQLVQTYNQLFEENPINASGVDAKAILSARLSKSRRLENLIAQLPGEKKNGLFGNLIALSLGLTPNFKSNFDLAEDAKLQLSKDTYDDDLDNLLAQIGDQYADLFLAAKNLSDAILLSDILRVNTEITKAPLSASMIKRYDEHHQDLTLLKALVRQQLPEKYKEIFFDQSKNGYAGYIDGGASQEEFYKFIKPILEKMDGTEELLVKLNREDLLRKQRTFDNGSIPHQIHLGELHAILRRQEDFYPFLKDNREKIEKILTFRIPYYVGPLARGNSRFAWMTRKSEETITPWNFEEVVDKGASAQSFIERMTNFDKNLPNEKVLPKHSLLYEYFTVYNELTKVKYVTEGMRKPAFLSGEQKKAIVDLLFKTNRKVTVKQLKEDYFKKIECFDSVEISGVEDRFNASLGTYHDLLKIIKDKDFLDNEENEDILEDIVLTLTLFEDREMIEERLKTYAHLFDDKVMKQLKRRRYTGWGRLSRKLINGIRDKQSGKTILDFLKSDGFANRNFMQLIHDDSLTFKEDIQKAQVSGQGDSLHEHIANLAGSPAIKKGILQTVKVVDELVKVMGRHKPENIVIEMARENQTTQKGQKNSRERMKRIEEGIKELGSQILKEHPVENTQLQNEKLYLYYLQNGRDMYVDQELDINRLSDYDVDHIVPQSFLKDDSIDNKVLTRSDKARGKSDNVPSEEVVKKMKNYWRQLLNAKLITQRKFDNLTKAERGGLSELDKAGFIKRQLVETRQITKHVAQILDSRMNTKYDENDKLIREVKVITLKSKLVSDFRKDFQFYKVREINNYHHAHDAYLNAVVGTALIKKYPKLESEFVYGDYKVYDVRKMIAKSEQEIGKATAKYFFYSNIMNFFKTEITLANGEIRKRPLIETNGETGEIVWDKGRDFATVRKVLSMPQVNIVKKTEVQTGGFSKESILPKRNSDKLIARKKDWDPKKYGGFDSPTVAYSVLVVAKVEKGKSKKLKSVKELLGITIMERSSFEKNPIDFLEAKGYKEVKKDLIIKLPKYSLFELENGRKRMLASAGELQKGNELALPSKYVNFLYLASHYEKLKGSPEDNEQKQLFVEQHKHYLDEIIEQISEFSKRVILADANLDKVLSAYNKHRDKPIREQAENIIHLFTLTNLGAPAAFKYFDTTIDRKRYTSTKEVLDATLIHQSITGLYETRIDLSQLGGDGGEAAAKEAAAKEAAAKEAAAKEAAAKEAAAKGGWVQEISDSRPMLHIYLNGRRFLGLLNTGADKTCIAGRDWPANWPIHQTESSLQGLGMACGVARSSQPLRWQHEDKSGIIHPFVIPTLPFTLWGRDIMKDIKVRLMTDSPDDSQDLMIGAIESNLFADQISWKSDQPVWLNQWPLKQEKLQALQQLVTEQLQLGHLEESNSPWNTPVFVIKKKSGKWRLLQDLRAVNATMHDMGALQPGLPSPVAVPKGWEIIIIDLQDCFFNIKLHPEDCKRFAFSVPSPNFKRPYQRFQWKVLPQGMKNSPTLCQKFVDKAILTVRDKYQDSYIVHYMDDILLAHPSRSIVDEILTSMIQALNKHGLVVSTEKIQKYDNLKYLGTHIQGDSVSYQKLQIRTDKLRTLNDFQKLLGNINWIRPFLKLTTGELKPLFEILNGDSNPISTRKLTPEACKALQLMNERLSTARVKRLDLSQPWSLCILKTEYTPTACLWQDGVVEWIHLPHISPKVITPYDIFCTQLIIKGRHRSKELFSKDPDYIVVPYTKVQFDLLLQEKEDWPISLLGFLGEVHFHLPKDPLLTFTLQTAIIFPHMTSTTPLEKGIVIFTDGSANGRSVTYIQGREPIIKENTQNTAQQAEIVAVITAFEEVSQPFNLYTDSKYVTGLFPEIETATLSPRTKIYTELKHLQRLIHKRQEKFYIGHIRGHTGLPGPLAQGNAYADSLTRILTAGKRTADGSEFEKRTADGSEFESPKKKAKVE

SEQ ID NO: 3173 - protein, 2135 aa, synthetic construct
MPAAKRVKLDGGDKKYSIGLDIGTNSVGWAVITDEYKVPSKKFKVLGNTDRHSIKKNLIGALLFDSGETAEATRLKRTARRRYTRRKNRICYLQEIFSNEMAKVDDSFFHRLEESFLVEEDKKHERHPIFGNIVDEVAYHEKYPTIYHLRKKLVDSTDKADLRLIYLALAHMIKFRGHFLIEGDLNPDNSDVDKLFIQLVQTYNQLFEENPINASGVDAKAILSARLSKSRRLENLIAQLPGEKKNGLFGNLIALSLGLTPNFKSNFDLAEDAKLQLSKDTYDDDLDNLLAQIGDQYADLFLAAKNLSDAILLSDILRVNTEITKAPLSASMIKRYDEHHQDLTLLKALVRQQLPEKYKEIFFDQSKNGYAGYIDGGASQEEFYKFIKPILEKMDGTEELLVKLNREDLLRKQRTFDNGSIPHQIHLGELHAILRRQEDFYPFLKDNREKIEKILTFRIPYYVGPLARGNSRFAWMTRKSEETITPWNFEEVVDKGASAQSFIERMTNFDKNLPNEKVLPKHSLLYEYFTVYNELTKVKYVTEGMRKPAFLSGEQKKAIVDLLFKTNRKVTVKQLKEDYFKKIECFDSVEISGVEDRFNASLGTYHDLLKIIKDKDFLDNEENEDILEDIVLTLTLFEDREMIEERLKTYAHLFDDKVMKQLKRRRYTGWGRLSRKLINGIRDKQSGKTILDFLKSDGFANRNFMQLIHDDSLTFKEDIQKAQVSGQGDSLHEHIANLAGSPAIKKGILQTVKVVDELVKVMGRHKPENIVIEMARENQTTQKGQKNSRERMKRIEEGIKELGSQILKEHPVENTQLQNEKLYLYYLQNGRDMYVDQELDINRLSDYDVDHIVPQSFLKDDSIDNKVLTRSDKARGKSDNVPSEEVVKKMKNYWRQLLNAKLITQRKFDNLTKAERGGLSELDKAGFIKRQLVETRQITKHVAQILDSRMNTKYDENDKLIREVKVITLKSKLVSDFRKDFQFYKVREINNYHHAHDAYLNAVVGTALIKKYPKLESEFVYGDYKVYDVRKMIAKSEQEIGKATAKYFFYSNIMNFFKTEITLANGEIRKRPLIETNGETGEIVWDKGRDFATVRKVLSMPQVNIVKKTEVQTGGFSKESILPKRNSDKLIARKKDWDPKKYGGFDSPTVAYSVLVVAKVEKGKSKKLKSVKELLGITIMERSSFEKNPIDFLEAKGYKEVKKDLIIKLPKYSLFELENGRKRMLASAGELQKGNELALPSKYVNFLYLASHYEKLKGSPEDNEQKQLFVEQHKHYLDEIIEQISEFSKRVILADANLDKVLSAYNKHRDKPIREQAENIIHLFTLTNLGAPAAFKYFDTTIDRKRYTSTKEVLDATLIHQSITGLYETRIDLSQLGGDGGGGGGSGGGGSGGGGSGGGGSGGGGSGGGGSGGWVQEISDSRPMLHIYLNGRRFLGLLNTGADKTCIAGRDWPANWPIHQTESSLQGLGMACGVARSSQPLRWQHEDKSGIIHPFVIPTLPFTLWGRDIMKDIKVRLMTDSPDDSQDLMIGAIESNLFADQISWKSDQPVWLNQWPLKQEKLQALQQLVTEQLQLGHLEESNSPWNTPVFVIKKKSGKWRLLQDLRAVNATMHDMGALQPGLPSPVAVPKGWEIIIIDLQDCFFNIKLHPEDCKRFAFSVPSPNFKRPYQRFQWKVLPQGMKNSPTLCQKFVDKAILTVRDKYQDSYIVHYMDDILLAHPSRSIVDEILTSMIQALNKHGLVVSTEKIQKYDNLKYLGTHIQGDSVSYQKLQIRTDKLRTLNDFQKLLGNINWIRPFLKLTTGELKPLFEILNGDSNPISTRKLTPEACKALQLMNERLSTARVKRLDLSQPWSLCILKTEYTPTACLWQDGVVEWIHLPHISPKVITPYDIFCTQLIIKGRHRSKELFSKDPDYIVVPYTKVQFDLLLQEKEDWPISLLGFLGEVHFHLPKDPLLTFTLQTAIIFPHMTSTTPLEKGIVIFTDGSANGRSVTYIQGREPIIKENTQNTAQQAEIVAVITAFEEVSQPFNLYTDSKYVTGLFPEIETATLSPRTKIYTELKHLQRLIHKRQEKFYIGHIRGHTGLPGPLAQGNAYADSLTRILTAGKRTADGSEFEKRTADGSEFESPKKKAKVE

SEQ ID NO: 3174 - protein, 2130 aa, synthetic construct
MPAAKRVKLDGGDKKYSIGLDIGTNSVGWAVITDEYKVPSKKFKVLGNTDRHSIKKNLIGALLFDSGETAEATRLKRTARRRYTRRKNRICYLQEIFSNEMAKVDDSFFHRLEESFLVEEDKKHERHPIFGNIVDEVAYHEKYPTIYHLRKKLVDSTDKADLRLIYLALAHMIKFRGHFLIEGDLNPDNSDVDKLFIQLVQTYNQLFEENPINASGVDAKAILSARLSKSRRLENLIAQLPGEKKNGLFGNLIALSLGLTPNFKSNFDLAEDAKLQLSKDTYDDDLDNLLAQIGDQYADLFLAAKNLSDAILLSDILRVNTEITKAPLSASMIKRYDEHHQDLTLLKALVRQQLPEKYKEIFFDQSKNGYAGYIDGGASQEEFYKFIKPILEKMDGTEELLVKLNREDLLRKQRTFDNGSIPHQIHLGELHAILRRQEDFYPFLKDNREKIEKILTFRIPYYVGPLARGNSRFAWMTRKSEETITPWNFEEVVDKGASAQSFIERMTNFDKNLPNEKVLPKHSLLYEYFTVYNELTKVKYVTEGMRKPAFLSGEQKKAIVDLLFKTNRKVTVKQLKEDYFKKIECFDSVEISGVEDRFNASLGTYHDLLKIIKDKDFLDNEENEDILEDIVLTLTLFEDREMIEERLKTYAHLFDDKVMKQLKRRRYTGWGRLSRKLINGIRDKQSGKTILDFLKSDGFANRNFMQLIHDDSLTFKEDIQKAQVSGQGDSLHEHIANLAGSPAIKKGILQTVKVVDELVKVMGRHKPENIVIEMARENQTTQKGQKNSRERMKRIEEGIKELGSQILKEHPVENTQLQNEKLYLYYLQNGRDMYVDQELDINRLSDYDVDHIVPQSFLKDDSIDNKVLTRSDKARGKSDNVPSEEVVKKMKNYWRQLLNAKLITQRKFDNLTKAERGGLSELDKAGFIKRQLVETRQITKHVAQILDSRMNTKYDENDKLIREVKVITLKSKLVSDFRKDFQFYKVREINNYHHAHDAYLNAVVGTALIKKYPKLESEFVYGDYKVYDVRKMIAKSEQEIGKATAKYFFYSNIMNFFKTEITLANGEIRKRPLIETNGETGEIVWDKGRDFATVRKVLSMPQVNIVKKTEVQTGGFSKESILPKRNSDKLIARKKDWDPKKYGGFDSPTVAYSVLVVAKVEKGKSKKLKSVKELLGITIMERSSFEKNPIDFLEAKGYKEVKKDLIIKLPKYSLFELENGRKRMLASAGELQKGNELALPSKYVNFLYLASHYEKLKGSPEDNEQKQLFVEQHKHYLDEIIEQISEFSKRVILADANLDKVLSAYNKHRDKPIREQAENIIHLFTLTNLGAPAAFKYFDTTIDRKRYTSTKEVLDATLIHQSITGLYETRIDLSQLGGDGGEAAAKEAAAKEAAAKEAAAKEAAAKGGWVQEISDSRPMLHIYLNGRRFLGLLNTGADKTCIAGRDWPANWPIHQTESSLQGLGMACGVARSSQPLRWQHEDKSGIIHPFVIPTLPFTLWGRDIMKDIKVRLMTDSPDDSQDLMIGAIESNLFADQISWKSDQPVWLNQWPLKQEKLQALQQLVTEQLQLGHLEESNSPWNTPVFVIKKKSGKWRLLQDLRAVNATMHDMGALQPGLPSPVAVPKGWEIIIIDLQDCFFNIKLHPEDCKRFAFSVPSPNFKRPYQRFQWKVLPQGMKNSPTLCQKFVDKAILTVRDKYQDSYIVHYMDDILLAHPSRSIVDEILTSMIQALNKHGLVVSTEKIQKYDNLKYLGTHIQGDSVSYQKLQIRTDKLRTLNDFQKLLGNINWIRPFLKLTTGELKPLFEILNGDSNPISTRKLTPEACKALQLMNERLSTARVKRLDLSQPWSLCILKTEYTPTACLWQDGVVEWIHLPHISPKVITPYDIFCTQLIIKGRHRSKELFSKDPDYIVVPYTKVQFDLLLQEKEDWPISLLGFLGEVHFHLPKDPLLTFTLQTAIIFPHMTSTTPLEKGIVIFTDGSANGRSVTYIQGREPIIKENTQNTAQQAEIVAVITAFEEVSQPFNLYTDSKYVTGLFPEIETATLSPRTKIYTELKHLQRLIHKRQEKFYIGHIRGHTGLPGPLAQGNAYADSLTRILTAGKRTADGSEFEKRTADGSEFESPKKKAKVE

SEQ ID NO: 3175 - protein, 2116 aa, synthetic construct
MPAAKRVKLDGGDKKYSIGLDIGTNSVGWAVITDEYKVPSKKFKVLGNTDRHSIKKNLIGALLFDSGETAEATRLKRTARRRYTRRKNRICYLQEIFSNEMAKVDDSFFHRLEESFLVEEDKKHERHPIFGNIVDEVAYHEKYPTIYHLRKKLVDSTDKADLRLIYLALAHMIKFRGHFLIEGDLNPDNSDVDKLFIQLVQTYNQLFEENPINASGVDAKAILSARLSKSRRLENLIAQLPGEKKNGLFGNLIALSLGLTPNFKSNFDLAEDAKLQLSKDTYDDDLDNLLAQIGDQYADLFLAAKNLSDAILLSDILRVNTEITKAPLSASMIKRYDEHHQDLTLLKALVRQQLPEKYKEIFFDQSKNGYAGYIDGGASQEEFYKFIKPILEKMDGTEELLVKLNREDLLRKQRTFDNGSIPHQIHLGELHAILRRQEDFYPFLKDNREKIEKILTFRIPYYVGPLARGNSRFAWMTRKSEETITPWNFEEVVDKGASAQSFIERMTNFDKNLPNEKVLPKHSLLYEYFTVYNELTKVKYVTEGMRKPAFLSGEQKKAIVDLLFKTNRKVTVKQLKEDYFKKIECFDSVEISGVEDRFNASLGTYHDLLKIIKDKDFLDNEENEDILEDIVLTLTLFEDREMIEERLKTYAHLFDDKVMKQLKRRRYTGWGRLSRKLINGIRDKQSGKTILDFLKSDGFANRNFMQLIHDDSLTFKEDIQKAQVSGQGDSLHEHIANLAGSPAIKKGILQTVKVVDELVKVMGRHKPENIVIEMARENQTTQKGQKNSRERMKRIEEGIKELGSQILKEHPVENTQLQNEKLYLYYLQNGRDMYVDQELDINRLSDYDVDHIVPQSFLKDDSIDNKVLTRSDKARGKSDNVPSEEVVKKMKNYWRQLLNAKLITQRKFDNLTKAERGGLSELDKAGFIKRQLVETRQITKHVAQILDSRMNTKYDENDKLIREVKVITLKSKLVSDFRKDFQFYKVREINNYHHAHDAYLNAVVGTALIKKYPKLESEFVYGDYKVYDVRKMIAKSEQEIGKATAKYFFYSNIMNFFKTEITLANGEIRKRPLIETNGETGEIVWDKGRDFATVRKVLSMPQVNIVKKTEVQTGGFSKESILPKRNSDKLIARKKDWDPKKYGGFDSPTVAYSVLVVAKVEKGKSKKLKSVKELLGITIMERSSFEKNPIDFLEAKGYKEVKKDLIIKLPKYSLFELENGRKRMLASAGELQKGNELALPSKYVNFLYLASHYEKLKGSPEDNEQKQLFVEQHKHYLDEIIEQISEFSKRVILADANLDKVLSAYNKHRDKPIREQAENIIHLFTLTNLGAPAAFKYFDTTIDRKRYTSTKEVLDATLIHQSITGLYETRIDLSQLGGDGGPAPAPAPAPAPGGWVQEISDSRPMLHIYLNGRRFLGLLNTGADKTCIAGRDWPANWPIHQTESSLQGLGMACGVARSSQPLRWQHEDKSGIIHPFVIPTLPFTLWGRDIMKDIKVRLMTDSPDDSQDLMIGAIESNLFADQISWKSDQPVWLNQWPLKQEKLQALQQLVTEQLQLGHLEESNSPWNTPVFVIKKKSGKWRLLQDLRAVNATMHDMGALQPGLPSPVAVPKGWEIIIIDLQDCFFNIKLHPEDCKRFAFSVPSPNFKRPYQRFQWKVLPQGMKNSPTLCQKFVDKAILTVRDKYQDSYIVHYMDDILLAHPSRSIVDEILTSMIQALNKHGLVVSTEKIQKYDNLKYLGTHIQGDSVSYQKLQIRTDKLRTLNDFQKLLGNINWIRPFLKLTTGELKPLFEILNGDSNPISTRKLTPEACKALQLMNERLSTARVKRLDLSQPWSLCILKTEYTPTACLWQDGVVEWIHLPHISPKVITPYDIFCTQLIIKGRHRSKELFSKDPDYIVVPYTKVQFDLLLQEKEDWPISLLGFLGEVHFHLPKDPLLTFTLQTAIIFPHMTSTTPLEKGIVIFTDGSANGRSVTYIQGREPIIKENTQNTAQQAEIVAVITAFEEVSQPFNLYTDSKYVTGLFPEIETATLSPRTKIYTELKHLQRLIHKRQEKFYIGHIRGHTGLPGPLAQGNAYADSLTRILTAGKRTADGSEFEKRTADGSEFESPKKKAKVE

SEQ ID NO: 3176 - protein, 2114 aa, synthetic construct
MPAAKRVKLDGGDKKYSIGLDIGTNSVGWAVITDEYKVPSKKFKVLGNTDRHSIKKNLIGALLFDSGETAEATRLKRTARRRYTRRKNRICYLQEIFSNEMAKVDDSFFHRLEESFLVEEDKKHERHPIFGNIVDEVAYHEKYPTIYHLRKKLVDSTDKADLRLIYLALAHMIKFRGHFLIEGDLNPDNSDVDKLFIQLVQTYNQLFEENPINASGVDAKAILSARLSKSRRLENLIAQLPGEKKNGLFGNLIALSLGLTPNFKSNFDLAEDAKLQLSKDTYDDDLDNLLAQIGDQYADLFLAAKNLSDAILLSDILRVNTEITKAPLSASMIKRYDEHHQDLTLLKALVRQQLPEKYKEIFFDQSKNGYAGYIDGGASQEEFYKFIKPILEKMDGTEELLVKLNREDLLRKQRTFDNGSIPHQIHLGELHAILRRQEDFYPFLKDNREKIEKILTFRIPYYVGPLARGNSRFAWMTRKSEETITPWNFEEVVDKGASAQSFIERMTNFDKNLPNEKVLPKHSLLYEYFTVYNELTKVKYVTEGMRKPAFLSGEQKKAIVDLLFKTNRKVTVKQLKEDYFKKIECFDSVEISGVEDRFNASLGTYHDLLKIIKDKDFLDNEENEDILEDIVLTLTLFEDREMIEERLKTYAHLFDDKVMKQLKRRRYTGWGRLSRKLINGIRDKQSGKTILDFLKSDGFANRNFMQLIHDDSLTFKEDIQKAQVSGQGDSLHEHIANLAGSPAIKKGILQTVKVVDELVKVMGRHKPENIVIEMARENQTTQKGQKNSRERMKRIEEGIKELGSQILKEHPVENTQLQNEKLYLYYLQNGRDMYVDQELDINRLSDYDVDHIVPQSFLKDDSIDNKVLTRSDKARGKSDNVPSEEVVKKMKNYWRQLLNAKLITQRKFDNLTKAERGGLSELDKAGFIKRQLVETRQITKHVAQILDSRMNTKYDENDKLIREVKVITLKSKLVSDFRKDFQFYKVREINNYHHAHDAYLNAVVGTALIKKYPKLESEFVYGDYKVYDVRKMIAKSEQEIGKATAKYFFYSNIMNFFKTEITLANGEIRKRPLIETNGETGEIVWDKGRDFATVRKVLSMPQVNIVKKTEVQTGGFSKESILPKRNSDKLIARKKDWDPKKYGGFDSPTVAYSVLVVAKVEKGKSKKLKSVKELLGITIMERSSFEKNPIDFLEAKGYKEVKKDLIIKLPKYSLFELENGRKRMLASAGELQKGNELALPSKYVNFLYLASHYEKLKGSPEDNEQKQLFVEQHKHYLDEIIEQISEFSKRVILADANLDKVLSAYNKHRDKPIREQAENIIHLFTLTNLGAPAAFKYFDTTIDRKRYTSTKEVLDATLIHQSITGLYETRIDLSQLGGDGGPAPGSSGGSGGWVQEISDSRPMLHIYLNGRRFLGLLNTGADKTCIAGRDWPANWPIHQTESSLQGLGMACGVARSSQPLRWQHEDKSGIIHPFVIPTLPFTLWGRDIMKDIKVRLMTDSPDDSQDLMIGAIESNLFADQISWKSDQPVWLNQWPLKQEKLQALQQLVTEQLQLGHLEESNSPWNTPVFVIKKKSGKWRLLQDLRAVNATMHDMGALQPGLPSPVAVPKGWEIIIIDLQDCFFNIKLHPEDCKRFAFSVPSPNFKRPYQRFQWKVLPQGMKNSPTLCQKFVDKAILTVRDKYQDSYIVHYMDDILLAHPSRSIVDEILTSMIQALNKHGLVVSTEKIQKYDNLKYLGTHIQGDSVSYQKLQIRTDKLRTLNDFQKLLGNINWIRPFLKLTTGELKPLFEILNGDSNPISTRKLTPEACKALQLMNERLSTARVKRLDLSQPWSLCILKTEYTPTACLWQDGVVEWIHLPHISPKVITPYDIFCTQLIIKGRHRSKELFSKDPDYIVVPYTKVQFDLLLQEKEDWPISLLGFLGEVHFHLPKDPLLTFTLQTAIIFPHMTSTTPLEKGIVIFTDGSANGRSVTYIQGREPIIKENTQNTAQQAEIVAVITAFEEVSQPFNLYTDSKYVTGLFPEIETATLSPRTKIYTELKHLQRLIHKRQEKFYIGHIRGHTGLPGPLAQGNAYADSLTRILTAGKRTADGSEFEKRTADGSEFESPKKKAKVE

SEQ ID NO: 3177 - protein, 2113 aa, synthetic construct
MPAAKRVKLDGGDKKYSIGLDIGTNSVGWAVITDEYKVPSKKFKVLGNTDRHSIKKNLIGALLFDSGETAEATRLKRTARRRYTRRKNRICYLQEIFSNEMAKVDDSFFHRLEESFLVEEDKKHERHPIFGNIVDEVAYHEKYPTIYHLRKKLVDSTDKADLRLIYLALAHMIKFRGHFLIEGDLNPDNSDVDKLFIQLVQTYNQLFEENPINASGVDAKAILSARLSKSRRLENLIAQLPGEKKNGLFGNLIALSLGLTPNFKSNFDLAEDAKLQLSKDTYDDDLDNLLAQIGDQYADLFLAAKNLSDAILLSDILRVNTEITKAPLSASMIKRYDEHHQDLTLLKALVRQQLPEKYKEIFFDQSKNGYAGYIDGGASQEEFYKFIKPILEKMDGTEELLVKLNREDLLRKQRTFDNGSIPHQIHLGELHAILRRQEDFYPFLKDNREKIEKILTFRIPYYVGPLARGNSRFAWMTRKSEETITPWNFEEVVDKGASAQSFIERMTNFDKNLPNEKVLPKHSLLYEYFTVYNELTKVKYVTEGMRKPAFLSGEQKKAIVDLLFKTNRKVTVKQLKEDYFKKIECFDSVEISGVEDRFNASLGTYHDLLKIIKDKDFLDNEENEDILEDIVLTLTLFEDREMIEERLKTYAHLFDDKVMKQLKRRRYTGWGRLSRKLINGIRDKQSGKTILDFLKSDGFANRNFMQLIHDDSLTFKEDIQKAQVSGQGDSLHEHIANLAGSPAIKKGILQTVKVVDELVKVMGRHKPENIVIEMARENQTTQKGQKNSRERMKRIEEGIKELGSQILKEHPVENTQLQNEKLYLYYLQNGRDMYVDQELDINRLSDYDVDHIVPQSFLKDDSIDNKVLTRSDKARGKSDNVPSEEVVKKMKNYWRQLLNAKLITQRKFDNLTKAERGGLSELDKAGFIKRQLVETRQITKHVAQILDSRMNTKYDENDKLIREVKVITLKSKLVSDFRKDFQFYKVREINNYHHAHDAYLNAVVGTALIKKYPKLESEFVYGDYKVYDVRKMIAKSEQEIGKATAKYFFYSNIMNFFKTEITLANGEIRKRPLIETNGETGEIVWDKGRDFATVRKVLSMPQVNIVKKTEVQTGGFSKESILPKRNSDKLIARKKDWDPKKYGGFDSPTVAYSVLVVAKVEKGKSKKLKSVKELLGITIMERSSFEKNPIDFLEAKGYKEVKKDLIIKLPKYSLFELENGRKRMLASAGELQKGNELALPSKYVNFLYLASHYEKLKGSPEDNEQKQLFVEQHKHYLDEIIEQISEFSKRVILADANLDKVLSAYNKHRDKPIREQAENIIHLFTLTNLGAPAAFKYFDTTIDRKRYTSTKEVLDATLIHQSITGLYETRIDLSQLGGDGGGGGEAAAKGGWVQEISDSRPMLHIYLNGRRFLGLLNTGADKTCIAGRDWPANWPIHQTESSLQGLGMACGVARSSQPLRWQHEDKSGIIHPFVIPTLPFTLWGRDIMKDIKVRLMTDSPDDSQDLMIGAIESNLFADQISWKSDQPVWLNQWPLKQEKLQALQQLVTEQLQLGHLEESNSPWNTPVFVIKKKSGKWRLLQDLRAVNATMHDMGALQPGLPSPVAVPKGWEIIIIDLQDCFFNIKLHPEDCKRFAFSVPSPNFKRPYQRFQWKVLPQGMKNSPTLCQKFVDKAILTVRDKYQDSYIVHYMDDILLAHPSRSIVDEILTSMIQALNKHGLVVSTEKIQKYDNLKYLGTHIQGDSVSYQKLQIRTDKLRTLNDFQKLLGNINWIRPFLKLTTGELKPLFEILNGDSNPISTRKLTPEACKALQLMNERLSTARVKRLDLSQPWSLCILKTEYTPTACLWQDGVVEWIHLPHISPKVITPYDIFCTQLIIKGRHRSKELFSKDPDYIVVPYTKVQFDLLLQEKEDWPISLLGFLGEVHFHLPKDPLLTFTLQTAIIFPHMTSTTPLEKGIVIFTDGSANGRSVTYIQGREPIIKENTQNTAQQAEIVAVITAFEEVSQPFNLYTDSKYVTGLFPEIETATLSPRTKIYTELKHLQRLIHKRQEKFYIGHIRGHTGLPGPLAQGNAYADSLTRILTAGKRTADGSEFEKRTADGSEFESPKKKAKVE

SEQ ID NO: 3178 - protein, 2116 aa, synthetic construct
MPAAKRVKLDGGDKKYSIGLDIGTNSVGWAVITDEYKVPSKKFKVLGNTDRHSIKKNLIGALLFDSGETAEATRLKRTARRRYTRRKNRICYLQEIFSNEMAKVDDSFFHRLEESFLVEEDKKHERHPIFGNIVDEVAYHEKYPTIYHLRKKLVDSTDKADLRLIYLALAHMIKFRGHFLIEGDLNPDNSDVDKLFIQLVQTYNQLFEENPINASGVDAKAILSARLSKSRRLENLIAQLPGEKKNGLFGNLIALSLGLTPNFKSNFDLAEDAKLQLSKDTYDDDLDNLLAQIGDQYADLFLAAKNLSDAILLSDILRVNTEITKAPLSASMIKRYDEHHQDLTLLKALVRQQLPEKYKEIFFDQSKNGYAGYIDGGASQEEFYKFIKPILEKMDGTEELLVKLNREDLLRKQRTFDNGSIPHQIHLGELHAILRRQEDFYPFLKDNREKIEKILTFRIPYYVGPLARGNSRFAWMTRKSEETITPWNFEEVVDKGASAQSFIERMTNFDKNLPNEKVLPKHSLLYEYFTVYNELTKVKYVTEGMRKPAFLSGEQKKAIVDLLFKTNRKVTVKQLKEDYFKKIECFDSVEISGVEDRFNASLGTYHDLLKIIKDKDFLDNEENEDILEDIVLTLTLFEDREMIEERLKTYAHLFDDKVMKQLKRRRYTGWGRLSRKLINGIRDKQSGKTILDFLKSDGFANRNFMQLIHDDSLTFKEDIQKAQVSGQGDSLHEHIANLAGSPAIKKGILQTVKVVDELVKVMGRHKPENIVIEMARENQTTQKGQKNSRERMKRIEEGIKELGSQILKEHPVENTQLQNEKLYLYYLQNGRDMYVDQELDINRLSDYDVDHIVPQSFLKDDSIDNKVLTRSDKARGKSDNVPSEEVVKKMKNYWRQLLNAKLITQRKFDNLTKAERGGLSELDKAGFIKRQLVETRQITKHVAQILDSRMNTKYDENDKLIREVKVITLKSKLVSDFRKDFQFYKVREINNYHHAHDAYLNAVVGTALIKKYPKLESEFVYGDYKVYDVRKMIAKSEQEIGKATAKYFFYSNIMNFFKTEITLANGEIRKRPLIETNGETGEIVWDKGRDFATVRKVLSMPQVNIVKKTEVQTGGFSKESILPKRNSDKLIARKKDWDPKKYGGFDSPTVAYSVLVVAKVEKGKSKKLKSVKELLGITIMERSSFEKNPIDFLEAKGYKEVKKDLIIKLPKYSLFELENGRKRMLASAGELQKGNELALPSKYVNFLYLASHYEKLKGSPEDNEQKQLFVEQHKHYLDEIIEQISEFSKRVILADANLDKVLSAYNKHRDKPIREQAENIIHLFTLTNLGAPAAFKYFDTTIDRKRYTSTKEVLDATLIHQSITGLYETRIDLSQLGGDGGGGSPAPEAAAKGGWVQEISDSRPMLHIYLNGRRFLGLLNTGADKTCIAGRDWPANWPIHQTESSLQGLGMACGVARSSQPLRWQHEDKSGIIHPFVIPTLPFTLWGRDIMKDIKVRLMTDSPDDSQDLMIGAIESNLFADQISWKSDQPVWLNQWPLKQEKLQALQQLVTEQLQLGHLEESNSPWNTPVFVIKKKSGKWRLLQDLRAVNATMHDMGALQPGLPSPVAVPKGWEIIIIDLQDCFFNIKLHPEDCKRFAFSVPSPNFKRPYQRFQWKVLPQGMKNSPTLCQKFVDKAILTVRDKYQDSYIVHYMDDILLAHPSRSIVDEILTSMIQALNKHGLVVSTEKIQKYDNLKYLGTHIQGDSVSYQKLQIRTDKLRTLNDFQKLLGNINWIRPFLKLTTGELKPLFEILNGDSNPISTRKLTPEACKALQLMNERLSTARVKRLDLSQPWSLCILKTEYTPTACLWQDGVVEWIHLPHISPKVITPYDIFCTQLIIKGRHRSKELFSKDPDYIVVPYTKVQFDLLLQEKEDWPISLLGFLGEVHFHLPKDPLLTFTLQTAIIFPHMTSTTPLEKGIVIFTDGSANGRSVTYIQGREPIIKENTQNTAQQAEIVAVITAFEEVSQPFNLYTDSKYVTGLFPEIETATLSPRTKIYTELKHLQRLIHKRQEKFYIGHIRGHTGLPGPLAQGNAYADSLTRILTAGKRTADGSEFEKRTADGSEFESPKKKAKVE

SEQ ID NO: 3179 - protein, 2114 aa, synthetic construct
MPAAKRVKLDGGDKKYSIGLDIGTNSVGWAVITDEYKVPSKKFKVLGNTDRHSIKKNLIGALLFDSGETAEATRLKRTARRRYTRRKNRICYLQEIFSNEMAKVDDSFFHRLEESFLVEEDKKHERHPIFGNIVDEVAYHEKYPTIYHLRKKLVDSTDKADLRLIYLALAHMIKFRGHFLIEGDLNPDNSDVDKLFIQLVQTYNQLFEENPINASGVDAKAILSARLSKSRRLENLIAQLPGEKKNGLFGNLIALSLGLTPNFKSNFDLAEDAKLQLSKDTYDDDLDNLLAQIGDQYADLFLAAKNLSDAILLSDILRVNTEITKAPLSASMIKRYDEHHQDLTLLKALVRQQLPEKYKEIFFDQSKNGYAGYIDGGASQEEFYKFIKPILEKMDGTEELLVKLNREDLLRKQRTFDNGSIPHQIHLGELHAILRRQEDFYPFLKDNREKIEKILTFRIPYYVGPLARGNSRFAWMTRKSEETITPWNFEEVVDKGASAQSFIERMTNFDKNLPNEKVLPKHSLLYEYFTVYNELTKVKYVTEGMRKPAFLSGEQKKAIVDLLFKTNRKVTVKQLKEDYFKKIECFDSVEISGVEDRFNASLGTYHDLLKIIKDKDFLDNEENEDILEDIVLTLTLFEDREMIEERLKTYAHLFDDKVMKQLKRRRYTGWGRLSRKLINGIRDKQSGKTILDFLKSDGFANRNFMQLIHDDSLTFKEDIQKAQVSGQGDSLHEHIANLAGSPAIKKGILQTVKVVDELVKVMGRHKPENIVIEMARENQTTQKGQKNSRERMKRIEEGIKELGSQILKEHPVENTQLQNEKLYLYYLQNGRDMYVDQELDINRLSDYDVDHIVPQSFLKDDSIDNKVLTRSDKARGKSDNVPSEEVVKKMKNYWRQLLNAKLITQRKFDNLTKAERGGLSELDKAGFIKRQLVETRQITKHVAQILDSRMNTKYDENDKLIREVKVITLKSKLVSDFRKDFQFYKVREINNYHHAHDAYLNAVVGTALIKKYPKLESEFVYGDYKVYDVRKMIAKSEQEIGKATAKYFFYSNIMNFFKTEITLANGEIRKRPLIETNGETGEIVWDKGRDFATVRKVLSMPQVNIVKKTEVQTGGFSKESILPKRNSDKLIARKKDWDPKKYGGFDSPTVAYSVLVVAKVEKGKSKKLKSVKELLGITIMERSSFEKNPIDFLEAKGYKEVKKDLIIKLPKYSLFELENGRKRMLASAGELQKGNELALPSKYVNFLYLASHYEKLKGSPEDNEQKQLFVEQHKHYLDEIIEQISEFSKRVILADANLDKVLSAYNKHRDKPIREQAENIIHLFTLTNLGAPAAFKYFDTTIDRKRYTSTKEVLDATLIHQSITGLYETRIDLSQLGGDGGGGSGSSGGGGGWVQEISDSRPMLHIYLNGRRFLGLLNTGADKTCIAGRDWPANWPIHQTESSLQGLGMACGVARSSQPLRWQHEDKSGIIHPFVIPTLPFTLWGRDIMKDIKVRLMTDSPDDSQDLMIGAIESNLFADQISWKSDQPVWLNQWPLKQEKLQALQQLVTEQLQLGHLEESNSPWNTPVFVIKKKSGKWRLLQDLRAVNATMHDMGALQPGLPSPVAVPKGWEIIIIDLQDCFFNIKLHPEDCKRFAFSVPSPNFKRPYQRFQWKVLPQGMKNSPTLCQKFVDKAILTVRDKYQDSYIVHYMDDILLAHPSRSIVDEILTSMIQALNKHGLVVSTEKIQKYDNLKYLGTHIQGDSVSYQKLQIRTDKLRTLNDFQKLLGNINWIRPFLKLTTGELKPLFEILNGDSNPISTRKLTPEACKALQLMNERLSTARVKRLDLSQPWSLCILKTEYTPTACLWQDGVVEWIHLPHISPKVITPYDIFCTQLIIKGRHRSKELFSKDPDYIVVPYTKVQFDLLLQEKEDWPISLLGFLGEVHFHLPKDPLLTFTLQTAIIFPHMTSTTPLEKGIVIFTDGSANGRSVTYIQGREPIIKENTQNTAQQAEIVAVITAFEEVSQPFNLYTDSKYVTGLFPEIETATLSPRTKIYTELKHLQRLIHKRQEKFYIGHIRGHTGLPGPLAQGNAYADSLTRILTAGKRTADGSEFEKRTADGSEFESPKKKAKVE

SEQ ID NO: 3180 - protein, 2114 aa, synthetic construct
MPAAKRVKLDGGDKKYSIGLDIGTNSVGWAVITDEYKVPSKKFKVLGNTDRHSIKKNLIGALLFDSGETAEATRLKRTARRRYTRRKNRICYLQEIFSNEMAKVDDSFFHRLEESFLVEEDKKHERHPIFGNIVDEVAYHEKYPTIYHLRKKLVDSTDKADLRLIYLALAHMIKFRGHFLIEGDLNPDNSDVDKLFIQLVQTYNQLFEENPINASGVDAKAILSARLSKSRRLENLIAQLPGEKKNGLFGNLIALSLGLTPNFKSNFDLAEDAKLQLSKDTYDDDLDNLLAQIGDQYADLFLAAKNLSDAILLSDILRVNTEITKAPLSASMIKRYDEHHQDLTLLKALVRQQLPEKYKEIFFDQSKNGYAGYIDGGASQEEFYKFIKPILEKMDGTEELLVKLNREDLLRKQRTFDNGSIPHQIHLGELHAILRRQEDFYPFLKDNREKIEKILTFRIPYYVGPLARGNSRFAWMTRKSEETITPWNFEEVVDKGASAQSFIERMTNFDKNLPNEKVLPKHSLLYEYFTVYNELTKVKYVTEGMRKPAFLSGEQKKAIVDLLFKTNRKVTVKQLKEDYFKKIECFDSVEISGVEDRFNASLGTYHDLLKIIKDKDFLDNEENEDILEDIVLTLTLFEDREMIEERLKTYAHLFDDKVMKQLKRRRYTGWGRLSRKLINGIRDKQSGKTILDFLKSDGFANRNFMQLIHDDSLTFKEDIQKAQVSGQGDSLHEHIANLAGSPAIKKGILQTVKVVDELVKVMGRHKPENIVIEMARENQTTQKGQKNSRERMKRIEEGIKELGSQILKEHPVENTQLQNEKLYLYYLQNGRDMYVDQELDINRLSDYDVDHIVPQSFLKDDSIDNKVLTRSDKARGKSDNVPSEEVVKKMKNYWRQLLNAKLITQRKFDNLTKAERGGLSELDKAGFIKRQLVETRQITKHVAQILDSRMNTKYDENDKLIREVKVITLKSKLVSDFRKDFQFYKVREINNYHHAHDAYLNAVVGTALIKKYPKLESEFVYGDYKVYDVRKMIAKSEQEIGKATAKYFFYSNIMNFFKTEITLANGEIRKRPLIETNGETGEIVWDKGRDFATVRKVLSMPQVNIVKKTEVQTGGFSKESILPKRNSDKLIARKKDWDPKKYGGFDSPTVAYSVLVVAKVEKGKSKKLKSVKELLGITIMERSSFEKNPIDFLEAKGYKEVKKDLIIKLPKYSLFELENGRKRMLASAGELQKGNELALPSKYVNFLYLASHYEKLKGSPEDNEQKQLFVEQHKHYLDEIIEQISEFSKRVILADANLDKVLSAYNKHRDKPIREQAENIIHLFTLTNLGAPAAFKYFDTTIDRKRYTSTKEVLDATLIHQSITGLYETRIDLSQLGGDGGPAPAPAPAPGGWVQEISDSRPMLHIYLNGRRFLGLLNTGADKTCIAGRDWPANWPIHQTESSLQGLGMACGVARSSQPLRWQHEDKSGIIHPFVIPTLPFTLWGRDIMKDIKVRLMTDSPDDSQDLMIGAIESNLFADQISWKSDQPVWLNQWPLKQEKLQALQQLVTEQLQLGHLEESNSPWNTPVFVIKKKSGKWRLLQDLRAVNATMHDMGALQPGLPSPVAVPKGWEIIIIDLQDCFFNIKLHPEDCKRFAFSVPSPNFKRPYQRFQWKVLPQGMKNSPTLCQKFVDKAILTVRDKYQDSYIVHYMDDILLAHPSRSIVDEILTSMIQALNKHGLVVSTEKIQKYDNLKYLGTHIQGDSVSYQKLQIRTDKLRTLNDFQKLLGNINWIRPFLKLTTGELKPLFEILNGDSNPISTRKLTPEACKALQLMNERLSTARVKRLDLSQPWSLCILKTEYTPTACLWQDGVVEWIHLPHISPKVITPYDIFCTQLIIKGRHRSKELFSKDPDYIVVPYTKVQFDLLLQEKEDWPISLLGFLGEVHFHLPKDPLLTFTLQTAIIFPHMTSTTPLEKGIVIFTDGSANGRSVTYIQGREPIIKENTQNTAQQAEIVAVITAFEEVSQPFNLYTDSKYVTGLFPEIETATLSPRTKIYTELKHLQRLIHKRQEKFYIGHIRGHTGLPGPLAQGNAYADSLTRILTAGKRTADGSEFEKRTADGSEFESPKKKAKVE

SEQ ID NO: 3181 - protein, 2116 aa, synthetic construct
MPAAKRVKLDGGDKKYSIGLDIGTNSVGWAVITDEYKVPSKKFKVLGNTDRHSIKKNLIGALLFDSGETAEATRLKRTARRRYTRRKNRICYLQEIFSNEMAKVDDSFFHRLEESFLVEEDKKHERHPIFGNIVDEVAYHEKYPTIYHLRKKLVDSTDKADLRLIYLALAHMIKFRGHFLIEGDLNPDNSDVDKLFIQLVQTYNQLFEENPINASGVDAKAILSARLSKSRRLENLIAQLPGEKKNGLFGNLIALSLGLTPNFKSNFDLAEDAKLQLSKDTYDDDLDNLLAQIGDQYADLFLAAKNLSDAILLSDILRVNTEITKAPLSASMIKRYDEHHQDLTLLKALVRQQLPEKYKEIFFDQSKNGYAGYIDGGASQEEFYKFIKPILEKMDGTEELLVKLNREDLLRKQRTFDNGSIPHQIHLGELHAILRRQEDFYPFLKDNREKIEKILTFRIPYYVGPLARGNSRFAWMTRKSEETITPWNFEEVVDKGASAQSFIERMTNFDKNLPNEKVLPKHSLLYEYFTVYNELTKVKYVTEGMRKPAFLSGEQKKAIVDLLFKTNRKVTVKQLKEDYFKKIECFDSVEISGVEDRFNASLGTYHDLLKIIKDKDFLDNEENEDILEDIVLTLTLFEDREMIEERLKTYAHLFDDKVMKQLKRRRYTGWGRLSRKLINGIRDKQSGKTILDFLKSDGFANRNFMQLIHDDSLTFKEDIQKAQVSGQGDSLHEHIANLAGSPAIKKGILQTVKVVDELVKVMGRHKPENIVIEMARENQTTQKGQKNSRERMKRIEEGIKELGSQILKEHPVENTQLQNEKLYLYYLQNGRDMYVDQELDINRLSDYDVDHIVPQSFLKDDSIDNKVLTRSDKARGKSDNVPSEEVVKKMKNYWRQLLNAKLITQRKFDNLTKAERGGLSELDKAGFIKRQLVETRQITKHVAQILDSRMNTKYDENDKLIREVKVITLKSKLVSDFRKDFQFYKVREINNYHHAHDAYLNAVVGTALIKKYPKLESEFVYGDYKVYDVRKMIAKSEQEIGKATAKYFFYSNIMNFFKTEITLANGEIRKRPLIETNGETGEIVWDKGRDFATVRKVLSMPQVNIVKKTEVQTGGFSKESILPKRNSDKLIARKKDWDPKKYGGFDSPTVAYSVLVVAKVEKGKSKKLKSVKELLGITIMERSSFEKNPIDFLEAKGYKEVKKDLIIKLPKYSLFELENGRKRMLASAGELQKGNELALPSKYVNFLYLASHYEKLKGSPEDNEQKQLFVEQHKHYLDEIIEQISEFSKRVILADANLDKVLSAYNKHRDKPIREQAENIIHLFTLTNLGAPAAFKYFDTTIDRKRYTSTKEVLDATLIHQSITGLYETRIDLSQLGGDGGGSSGGGEAAAKGGWVQEISDSRPMLHIYLNGRRFLGLLNTGADKTCIAGRDWPANWPIHQTESSLQGLGMACGVARSSQPLRWQHEDKSGIIHPFVIPTLPFTLWGRDIMKDIKVRLMTDSPDDSQDLMIGAIESNLFADQISWKSDQPVWLNQWPLKQEKLQALQQLVTEQLQLGHLEESNSPWNTPVFVIKKKSGKWRLLQDLRAVNATMHDMGALQPGLPSPVAVPKGWEIIIIDLQDCFFNIKLHPEDCKRFAFSVPSPNFKRPYQRFQWKVLPQGMKNSPTLCQKFVDKAILTVRDKYQDSYIVHYMDDILLAHPSRSIVDEILTSMIQALNKHGLVVSTEKIQKYDNLKYLGTHIQGDSVSYQKLQIRTDKLRTLNDFQKLLGNINWIRPFLKLTTGELKPLFEILNGDSNPISTRKLTPEACKALQLMNERLSTARVKRLDLSQPWSLCILKTEYTPTACLWQDGVVEWIHLPHISPKVITPYDIFCTQLIIKGRHRSKELFSKDPDYIVVPYTKVQFDLLLQEKEDWPISLLGFLGEVHFHLPKDPLLTFTLQTAIIFPHMTSTTPLEKGIVIFTDGSANGRSVTYIQGREPIIKENTQNTAQQAEIVAVITAFEEVSQPFNLYTDSKYVTGLFPEIETATLSPRTKIYTELKHLQRLIHKRQEKFYIGHIRGHTGLPGPLAQGNAYADSLTRILTAGKRTADGSEFEKRTADGSEFESPKKKAKVE

SEQ ID NO: 3182 - protein, 2116 aa, synthetic construct
MPAAKRVKLDGGDKKYSIGLDIGTNSVGWAVITDEYKVPSKKFKVLGNTDRHSIKKNLIGALLFDSGETAEATRLKRTARRRYTRRKNRICYLQEIFSNEMAKVDDSFFHRLEESFLVEEDKKHERHPIFGNIVDEVAYHEKYPTIYHLRKKLVDSTDKADLRLIYLALAHMIKFRGHFLIEGDLNPDNSDVDKLFIQLVQTYNQLFEENPINASGVDAKAILSARLSKSRRLENLIAQLPGEKKNGLFGNLIALSLGLTPNFKSNFDLAEDAKLQLSKDTYDDDLDNLLAQIGDQYADLFLAAKNLSDAILLSDILRVNTEITKAPLSASMIKRYDEHHQDLTLLKALVRQQLPEKYKEIFFDQSKNGYAGYIDGGASQEEFYKFIKPILEKMDGTEELLVKLNREDLLRKQRTFDNGSIPHQIHLGELHAILRRQEDFYPFLKDNREKIEKILTFRIPYYVGPLARGNSRFAWMTRKSEETITPWNFEEVVDKGASAQSFIERMTNFDKNLPNEKVLPKHSLLYEYFTVYNELTKVKYVTEGMRKPAFLSGEQKKAIVDLLFKTNRKVTVKQLKEDYFKKIECFDSVEISGVEDRFNASLGTYHDLLKIIKDKDFLDNEENEDILEDIVLTLTLFEDREMIEERLKTYAHLFDDKVMKQLKRRRYTGWGRLSRKLINGIRDKQSGKTILDFLKSDGFANRNFMQLIHDDSLTFKEDIQKAQVSGQGDSLHEHIANLAGSPAIKKGILQTVKVVDELVKVMGRHKPENIVIEMARENQTTQKGQKNSRERMKRIEEGIKELGSQILKEHPVENTQLQNEKLYLYYLQNGRDMYVDQELDINRLSDYDVDHIVPQSFLKDDSIDNKVLTRSDKARGKSDNVPSEEVVKKMKNYWRQLLNAKLITQRKFDNLTKAERGGLSELDKAGFIKRQLVETRQITKHVAQILDSRMNTKYDENDKLIREVKVITLKSKLVSDFRKDFQFYKVREINNYHHAHDAYLNAVVGTALIKKYPKLESEFVYGDYKVYDVRKMIAKSEQEIGKATAKYFFYSNIMNFFKTEITLANGEIRKRPLIETNGETGEIVWDKGRDFATVRKVLSMPQVNIVKKTEVQTGGFSKESILPKRNSDKLIARKKDWDPKKYGGFDSPTVAYSVLVVAKVEKGKSKKLKSVKELLGITIMERSSFEKNPIDFLEAKGYKEVKKDLIIKLPKYSLFELENGRKRMLASAGELQKGNELALPSKYVNFLYLASHYEKLKGSPEDNEQKQLFVEQHKHYLDEIIEQISEFSKRVILADANLDKVLSAYNKHRDKPIREQAENIIHLFTLTNLGAPAAFKYFDTTIDRKRYTSTKEVLDATLIHQSITGLYETRIDLSQLGGDGGGSSEAAAKPAPGGWVQEISDSRPMLHIYLNGRRFLGLLNTGADKTCIAGRDWPANWPIHQTESSLQGLGMACGVARSSQPLRWQHEDKSGIIHPFVIPTLPFTLWGRDIMKDIKVRLMTDSPDDSQDLMIGAIESNLFADQISWKSDQPVWLNQWPLKQEKLQALQQLVTEQLQLGHLEESNSPWNTPVFVIKKKSGKWRLLQDLRAVNATMHDMGALQPGLPSPVAVPKGWEIIIIDLQDCFFNIKLHPEDCKRFAFSVPSPNFKRPYQRFQWKVLPQGMKNSPTLCQKFVDKAILTVRDKYQDSYIVHYMDDILLAHPSRSIVDEILTSMIQALNKHGLVVSTEKIQKYDNLKYLGTHIQGDSVSYQKLQIRTDKLRTLNDFQKLLGNINWIRPFLKLTTGELKPLFEILNGDSNPISTRKLTPEACKALQLMNERLSTARVKRLDLSQPWSLCILKTEYTPTACLWQDGVVEWIHLPHISPKVITPYDIFCTQLIIKGRHRSKELFSKDPDYIVVPYTKVQFDLLLQEKEDWPISLLGFLGEVHFHLPKDPLLTFTLQTAIIFPHMTSTTPLEKGIVIFTDGSANGRSVTYIQGREPIIKENTQNTAQQAEIVAVITAFEEVSQPFNLYTDSKYVTGLFPEIETATLSPRTKIYTELKHLQRLIHKRQEKFYIGHIRGHTGLPGPLAQGNAYADSLTRILTAGKRTADGSEFEKRTADGSEFESPKKKAKVE

SEQ ID NO: 3183 - protein, 2111 aa, synthetic construct
MPAAKRVKLDGGDKKYSIGLDIGTNSVGWAVITDEYKVPSKKFKVLGNTDRHSIKKNLIGALLFDSGETAEATRLKRTARRRYTRRKNRICYLQEIFSNEMAKVDDSFFHRLEESFLVEEDKKHERHPIFGNIVDEVAYHEKYPTIYHLRKKLVDSTDKADLRLIYLALAHMIKFRGHFLIEGDLNPDNSDVDKLFIQLVQTYNQLFEENPINASGVDAKAILSARLSKSRRLENLIAQLPGEKKNGLFGNLIALSLGLTPNFKSNFDLAEDAKLQLSKDTYDDDLDNLLAQIGDQYADLFLAAKNLSDAILLSDILRVNTEITKAPLSASMIKRYDEHHQDLTLLKALVRQQLPEKYKEIFFDQSKNGYAGYIDGGASQEEFYKFIKPILEKMDGTEELLVKLNREDLLRKQRTFDNGSIPHQIHLGELHAILRRQEDFYPFLKDNREKIEKILTFRIPYYVGPLARGNSRFAWMTRKSEETITPWNFEEVVDKGASAQSFIERMTNFDKNLPNEKVLPKHSLLYEYFTVYNELTKVKYVTEGMRKPAFLSGEQKKAIVDLLFKTNRKVTVKQLKEDYFKKIECFDSVEISGVEDRFNASLGTYHDLLKIIKDKDFLDNEENEDILEDIVLTLTLFEDREMIEERLKTYAHLFDDKVMKQLKRRRYTGWGRLSRKLINGIRDKQSGKTILDFLKSDGFANRNFMQLIHDDSLTFKEDIQKAQVSGQGDSLHEHIANLAGSPAIKKGILQTVKVVDELVKVMGRHKPENIVIEMARENQTTQKGQKNSRERMKRIEEGIKELGSQILKEHPVENTQLQNEKLYLYYLQNGRDMYVDQELDINRLSDYDVDHIVPQSFLKDDSIDNKVLTRSDKARGKSDNVPSEEVVKKMKNYWRQLLNAKLITQRKFDNLTKAERGGLSELDKAGFIKRQLVETRQITKHVAQILDSRMNTKYDENDKLIREVKVITLKSKLVSDFRKDFQFYKVREINNYHHAHDAYLNAVVGTALIKKYPKLESEFVYGDYKVYDVRKMIAKSEQEIGKATAKYFFYSNIMNFFKTEITLANGEIRKRPLIETNGETGEIVWDKGRDFATVRKVLSMPQVNIVKKTEVQTGGFSKESILPKRNSDKLIARKKDWDPKKYGGFDSPTVAYSVLVVAKVEKGKSKKLKSVKELLGITIMERSSFEKNPIDFLEAKGYKEVKKDLIIKLPKYSLFELENGRKRMLASAGELQKGNELALPSKYVNFLYLASHYEKLKGSPEDNEQKQLFVEQHKHYLDEIIEQISEFSKRVILADANLDKVLSAYNKHRDKPIREQAENIIHLFTLTNLGAPAAFKYFDTTIDRKRYTSTKEVLDATLIHQSITGLYETRIDLSQLGGDGGGGSGSSGGWVQEISDSRPMLHIYLNGRRFLGLLNTGADKTCIAGRDWPANWPIHQTESSLQGLGMACGVARSSQPLRWQHEDKSGIIHPFVIPTLPFTLWGRDIMKDIKVRLMTDSPDDSQDLMIGAIESNLFADQISWKSDQPVWLNQWPLKQEKLQALQQLVTEQLQLGHLEESNSPWNTPVFVIKKKSGKWRLLQDLRAVNATMHDMGALQPGLPSPVAVPKGWEIIIIDLQDCFFNIKLHPEDCKRFAFSVPSPNFKRPYQRFQWKVLPQGMKNSPTLCQKFVDKAILTVRDKYQDSYIVHYMDDILLAHPSRSIVDEILTSMIQALNKHGLVVSTEKIQKYDNLKYLGTHIQGDSVSYQKLQIRTDKLRTLNDFQKLLGNINWIRPFLKLTTGELKPLFEILNGDSNPISTRKLTPEACKALQLMNERLSTARVKRLDLSQPWSLCILKTEYTPTACLWQDGVVEWIHLPHISPKVITPYDIFCTQLIIKGRHRSKELFSKDPDYIVVPYTKVQFDLLLQEKEDWPISLLGFLGEVHFHLPKDPLLTFTLQTAIIFPHMTSTTPLEKGIVIFTDGSANGRSVTYIQGREPIIKENTQNTAQQAEIVAVITAFEEVSQPFNLYTDSKYVTGLFPEIETATLSPRTKIYTELKHLQRLIHKRQEKFYIGHIRGHTGLPGPLAQGNAYADSLTRILTAGKRTADGSEFEKRTADGSEFESPKKKAKVE

SEQ ID NO: 3184 - protein, 2114 aa, synthetic construct
MPAAKRVKLDGGDKKYSIGLDIGTNSVGWAVITDEYKVPSKKFKVLGNTDRHSIKKNLIGALLFDSGETAEATRLKRTARRRYTRRKNRICYLQEIFSNEMAKVDDSFFHRLEESFLVEEDKKHERHPIFGNIVDEVAYHEKYPTIYHLRKKLVDSTDKADLRLIYLALAHMIKFRGHFLIEGDLNPDNSDVDKLFIQLVQTYNQLFEENPINASGVDAKAILSARLSKSRRLENLIAQLPGEKKNGLFGNLIALSLGLTPNFKSNFDLAEDAKLQLSKDTYDDDLDNLLAQIGDQYADLFLAAKNLSDAILLSDILRVNTEITKAPLSASMIKRYDEHHQDLTLLKALVRQQLPEKYKEIFFDQSKNGYAGYIDGGASQEEFYKFIKPILEKMDGTEELLVKLNREDLLRKQRTFDNGSIPHQIHLGELHAILRRQEDFYPFLKDNREKIEKILTFRIPYYVGPLARGNSRFAWMTRKSEETITPWNFEEVVDKGASAQSFIERMTNFDKNLPNEKVLPKHSLLYEYFTVYNELTKVKYVTEGMRKPAFLSGEQKKAIVDLLFKTNRKVTVKQLKEDYFKKIECFDSVEISGVEDRFNASLGTYHDLLKIIKDKDFLDNEENEDILEDIVLTLTLFEDREMIEERLKTYAHLFDDKVMKQLKRRRYTGWGRLSRKLINGIRDKQSGKTILDFLKSDGFANRNFMQLIHDDSLTFKEDIQKAQVSGQGDSLHEHIANLAGSPAIKKGILQTVKVVDELVKVMGRHKPENIVIEMARENQTTQKGQKNSRERMKRIEEGIKELGSQILKEHPVENTQLQNEKLYLYYLQNGRDMYVDQELDINRLSDYDVDHIVPQSFLKDDSIDNKVLTRSDKARGKSDNVPSEEVVKKMKNYWRQLLNAKLITQRKFDNLTKAERGGLSELDKAGFIKRQLVETRQITKHVAQILDSRMNTKYDENDKLIREVKVITLKSKLVSDFRKDFQFYKVREINNYHHAHDAYLNAVVGTALIKKYPKLESEFVYGDYKVYDVRKMIAKSEQEIGKATAKYFFYSNIMNFFKTEITLANGEIRKRPLIETNGETGEIVWDKGRDFATVRKVLSMPQVNIVKKTEVQTGGFSKESILPKRNSDKLIARKKDWDPKKYGGFDSPTVAYSVLVVAKVEKGKSKKLKSVKELLGITIMERSSFEKNPIDFLEAKGYKEVKKDLIIKLPKYSLFELENGRKRMLASAGELQKGNELALPSKYVNFLYLASHYEKLKGSPEDNEQKQLFVEQHKHYLDEIIEQISEFSKRVILADANLDKVLSAYNKHRDKPIREQAENIIHLFTLTNLGAPAAFKYFDTTIDRKRYTSTKEVLDATLIHQSITGLYETRIDLSQLGGDGGGGGGSSGGSGGWVQEISDSRPMLHIYLNGRRFLGLLNTGADKTCIAGRDWPANWPIHQTESSLQGLGMACGVARSSQPLRWQHEDKSGIIHPFVIPTLPFTLWGRDIMKDIKVRLMTDSPDDSQDLMIGAIESNLFADQISWKSDQPVWLNQWPLKQEKLQALQQLVTEQLQLGHLEESNSPWNTPVFVIKKKSGKWRLLQDLRAVNATMHDMGALQPGLPSPVAVPKGWEIIIIDLQDCFFNIKLHPEDCKRFAFSVPSPNFKRPYQRFQWKVLPQGMKNSPTLCQKFVDKAILTVRDKYQDSYIVHYMDDILLAHPSRSIVDEILTSMIQALNKHGLVVSTEKIQKYDNLKYLGTHIQGDSVSYQKLQIRTDKLRTLNDFQKLLGNINWIRPFLKLTTGELKPLFEILNGDSNPISTRKLTPEACKALQLMNERLSTARVKRLDLSQPWSLCILKTEYTPTACLWQDGVVEWIHLPHISPKVITPYDIFCTQLIIKGRHRSKELFSKDPDYIVVPYTKVQFDLLLQEKEDWPISLLGFLGEVHFHLPKDPLLTFTLQTAIIFPHMTSTTPLEKGIVIFTDGSANGRSVTYIQGREPIIKENTQNTAQQAEIVAVITAFEEVSQPFNLYTDSKYVTGLFPEIETATLSPRTKIYTELKHLQRLIHKRQEKFYIGHIRGHTGLPGPLAQGNAYADSLTRILTAGKRTADGSEFEKRTADGSEFESPKKKAKVE

SEQ ID NO: 3185 - protein, 2120 aa, synthetic construct
MPAAKRVKLDGGDKKYSIGLDIGTNSVGWAVITDEYKVPSKKFKVLGNTDRHSIKKNLIGALLFDSGETAEATRLKRTARRRYTRRKNRICYLQEIFSNEMAKVDDSFFHRLEESFLVEEDKKHERHPIFGNIVDEVAYHEKYPTIYHLRKKLVDSTDKADLRLIYLALAHMIKFRGHFLIEGDLNPDNSDVDKLFIQLVQTYNQLFEENPINASGVDAKAILSARLSKSRRLENLIAQLPGEKKNGLFGNLIALSLGLTPNFKSNFDLAEDAKLQLSKDTYDDDLDNLLAQIGDQYADLFLAAKNLSDAILLSDILRVNTEITKAPLSASMIKRYDEHHQDLTLLKALVRQQLPEKYKEIFFDQSKNGYAGYIDGGASQEEFYKFIKPILEKMDGTEELLVKLNREDLLRKQRTFDNGSIPHQIHLGELHAILRRQEDFYPFLKDNREKIEKILTFRIPYYVGPLARGNSRFAWMTRKSEETITPWNFEEVVDKGASAQSFIERMTNFDKNLPNEKVLPKHSLLYEYFTVYNELTKVKYVTEGMRKPAFLSGEQKKAIVDLLFKTNRKVTVKQLKEDYFKKIECFDSVEISGVEDRFNASLGTYHDLLKIIKDKDFLDNEENEDILEDIVLTLTLFEDREMIEERLKTYAHLFDDKVMKQLKRRRYTGWGRLSRKLINGIRDKQSGKTILDFLKSDGFANRNFMQLIHDDSLTFKEDIQKAQVSGQGDSLHEHIANLAGSPAIKKGILQTVKVVDELVKVMGRHKPENIVIEMARENQTTQKGQKNSRERMKRIEEGIKELGSQILKEHPVENTQLQNEKLYLYYLQNGRDMYVDQELDINRLSDYDVDHIVPQSFLKDDSIDNKVLTRSDKARGKSDNVPSEEVVKKMKNYWRQLLNAKLITQRKFDNLTKAERGGLSELDKAGFIKRQLVETRQITKHVAQILDSRMNTKYDENDKLIREVKVITLKSKLVSDFRKDFQFYKVREINNYHHAHDAYLNAVVGTALIKKYPKLESEFVYGDYKVYDVRKMIAKSEQEIGKATAKYFFYSNIMNFFKTEITLANGEIRKRPLIETNGETGEIVWDKGRDFATVRKVLSMPQVNIVKKTEVQTGGFSKESILPKRNSDKLIARKKDWDPKKYGGFDSPTVAYSVLVVAKVEKGKSKKLKSVKELLGITIMERSSFEKNPIDFLEAKGYKEVKKDLIIKLPKYSLFELENGRKRMLASAGELQKGNELALPSKYVNFLYLASHYEKLKGSPEDNEQKQLFVEQHKHYLDEIIEQISEFSKRVILADANLDKVLSAYNKHRDKPIREQAENIIHLFTLTNLGAPAAFKYFDTTIDRKRYTSTKEVLDATLIHQSITGLYETRIDLSQLGGDGGEAAAKGGGGSEAAAKGGWVQEISDSRPMLHIYLNGRRFLGLLNTGADKTCIAGRDWPANWPIHQTESSLQGLGMACGVARSSQPLRWQHEDKSGIIHPFVIPTLPFTLWGRDIMKDIKVRLMTDSPDDSQDLMIGAIESNLFADQISWKSDQPVWLNQWPLKQEKLQALQQLVTEQLQLGHLEESNSPWNTPVFVIKKKSGKWRLLQDLRAVNATMHDMGALQPGLPSPVAVPKGWEIIIIDLQDCFFNIKLHPEDCKRFAFSVPSPNFKRPYQRFQWKVLPQGMKNSPTLCQKFVDKAILTVRDKYQDSYIVHYMDDILLAHPSRSIVDEILTSMIQALNKHGLVVSTEKIQKYDNLKYLGTHIQGDSVSYQKLQIRTDKLRTLNDFQKLLGNINWIRPFLKLTTGELKPLFEILNGDSNPISTRKLTPEACKALQLMNERLSTARVKRLDLSQPWSLCILKTEYTPTACLWQDGVVEWIHLPHISPKVITPYDIFCTQLIIKGRHRSKELFSKDPDYIVVPYTKVQFDLLLQEKEDWPISLLGFLGEVHFHLPKDPLLTFTLQTAIIFPHMTSTTPLEKGIVIFTDGSANGRSVTYIQGREPIIKENTQNTAQQAEIVAVITAFEEVSQPFNLYTDSKYVTGLFPEIETATLSPRTKIYTELKHLQRLIHKRQEKFYIGHIRGHTGLPGPLAQGNAYADSLTRILTAGKRTADGSEFEKRTADGSEFESPKKKAKVE

SEQ ID NO: 3186 - protein, 2108 aa, synthetic construct
MPAAKRVKLDGGDKKYSIGLDIGTNSVGWAVITDEYKVPSKKFKVLGNTDRHSIKKNLIGALLFDSGETAEATRLKRTARRRYTRRKNRICYLQEIFSNEMAKVDDSFFHRLEESFLVEEDKKHERHPIFGNIVDEVAYHEKYPTIYHLRKKLVDSTDKADLRLIYLALAHMIKFRGHFLIEGDLNPDNSDVDKLFIQLVQTYNQLFEENPINASGVDAKAILSARLSKSRRLENLIAQLPGEKKNGLFGNLIALSLGLTPNFKSNFDLAEDAKLQLSKDTYDDDLDNLLAQIGDQYADLFLAAKNLSDAILLSDILRVNTEITKAPLSASMIKRYDEHHQDLTLLKALVRQQLPEKYKEIFFDQSKNGYAGYIDGGASQEEFYKFIKPILEKMDGTEELLVKLNREDLLRKQRTFDNGSIPHQIHLGELHAILRRQEDFYPFLKDNREKIEKILTFRIPYYVGPLARGNSRFAWMTRKSEETITPWNFEEVVDKGASAQSFIERMTNFDKNLPNEKVLPKHSLLYEYFTVYNELTKVKYVTEGMRKPAFLSGEQKKAIVDLLFKTNRKVTVKQLKEDYFKKIECFDSVEISGVEDRFNASLGTYHDLLKIIKDKDFLDNEENEDILEDIVLTLTLFEDREMIEERLKTYAHLFDDKVMKQLKRRRYTGWGRLSRKLINGIRDKQSGKTILDFLKSDGFANRNFMQLIHDDSLTFKEDIQKAQVSGQGDSLHEHIANLAGSPAIKKGILQTVKVVDELVKVMGRHKPENIVIEMARENQTTQKGQKNSRERMKRIEEGIKELGSQILKEHPVENTQLQNEKLYLYYLQNGRDMYVDQELDINRLSDYDVDHIVPQSFLKDDSIDNKVLTRSDKARGKSDNVPSEEVVKKMKNYWRQLLNAKLITQRKFDNLTKAERGGLSELDKAGFIKRQLVETRQITKHVAQILDSRMNTKYDENDKLIREVKVITLKSKLVSDFRKDFQFYKVREINNYHHAHDAYLNAVVGTALIKKYPKLESEFVYGDYKVYDVRKMIAKSEQEIGKATAKYFFYSNIMNFFKTEITLANGEIRKRPLIETNGETGEIVWDKGRDFATVRKVLSMPQVNIVKKTEVQTGGFSKESILPKRNSDKLIARKKDWDPKKYGGFDSPTVAYSVLVVAKVEKGKSKKLKSVKELLGITIMERSSFEKNPIDFLEAKGYKEVKKDLIIKLPKYSLFELENGRKRMLASAGELQKGNELALPSKYVNFLYLASHYEKLKGSPEDNEQKQLFVEQHKHYLDEIIEQISEFSKRVILADANLDKVLSAYNKHRDKPIREQAENIIHLFTLTNLGAPAAFKYFDTTIDRKRYTSTKEVLDATLIHQSITGLYETRIDLSQLGGDGGGGSGGWVQEISDSRPMLHIYLNGRRFLGLLNTGADKTCIAGRDWPANWPIHQTESSLQGLGMACGVARSSQPLRWQHEDKSGIIHPFVIPTLPFTLWGRDIMKDIKVRLMTDSPDDSQDLMIGAIESNLFADQISWKSDQPVWLNQWPLKQEKLQALQQLVTEQLQLGHLEESNSPWNTPVFVIKKKSGKWRLLQDLRAVNATMHDMGALQPGLPSPVAVPKGWEIIIIDLQDCFFNIKLHPEDCKRFAFSVPSPNFKRPYQRFQWKVLPQGMKNSPTLCQKFVDKAILTVRDKYQDSYIVHYMDDILLAHPSRSIVDEILTSMIQALNKHGLVVSTEKIQKYDNLKYLGTHIQGDSVSYQKLQIRTDKLRTLNDFQKLLGNINWIRPFLKLTTGELKPLFEILNGDSNPISTRKLTPEACKALQLMNERLSTARVKRLDLSQPWSLCILKTEYTPTACLWQDGVVEWIHLPHISPKVITPYDIFCTQLIIKGRHRSKELFSKDPDYIVVPYTKVQFDLLLQEKEDWPISLLGFLGEVHFHLPKDPLLTFTLQTAIIFPHMTSTTPLEKGIVIFTDGSANGRSVTYIQGREPIIKENTQNTAQQAEIVAVITAFEEVSQPFNLYTDSKYVTGLFPEIETATLSPRTKIYTELKHLQRLIHKRQEKFYIGHIRGHTGLPGPLAQGNAYADSLTRILTAGKRTADGSEFEKRTADGSEFESPKKKAKVE

SEQ ID NO: 3187 - protein, 2114 aa, synthetic construct
MPAAKRVKLDGGDKKYSIGLDIGTNSVGWAVITDEYKVPSKKFKVLGNTDRHSIKKNLIGALLFDSGETAEATRLKRTARRRYTRRKNRICYLQEIFSNEMAKVDDSFFHRLEESFLVEEDKKHERHPIFGNIVDEVAYHEKYPTIYHLRKKLVDSTDKADLRLIYLALAHMIKFRGHFLIEGDLNPDNSDVDKLFIQLVQTYNQLFEENPINASGVDAKAILSARLSKSRRLENLIAQLPGEKKNGLFGNLIALSLGLTPNFKSNFDLAEDAKLQLSKDTYDDDLDNLLAQIGDQYADLFLAAKNLSDAILLSDILRVNTEITKAPLSASMIKRYDEHHQDLTLLKALVRQQLPEKYKEIFFDQSKNGYAGYIDGGASQEEFYKFIKPILEKMDGTEELLVKLNREDLLRKQRTFDNGSIPHQIHLGELHAILRRQEDFYPFLKDNREKIEKILTFRIPYYVGPLARGNSRFAWMTRKSEETITPWNFEEVVDKGASAQSFIERMTNFDKNLPNEKVLPKHSLLYEYFTVYNELTKVKYVTEGMRKPAFLSGEQKKAIVDLLFKTNRKVTVKQLKEDYFKKIECFDSVEISGVEDRFNASLGTYHDLLKIIKDKDFLDNEENEDILEDIVLTLTLFEDREMIEERLKTYAHLFDDKVMKQLKRRRYTGWGRLSRKLINGIRDKQSGKTILDFLKSDGFANRNFMQLIHDDSLTFKEDIQKAQVSGQGDSLHEHIANLAGSPAIKKGILQTVKVVDELVKVMGRHKPENIVIEMARENQTTQKGQKNSRERMKRIEEGIKELGSQILKEHPVENTQLQNEKLYLYYLQNGRDMYVDQELDINRLSDYDVDHIVPQSFLKDDSIDNKVLTRSDKARGKSDNVPSEEVVKKMKNYWRQLLNAKLITQRKFDNLTKAERGGLSELDKAGFIKRQLVETRQITKHVAQILDSRMNTKYDENDKLIREVKVITLKSKLVSDFRKDFQFYKVREINNYHHAHDAYLNAVVGTALIKKYPKLESEFVYGDYKVYDVRKMIAKSEQEIGKATAKYFFYSNIMNFFKTEITLANGEIRKRPLIETNGETGEIVWDKGRDFATVRKVLSMPQVNIVKKTEVQTGGFSKESILPKRNSDKLIARKKDWDPKKYGGFDSPTVAYSVLVVAKVEKGKSKKLKSVKELLGITIMERSSFEKNPIDFLEAKGYKEVKKDLIIKLPKYSLFELENGRKRMLASAGELQKGNELALPSKYVNFLYLASHYEKLKGSPEDNEQKQLFVEQHKHYLDEIIEQISEFSKRVILADANLDKVLSAYNKHRDKPIREQAENIIHLFTLTNLGAPAAFKYFDTTIDRKRYTSTKEVLDATLIHQSITGLYETRIDLSQLGGDGGGSSPAPGGGGGWVQEISDSRPMLHIYLNGRRFLGLLNTGADKTCIAGRDWPANWPIHQTESSLQGLGMACGVARSSQPLRWQHEDKSGIIHPFVIPTLPFTLWGRDIMKDIKVRLMTDSPDDSQDLMIGAIESNLFADQISWKSDQPVWLNQWPLKQEKLQALQQLVTEQLQLGHLEESNSPWNTPVFVIKKKSGKWRLLQDLRAVNATMHDMGALQPGLPSPVAVPKGWEIIIIDLQDCFFNIKLHPEDCKRFAFSVPSPNFKRPYQRFQWKVLPQGMKNSPTLCQKFVDKAILTVRDKYQDSYIVHYMDDILLAHPSRSIVDEILTSMIQALNKHGLVVSTEKIQKYDNLKYLGTHIQGDSVSYQKLQIRTDKLRTLNDFQKLLGNINWIRPFLKLTTGELKPLFEILNGDSNPISTRKLTPEACKALQLMNERLSTARVKRLDLSQPWSLCILKTEYTPTACLWQDGVVEWIHLPHISPKVITPYDIFCTQLIIKGRHRSKELFSKDPDYIVVPYTKVQFDLLLQEKEDWPISLLGFLGEVHFHLPKDPLLTFTLQTAIIFPHMTSTTPLEKGIVIFTDGSANGRSVTYIQGREPIIKENTQNTAQQAEIVAVITAFEEVSQPFNLYTDSKYVTGLFPEIETATLSPRTKIYTELKHLQRLIHKRQEKFYIGHIRGHTGLPGPLAQGNAYADSLTRILTAGKRTADGSEFEKRTADGSEFESPKKKAKVE

SEQ ID NO: 3188 - protein, 2114 aa, synthetic construct
MPAAKRVKLDGGDKKYSIGLDIGTNSVGWAVITDEYKVPSKKFKVLGNTDRHSIKKNLIGALLFDSGETAEATRLKRTARRRYTRRKNRICYLQEIFSNEMAKVDDSFFHRLEESFLVEEDKKHERHPIFGNIVDEVAYHEKYPTIYHLRKKLVDSTDKADLRLIYLALAHMIKFRGHFLIEGDLNPDNSDVDKLFIQLVQTYNQLFEENPINASGVDAKAILSARLSKSRRLENLIAQLPGEKKNGLFGNLIALSLGLTPNFKSNFDLAEDAKLQLSKDTYDDDLDNLLAQIGDQYADLFLAAKNLSDAILLSDILRVNTEITKAPLSASMIKRYDEHHQDLTLLKALVRQQLPEKYKEIFFDQSKNGYAGYIDGGASQEEFYKFIKPILEKMDGTEELLVKLNREDLLRKQRTFDNGSIPHQIHLGELHAILRRQEDFYPFLKDNREKIEKILTFRIPYYVGPLARGNSRFAWMTRKSEETITPWNFEEVVDKGASAQSFIERMTNFDKNLPNEKVLPKHSLLYEYFTVYNELTKVKYVTEGMRKPAFLSGEQKKAIVDLLFKTNRKVTVKQLKEDYFKKIECFDSVEISGVEDRFNASLGTYHDLLKIIKDKDFLDNEENEDILEDIVLTLTLFEDREMIEERLKTYAHLFDDKVMKQLKRRRYTGWGRLSRKLINGIRDKQSGKTILDFLKSDGFANRNFMQLIHDDSLTFKEDIQKAQVSGQGDSLHEHIANLAGSPAIKKGILQTVKVVDELVKVMGRHKPENIVIEMARENQTTQKGQKNSRERMKRIEEGIKELGSQILKEHPVENTQLQNEKLYLYYLQNGRDMYVDQELDINRLSDYDVDHIVPQSFLKDDSIDNKVLTRSDKARGKSDNVPSEEVVKKMKNYWRQLLNAKLITQRKFDNLTKAERGGLSELDKAGFIKRQLVETRQITKHVAQILDSRMNTKYDENDKLIREVKVITLKSKLVSDFRKDFQFYKVREINNYHHAHDAYLNAVVGTALIKKYPKLESEFVYGDYKVYDVRKMIAKSEQEIGKATAKYFFYSNIMNFFKTEITLANGEIRKRPLIETNGETGEIVWDKGRDFATVRKVLSMPQVNIVKKTEVQTGGFSKESILPKRNSDKLIARKKDWDPKKYGGFDSPTVAYSVLVVAKVEKGKSKKLKSVKELLGITIMERSSFEKNPIDFLEAKGYKEVKKDLIIKLPKYSLFELENGRKRMLASAGELQKGNELALPSKYVNFLYLASHYEKLKGSPEDNEQKQLFVEQHKHYLDEIIEQISEFSKRVILADANLDKVLSAYNKHRDKPIREQAENIIHLFTLTNLGAPAAFKYFDTTIDRKRYTSTKEVLDATLIHQSITGLYETRIDLSQLGGDGGPAPGSSGGGGGWVQEISDSRPMLHIYLNGRRFLGLLNTGADKTCIAGRDWPANWPIHQTESSLQGLGMACGVARSSQPLRWQHEDKSGIIHPFVIPTLPFTLWGRDIMKDIKVRLMTDSPDDSQDLMIGAIESNLFADQISWKSDQPVWLNQWPLKQEKLQALQQLVTEQLQLGHLEESNSPWNTPVFVIKKKSGKWRLLQDLRAVNATMHDMGALQPGLPSPVAVPKGWEIIIIDLQDCFFNIKLHPEDCKRFAFSVPSPNFKRPYQRFQWKVLPQGMKNSPTLCQKFVDKAILTVRDKYQDSYIVHYMDDILLAHPSRSIVDEILTSMIQALNKHGLVVSTEKIQKYDNLKYLGTHIQGDSVSYQKLQIRTDKLRTLNDFQKLLGNINWIRPFLKLTTGELKPLFEILNGDSNPISTRKLTPEACKALQLMNERLSTARVKRLDLSQPWSLCILKTEYTPTACLWQDGVVEWIHLPHISPKVITPYDIFCTQLIIKGRHRSKELFSKDPDYIVVPYTKVQFDLLLQEKEDWPISLLGFLGEVHFHLPKDPLLTFTLQTAIIFPHMTSTTPLEKGIVIFTDGSANGRSVTYIQGREPIIKENTQNTAQQAEIVAVITAFEEVSQPFNLYTDSKYVTGLFPEIETATLSPRTKIYTELKHLQRLIHKRQEKFYIGHIRGHTGLPGPLAQGNAYADSLTRILTAGKRTADGSEFEKRTADGSEFESPKKKAKVE

SEQ ID NO: 3189 - protein, 2116 aa, synthetic construct
MPAAKRVKLDGGDKKYSIGLDIGTNSVGWAVITDEYKVPSKKFKVLGNTDRHSIKKNLIGALLFDSGETAEATRLKRTARRRYTRRKNRICYLQEIFSNEMAKVDDSFFHRLEESFLVEEDKKHERHPIFGNIVDEVAYHEKYPTIYHLRKKLVDSTDKADLRLIYLALAHMIKFRGHFLIEGDLNPDNSDVDKLFIQLVQTYNQLFEENPINASGVDAKAILSARLSKSRRLENLIAQLPGEKKNGLFGNLIALSLGLTPNFKSNFDLAEDAKLQLSKDTYDDDLDNLLAQIGDQYADLFLAAKNLSDAILLSDILRVNTEITKAPLSASMIKRYDEHHQDLTLLKALVRQQLPEKYKEIFFDQSKNGYAGYIDGGASQEEFYKFIKPILEKMDGTEELLVKLNREDLLRKQRTFDNGSIPHQIHLGELHAILRRQEDFYPFLKDNREKIEKILTFRIPYYVGPLARGNSRFAWMTRKSEETITPWNFEEVVDKGASAQSFIERMTNFDKNLPNEKVLPKHSLLYEYFTVYNELTKVKYVTEGMRKPAFLSGEQKKAIVDLLFKTNRKVTVKQLKEDYFKKIECFDSVEISGVEDRFNASLGTYHDLLKIIKDKDFLDNEENEDILEDIVLTLTLFEDREMIEERLKTYAHLFDDKVMKQLKRRRYTGWGRLSRKLINGIRDKQSGKTILDFLKSDGFANRNFMQLIHDDSLTFKEDIQKAQVSGQGDSLHEHIANLAGSPAIKKGILQTVKVVDELVKVMGRHKPENIVIEMARENQTTQKGQKNSRERMKRIEEGIKELGSQILKEHPVENTQLQNEKLYLYYLQNGRDMYVDQELDINRLSDYDVDHIVPQSFLKDDSIDNKVLTRSDKARGKSDNVPSEEVVKKMKNYWRQLLNAKLITQRKFDNLTKAERGGLSELDKAGFIKRQLVETRQITKHVAQILDSRMNTKYDENDKLIREVKVITLKSKLVSDFRKDFQFYKVREINNYHHAHDAYLNAVVGTALIKKYPKLESEFVYGDYKVYDVRKMIAKSEQEIGKATAKYFFYSNIMNFFKTEITLANGEIRKRPLIETNGETGEIVWDKGRDFATVRKVLSMPQVNIVKKTEVQTGGFSKESILPKRNSDKLIARKKDWDPKKYGGFDSPTVAYSVLVVAKVEKGKSKKLKSVKELLGITIMERSSFEKNPIDFLEAKGYKEVKKDLIIKLPKYSLFELENGRKRMLASAGELQKGNELALPSKYVNFLYLASHYEKLKGSPEDNEQKQLFVEQHKHYLDEIIEQISEFSKRVILADANLDKVLSAYNKHRDKPIREQAENIIHLFTLTNLGAPAAFKYFDTTIDRKRYTSTKEVLDATLIHQSITGLYETRIDLSQLGGDGGEAAAKGGSPAPGGWVQEISDSRPMLHIYLNGRRFLGLLNTGADKTCIAGRDWPANWPIHQTESSLQGLGMACGVARSSQPLRWQHEDKSGIIHPFVIPTLPFTLWGRDIMKDIKVRLMTDSPDDSQDLMIGAIESNLFADQISWKSDQPVWLNQWPLKQEKLQALQQLVTEQLQLGHLEESNSPWNTPVFVIKKKSGKWRLLQDLRAVNATMHDMGALQPGLPSPVAVPKGWEIIIIDLQDCFFNIKLHPEDCKRFAFSVPSPNFKRPYQRFQWKVLPQGMKNSPTLCQKFVDKAILTVRDKYQDSYIVHYMDDILLAHPSRSIVDEILTSMIQALNKHGLVVSTEKIQKYDNLKYLGTHIQGDSVSYQKLQIRTDKLRTLNDFQKLLGNINWIRPFLKLTTGELKPLFEILNGDSNPISTRKLTPEACKALQLMNERLSTARVKRLDLSQPWSLCILKTEYTPTACLWQDGVVEWIHLPHISPKVITPYDIFCTQLIIKGRHRSKELFSKDPDYIVVPYTKVQFDLLLQEKEDWPISLLGFLGEVHFHLPKDPLLTFTLQTAIIFPHMTSTTPLEKGIVIFTDGSANGRSVTYIQGREPIIKENTQNTAQQAEIVAVITAFEEVSQPFNLYTDSKYVTGLFPEIETATLSPRTKIYTELKHLQRLIHKRQEKFYIGHIRGHTGLPGPLAQGNAYADSLTRILTAGKRTADGSEFEKRTADGSEFESPKKKAKVE

SEQ ID NO: 3190 - protein, 2114 aa, synthetic construct
MPAAKRVKLDGGDKKYSIGLDIGTNSVGWAVITDEYKVPSKKFKVLGNTDRHSIKKNLIGALLFDSGETAEATRLKRTARRRYTRRKNRICYLQEIFSNEMAKVDDSFFHRLEESFLVEEDKKHERHPIFGNIVDEVAYHEKYPTIYHLRKKLVDSTDKADLRLIYLALAHMIKFRGHFLIEGDLNPDNSDVDKLFIQLVQTYNQLFEENPINASGVDAKAILSARLSKSRRLENLIAQLPGEKKNGLFGNLIALSLGLTPNFKSNFDLAEDAKLQLSKDTYDDDLDNLLAQIGDQYADLFLAAKNLSDAILLSDILRVNTEITKAPLSASMIKRYDEHHQDLTLLKALVRQQLPEKYKEIFFDQSKNGYAGYIDGGASQEEFYKFIKPILEKMDGTEELLVKLNREDLLRKQRTFDNGSIPHQIHLGELHAILRRQEDFYPFLKDNREKIEKILTFRIPYYVGPLARGNSRFAWMTRKSEETITPWNFEEVVDKGASAQSFIERMTNFDKNLPNEKVLPKHSLLYEYFTVYNELTKVKYVTEGMRKPAFLSGEQKKAIVDLLFKTNRKVTVKQLKEDYFKKIECFDSVEISGVEDRFNASLGTYHDLLKIIKDKDFLDNEENEDILEDIVLTLTLFEDREMIEERLKTYAHLFDDKVMKQLKRRRYTGWGRLSRKLINGIRDKQSGKTILDFLKSDGFANRNFMQLIHDDSLTFKEDIQKAQVSGQGDSLHEHIANLAGSPAIKKGILQTVKVVDELVKVMGRHKPENIVIEMARENQTTQKGQKNSRERMKRIEEGIKELGSQILKEHPVENTQLQNEKLYLYYLQNGRDMYVDQELDINRLSDYDVDHIVPQSFLKDDSIDNKVLTRSDKARGKSDNVPSEEVVKKMKNYWRQLLNAKLITQRKFDNLTKAERGGLSELDKAGFIKRQLVETRQITKHVAQILDSRMNTKYDENDKLIREVKVITLKSKLVSDFRKDFQFYKVREINNYHHAHDAYLNAVVGTALIKKYPKLESEFVYGDYKVYDVRKMIAKSEQEIGKATAKYFFYSNIMNFFKTEITLANGEIRKRPLIETNGETGEIVWDKGRDFATVRKVLSMPQVNIVKKTEVQTGGFSKESILPKRNSDKLIARKKDWDPKKYGGFDSPTVAYSVLVVAKVEKGKSKKLKSVKELLGITIMERSSFEKNPIDFLEAKGYKEVKKDLIIKLPKYSLFELENGRKRMLASAGELQKGNELALPSKYVNFLYLASHYEKLKGSPEDNEQKQLFVEQHKHYLDEIIEQISEFSKRVILADANLDKVLSAYNKHRDKPIREQAENIIHLFTLTNLGAPAAFKYFDTTIDRKRYTSTKEVLDATLIHQSITGLYETRIDLSQLGGDGGGSSGGSGGGGGWVQEISDSRPMLHIYLNGRRFLGLLNTGADKTCIAGRDWPANWPIHQTESSLQGLGMACGVARSSQPLRWQHEDKSGIIHPFVIPTLPFTLWGRDIMKDIKVRLMTDSPDDSQDLMIGAIESNLFADQISWKSDQPVWLNQWPLKQEKLQALQQLVTEQLQLGHLEESNSPWNTPVFVIKKKSGKWRLLQDLRAVNATMHDMGALQPGLPSPVAVPKGWEIIIIDLQDCFFNIKLHPEDCKRFAFSVPSPNFKRPYQRFQWKVLPQGMKNSPTLCQKFVDKAILTVRDKYQDSYIVHYMDDILLAHPSRSIVDEILTSMIQALNKHGLVVSTEKIQKYDNLKYLGTHIQGDSVSYQKLQIRTDKLRTLNDFQKLLGNINWIRPFLKLTTGELKPLFEILNGDSNPISTRKLTPEACKALQLMNERLSTARVKRLDLSQPWSLCILKTEYTPTACLWQDGVVEWIHLPHISPKVITPYDIFCTQLIIKGRHRSKELFSKDPDYIVVPYTKVQFDLLLQEKEDWPISLLGFLGEVHFHLPKDPLLTFTLQTAIIFPHMTSTTPLEKGIVIFTDGSANGRSVTYIQGREPIIKENTQNTAQQAEIVAVITAFEEVSQPFNLYTDSKYVTGLFPEIETATLSPRTKIYTELKHLQRLIHKRQEKFYIGHIRGHTGLPGPLAQGNAYADSLTRILTAGKRTADGSEFEKRTADGSEFESPKKKAKVE

SEQ ID NO: 3191 - protein, 2116 aa, synthetic construct
MPAAKRVKLDGGDKKYSIGLDIGTNSVGWAVITDEYKVPSKKFKVLGNTDRHSIKKNLIGALLFDSGETAEATRLKRTARRRYTRRKNRICYLQEIFSNEMAKVDDSFFHRLEESFLVEEDKKHERHPIFGNIVDEVAYHEKYPTIYHLRKKLVDSTDKADLRLIYLALAHMIKFRGHFLIEGDLNPDNSDVDKLFIQLVQTYNQLFEENPINASGVDAKAILSARLSKSRRLENLIAQLPGEKKNGLFGNLIALSLGLTPNFKSNFDLAEDAKLQLSKDTYDDDLDNLLAQIGDQYADLFLAAKNLSDAILLSDILRVNTEITKAPLSASMIKRYDEHHQDLTLLKALVRQQLPEKYKEIFFDQSKNGYAGYIDGGASQEEFYKFIKPILEKMDGTEELLVKLNREDLLRKQRTFDNGSIPHQIHLGELHAILRRQEDFYPFLKDNREKIEKILTFRIPYYVGPLARGNSRFAWMTRKSEETITPWNFEEVVDKGASAQSFIERMTNFDKNLPNEKVLPKHSLLYEYFTVYNELTKVKYVTEGMRKPAFLSGEQKKAIVDLLFKTNRKVTVKQLKEDYFKKIECFDSVEISGVEDRFNASLGTYHDLLKIIKDKDFLDNEENEDILEDIVLTLTLFEDREMIEERLKTYAHLFDDKVMKQLKRRRYTGWGRLSRKLINGIRDKQSGKTILDFLKSDGFANRNFMQLIHDDSLTFKEDIQKAQVSGQGDSLHEHIANLAGSPAIKKGILQTVKVVDELVKVMGRHKPENIVIEMARENQTTQKGQKNSRERMKRIEEGIKELGSQILKEHPVENTQLQNEKLYLYYLQNGRDMYVDQELDINRLSDYDVDHIVPQSFLKDDSIDNKVLTRSDKARGKSDNVPSEEVVKKMKNYWRQLLNAKLITQRKFDNLTKAERGGLSELDKAGFIKRQLVETRQITKHVAQILDSRMNTKYDENDKLIREVKVITLKSKLVSDFRKDFQFYKVREINNYHHAHDAYLNAVVGTALIKKYPKLESEFVYGDYKVYDVRKMIAKSEQEIGKATAKYFFYSNIMNFFKTEITLANGEIRKRPLIETNGETGEIVWDKGRDFATVRKVLSMPQVNIVKKTEVQTGGFSKESILPKRNSDKLIARKKDWDPKKYGGFDSPTVAYSVLVVAKVEKGKSKKLKSVKELLGITIMERSSFEKNPIDFLEAKGYKEVKKDLIIKLPKYSLFELENGRKRMLASAGELQKGNELALPSKYVNFLYLASHYEKLKGSPEDNEQKQLFVEQHKHYLDEIIEQISEFSKRVILADANLDKVLSAYNKHRDKPIREQAENIIHLFTLTNLGAPAAFKYFDTTIDRKRYTSTKEVLDATLIHQSITGLYETRIDLSQLGGDGGGGGEAAAKPAPGGWVQEISDSRPMLHIYLNGRRFLGLLNTGADKTCIAGRDWPANWPIHQTESSLQGLGMACGVARSSQPLRWQHEDKSGIIHPFVIPTLPFTLWGRDIMKDIKVRLMTDSPDDSQDLMIGAIESNLFADQISWKSDQPVWLNQWPLKQEKLQALQQLVTEQLQLGHLEESNSPWNTPVFVIKKKSGKWRLLQDLRAVNATMHDMGALQPGLPSPVAVPKGWEIIIIDLQDCFFNIKLHPEDCKRFAFSVPSPNFKRPYQRFQWKVLPQGMKNSPTLCQKFVDKAILTVRDKYQDSYIVHYMDDILLAHPSRSIVDEILTSMIQALNKHGLVVSTEKIQKYDNLKYLGTHIQGDSVSYQKLQIRTDKLRTLNDFQKLLGNINWIRPFLKLTTGELKPLFEILNGDSNPISTRKLTPEACKALQLMNERLSTARVKRLDLSQPWSLCILKTEYTPTACLWQDGVVEWIHLPHISPKVITPYDIFCTQLIIKGRHRSKELFSKDPDYIVVPYTKVQFDLLLQEKEDWPISLLGFLGEVHFHLPKDPLLTFTLQTAIIFPHMTSTTPLEKGIVIFTDGSANGRSVTYIQGREPIIKENTQNTAQQAEIVAVITAFEEVSQPFNLYTDSKYVTGLFPEIETATLSPRTKIYTELKHLQRLIHKRQEKFYIGHIRGHTGLPGPLAQGNAYADSLTRILTAGKRTADGSEFEKRTADGSEFESPKKKAKVE

SEQ ID NO: 3192 - protein, 2116 aa, synthetic construct
MPAAKRVKLDGGDKKYSIGLDIGTNSVGWAVITDEYKVPSKKFKVLGNTDRHSIKKNLIGALLFDSGETAEATRLKRTARRRYTRRKNRICYLQEIFSNEMAKVDDSFFHRLEESFLVEEDKKHERHPIFGNIVDEVAYHEKYPTIYHLRKKLVDSTDKADLRLIYLALAHMIKFRGHFLIEGDLNPDNSDVDKLFIQLVQTYNQLFEENPINASGVDAKAILSARLSKSRRLENLIAQLPGEKKNGLFGNLIALSLGLTPNFKSNFDLAEDAKLQLSKDTYDDDLDNLLAQIGDQYADLFLAAKNLSDAILLSDILRVNTEITKAPLSASMIKRYDEHHQDLTLLKALVRQQLPEKYKEIFFDQSKNGYAGYIDGGASQEEFYKFIKPILEKMDGTEELLVKLNREDLLRKQRTFDNGSIPHQIHLGELHAILRRQEDFYPFLKDNREKIEKILTFRIPYYVGPLARGNSRFAWMTRKSEETITPWNFEEVVDKGASAQSFIERMTNFDKNLPNEKVLPKHSLLYEYFTVYNELTKVKYVTEGMRKPAFLSGEQKKAIVDLLFKTNRKVTVKQLKEDYFKKIECFDSVEISGVEDRFNASLGTYHDLLKIIKDKDFLDNEENEDILEDIVLTLTLFEDREMIEERLKTYAHLFDDKVMKQLKRRRYTGWGRLSRKLINGIRDKQSGKTILDFLKSDGFANRNFMQLIHDDSLTFKEDIQKAQVSGQGDSLHEHIANLAGSPAIKKGILQTVKVVDELVKVMGRHKPENIVIEMARENQTTQKGQKNSRERMKRIEEGIKELGSQILKEHPVENTQLQNEKLYLYYLQNGRDMYVDQELDINRLSDYDVDHIVPQSFLKDDSIDNKVLTRSDKARGKSDNVPSEEVVKKMKNYWRQLLNAKLITQRKFDNLTKAERGGLSELDKAGFIKRQLVETRQITKHVAQILDSRMNTKYDENDKLIREVKVITLKSKLVSDFRKDFQFYKVREINNYHHAHDAYLNAVVGTALIKKYPKLESEFVYGDYKVYDVRKMIAKSEQEIGKATAKYFFYSNIMNFFKTEITLANGEIRKRPLIETNGETGEIVWDKGRDFATVRKVLSMPQVNIVKKTEVQTGGFSKESILPKRNSDKLIARKKDWDPKKYGGFDSPTVAYSVLVVAKVEKGKSKKLKSVKELLGITIMERSSFEKNPIDFLEAKGYKEVKKDLIIKLPKYSLFELENGRKRMLASAGELQKGNELALPSKYVNFLYLASHYEKLKGSPEDNEQKQLFVEQHKHYLDEIIEQISEFSKRVILADANLDKVLSAYNKHRDKPIREQAENIIHLFTLTNLGAPAAFKYFDTTIDRKRYTSTKEVLDATLIHQSITGLYETRIDLSQLGGDGGGSSEAAAKGGSGGWVQEISDSRPMLHIYLNGRRFLGLLNTGADKTCIAGRDWPANWPIHQTESSLQGLGMACGVARSSQPLRWQHEDKSGIIHPFVIPTLPFTLWGRDIMKDIKVRLMTDSPDDSQDLMIGAIESNLFADQISWKSDQPVWLNQWPLKQEKLQALQQLVTEQLQLGHLEESNSPWNTPVFVIKKKSGKWRLLQDLRAVNATMHDMGALQPGLPSPVAVPKGWEIIIIDLQDCFFNIKLHPEDCKRFAFSVPSPNFKRPYQRFQWKVLPQGMKNSPTLCQKFVDKAILTVRDKYQDSYIVHYMDDILLAHPSRSIVDEILTSMIQALNKHGLVVSTEKIQKYDNLKYLGTHIQGDSVSYQKLQIRTDKLRTLNDFQKLLGNINWIRPFLKLTTGELKPLFEILNGDSNPISTRKLTPEACKALQLMNERLSTARVKRLDLSQPWSLCILKTEYTPTACLWQDGVVEWIHLPHISPKVITPYDIFCTQLIIKGRHRSKELFSKDPDYIVVPYTKVQFDLLLQEKEDWPISLLGFLGEVHFHLPKDPLLTFTLQTAIIFPHMTSTTPLEKGIVIFTDGSANGRSVTYIQGREPIIKENTQNTAQQAEIVAVITAFEEVSQPFNLYTDSKYVTGLFPEIETATLSPRTKIYTELKHLQRLIHKRQEKFYIGHIRGHTGLPGPLAQGNAYADSLTRILTAGKRTADGSEFEKRTADGSEFESPKKKAKVE

SEQ ID NO: 3193 - protein, 2125 aa, synthetic construct
MPAAKRVKLDGGDKKYSIGLDIGTNSVGWAVITDEYKVPSKKFKVLGNTDRHSIKKNLIGALLFDSGETAEATRLKRTARRRYTRRKNRICYLQEIFSNEMAKVDDSFFHRLEESFLVEEDKKHERHPIFGNIVDEVAYHEKYPTIYHLRKKLVDSTDKADLRLIYLALAHMIKFRGHFLIEGDLNPDNSDVDKLFIQLVQTYNQLFEENPINASGVDAKAILSARLSKSRRLENLIAQLPGEKKNGLFGNLIALSLGLTPNFKSNFDLAEDAKLQLSKDTYDDDLDNLLAQIGDQYADLFLAAKNLSDAILLSDILRVNTEITKAPLSASMIKRYDEHHQDLTLLKALVRQQLPEKYKEIFFDQSKNGYAGYIDGGASQEEFYKFIKPILEKMDGTEELLVKLNREDLLRKQRTFDNGSIPHQIHLGELHAILRRQEDFYPFLKDNREKIEKILTFRIPYYVGPLARGNSRFAWMTRKSEETITPWNFEEVVDKGASAQSFIERMTNFDKNLPNEKVLPKHSLLYEYFTVYNELTKVKYVTEGMRKPAFLSGEQKKAIVDLLFKTNRKVTVKQLKEDYFKKIECFDSVEISGVEDRFNASLGTYHDLLKIIKDKDFLDNEENEDILEDIVLTLTLFEDREMIEERLKTYAHLFDDKVMKQLKRRRYTGWGRLSRKLINGIRDKQSGKTILDFLKSDGFANRNFMQLIHDDSLTFKEDIQKAQVSGQGDSLHEHIANLAGSPAIKKGILQTVKVVDELVKVMGRHKPENIVIEMARENQTTQKGQKNSRERMKRIEEGIKELGSQILKEHPVENTQLQNEKLYLYYLQNGRDMYVDQELDINRLSDYDVDHIVPQSFLKDDSIDNKVLTRSDKARGKSDNVPSEEVVKKMKNYWRQLLNAKLITQRKFDNLTKAERGGLSELDKAGFIKRQLVETRQITKHVAQILDSRMNTKYDENDKLIREVKVITLKSKLVSDFRKDFQFYKVREINNYHHAHDAYLNAVVGTALIKKYPKLESEFVYGDYKVYDVRKMIAKSEQEIGKATAKYFFYSNIMNFFKTEITLANGEIRKRPLIETNGETGEIVWDKGRDFATVRKVLSMPQVNIVKKTEVQTGGFSKESILPKRNSDKLIARKKDWDPKKYGGFDSPTVAYSVLVVAKVEKGKSKKLKSVKELLGITIMERSSFEKNPIDFLEAKGYKEVKKDLIIKLPKYSLFELENGRKRMLASAGELQKGNELALPSKYVNFLYLASHYEKLKGSPEDNEQKQLFVEQHKHYLDEIIEQISEFSKRVILADANLDKVLSAYNKHRDKPIREQAENIIHLFTLTNLGAPAAFKYFDTTIDRKRYTSTKEVLDATLIHQSITGLYETRIDLSQLGGDGGGGGGSGGGGSGGGGSGGGGSGGWVQEISDSRPMLHIYLNGRRFLGLLNTGADKTCIAGRDWPANWPIHQTESSLQGLGMACGVARSSQPLRWQHEDKSGIIHPFVIPTLPFTLWGRDIMKDIKVRLMTDSPDDSQDLMIGAIESNLFADQISWKSDQPVWLNQWPLKQEKLQALQQLVTEQLQLGHLEESNSPWNTPVFVIKKKSGKWRLLQDLRAVNATMHDMGALQPGLPSPVAVPKGWEIIIIDLQDCFFNIKLHPEDCKRFAFSVPSPNFKRPYQRFQWKVLPQGMKNSPTLCQKFVDKAILTVRDKYQDSYIVHYMDDILLAHPSRSIVDEILTSMIQALNKHGLVVSTEKIQKYDNLKYLGTHIQGDSVSYQKLQIRTDKLRTLNDFQKLLGNINWIRPFLKLTTGELKPLFEILNGDSNPISTRKLTPEACKALQLMNERLSTARVKRLDLSQPWSLCILKTEYTPTACLWQDGVVEWIHLPHISPKVITPYDIFCTQLIIKGRHRSKELFSKDPDYIVVPYTKVQFDLLLQEKEDWPISLLGFLGEVHFHLPKDPLLTFTLQTAIIFPHMTSTTPLEKGIVIFTDGSANGRSVTYIQGREPIIKENTQNTAQQAEIVAVITAFEEVSQPFNLYTDSKYVTGLFPEIETATLSPRTKIYTELKHLQRLIHKRQEKFYIGHIRGHTGLPGPLAQGNAYADSLTRILTAGKRTADGSEFEKRTADGSEFESPKKKAKVE

SEQ ID NO: 3194 - protein, 2115 aa, synthetic construct
MPAAKRVKLDGGDKKYSIGLDIGTNSVGWAVITDEYKVPSKKFKVLGNTDRHSIKKNLIGALLFDSGETAEATRLKRTARRRYTRRKNRICYLQEIFSNEMAKVDDSFFHRLEESFLVEEDKKHERHPIFGNIVDEVAYHEKYPTIYHLRKKLVDSTDKADLRLIYLALAHMIKFRGHFLIEGDLNPDNSDVDKLFIQLVQTYNQLFEENPINASGVDAKAILSARLSKSRRLENLIAQLPGEKKNGLFGNLIALSLGLTPNFKSNFDLAEDAKLQLSKDTYDDDLDNLLAQIGDQYADLFLAAKNLSDAILLSDILRVNTEITKAPLSASMIKRYDEHHQDLTLLKALVRQQLPEKYKEIFFDQSKNGYAGYIDGGASQEEFYKFIKPILEKMDGTEELLVKLNREDLLRKQRTFDNGSIPHQIHLGELHAILRRQEDFYPFLKDNREKIEKILTFRIPYYVGPLARGNSRFAWMTRKSEETITPWNFEEVVDKGASAQSFIERMTNFDKNLPNEKVLPKHSLLYEYFTVYNELTKVKYVTEGMRKPAFLSGEQKKAIVDLLFKTNRKVTVKQLKEDYFKKIECFDSVEISGVEDRFNASLGTYHDLLKIIKDKDFLDNEENEDILEDIVLTLTLFEDREMIEERLKTYAHLFDDKVMKQLKRRRYTGWGRLSRKLINGIRDKQSGKTILDFLKSDGFANRNFMQLIHDDSLTFKEDIQKAQVSGQGDSLHEHIANLAGSPAIKKGILQTVKVVDELVKVMGRHKPENIVIEMARENQTTQKGQKNSRERMKRIEEGIKELGSQILKEHPVENTQLQNEKLYLYYLQNGRDMYVDQELDINRLSDYDVDHIVPQSFLKDDSIDNKVLTRSDKARGKSDNVPSEEVVKKMKNYWRQLLNAKLITQRKFDNLTKAERGGLSELDKAGFIKRQLVETRQITKHVAQILDSRMNTKYDENDKLIREVKVITLKSKLVSDFRKDFQFYKVREINNYHHAHDAYLNAVVGTALIKKYPKLESEFVYGDYKVYDVRKMIAKSEQEIGKATAKYFFYSNIMNFFKTEITLANGEIRKRPLIETNGETGEIVWDKGRDFATVRKVLSMPQVNIVKKTEVQTGGFSKESILPKRNSDKLIARKKDWDPKKYGGFDSPTVAYSVLVVAKVEKGKSKKLKSVKELLGITIMERSSFEKNPIDFLEAKGYKEVKKDLIIKLPKYSLFELENGRKRMLASAGELQKGNELALPSKYVNFLYLASHYEKLKGSPEDNEQKQLFVEQHKHYLDEIIEQISEFSKRVILADANLDKVLSAYNKHRDKPIREQAENIIHLFTLTNLGAPAAFKYFDTTIDRKRYTSTKEVLDATLIHQSITGLYETRIDLSQLGGDGGGGGGSGGGGSGGWVQEISDSRPMLHIYLNGRRFLGLLNTGADKTCIAGRDWPANWPIHQTESSLQGLGMACGVARSSQPLRWQHEDKSGIIHPFVIPTLPFTLWGRDIMKDIKVRLMTDSPDDSQDLMIGAIESNLFADQISWKSDQPVWLNQWPLKQEKLQALQQLVTEQLQLGHLEESNSPWNTPVFVIKKKSGKWRLLQDLRAVNATMHDMGALQPGLPSPVAVPKGWEIIIIDLQDCFFNIKLHPEDCKRFAFSVPSPNFKRPYQRFQWKVLPQGMKNSPTLCQKFVDKAILTVRDKYQDSYIVHYMDDILLAHPSRSIVDEILTSMIQALNKHGLVVSTEKIQKYDNLKYLGTHIQGDSVSYQKLQIRTDKLRTLNDFQKLLGNINWIRPFLKLTTGELKPLFEILNGDSNPISTRKLTPEACKALQLMNERLSTARVKRLDLSQPWSLCILKTEYTPTACLWQDGVVEWIHLPHISPKVITPYDIFCTQLIIKGRHRSKELFSKDPDYIVVPYTKVQFDLLLQEKEDWPISLLGFLGEVHFHLPKDPLLTFTLQTAIIFPHMTSTTPLEKGIVIFTDGSANGRSVTYIQGREPIIKENTQNTAQQAEIVAVITAFEEVSQPFNLYTDSKYVTGLFPEIETATLSPRTKIYTELKHLQRLIHKRQEKFYIGHIRGHTGLPGPLAQGNAYADSLTRILTAGKRTADGSEFEKRTADGSEFESPKKKAKVE

SEQ ID NO: 3195 - protein, 2114 aa, synthetic construct
MPAAKRVKLDGGDKKYSIGLDIGTNSVGWAVITDEYKVPSKKFKVLGNTDRHSIKKNLIGALLFDSGETAEATRLKRTARRRYTRRKNRICYLQEIFSNEMAKVDDSFFHRLEESFLVEEDKKHERHPIFGNIVDEVAYHEKYPTIYHLRKKLVDSTDKADLRLIYLALAHMIKFRGHFLIEGDLNPDNSDVDKLFIQLVQTYNQLFEENPINASGVDAKAILSARLSKSRRLENLIAQLPGEKKNGLFGNLIALSLGLTPNFKSNFDLAEDAKLQLSKDTYDDDLDNLLAQIGDQYADLFLAAKNLSDAILLSDILRVNTEITKAPLSASMIKRYDEHHQDLTLLKALVRQQLPEKYKEIFFDQSKNGYAGYIDGGASQEEFYKFIKPILEKMDGTEELLVKLNREDLLRKQRTFDNGSIPHQIHLGELHAILRRQEDFYPFLKDNREKIEKILTFRIPYYVGPLARGNSRFAWMTRKSEETITPWNFEEVVDKGASAQSFIERMTNFDKNLPNEKVLPKHSLLYEYFTVYNELTKVKYVTEGMRKPAFLSGEQKKAIVDLLFKTNRKVTVKQLKEDYFKKIECFDSVEISGVEDRFNASLGTYHDLLKIIKDKDFLDNEENEDILEDIVLTLTLFEDREMIEERLKTYAHLFDDKVMKQLKRRRYTGWGRLSRKLINGIRDKQSGKTILDFLKSDGFANRNFMQLIHDDSLTFKEDIQKAQVSGQGDSLHEHIANLAGSPAIKKGILQTVKVVDELVKVMGRHKPENIVIEMARENQTTQKGQKNSRERMKRIEEGIKELGSQILKEHPVENTQLQNEKLYLYYLQNGRDMYVDQELDINRLSDYDVDHIVPQSFLKDDSIDNKVLTRSDKARGKSDNVPSEEVVKKMKNYWRQLLNAKLITQRKFDNLTKAERGGLSELDKAGFIKRQLVETRQITKHVAQILDSRMNTKYDENDKLIREVKVITLKSKLVSDFRKDFQFYKVREINNYHHAHDAYLNAVVGTALIKKYPKLESEFVYGDYKVYDVRKMIAKSEQEIGKATAKYFFYSNIMNFFKTEITLANGEIRKRPLIETNGETGEIVWDKGRDFATVRKVLSMPQVNIVKKTEVQTGGFSKESILPKRNSDKLIARKKDWDPKKYGGFDSPTVAYSVLVVAKVEKGKSKKLKSVKELLGITIMERSSFEKNPIDFLEAKGYKEVKKDLIIKLPKYSLFELENGRKRMLASAGELQKGNELALPSKYVNFLYLASHYEKLKGSPEDNEQKQLFVEQHKHYLDEIIEQISEFSKRVILADANLDKVLSAYNKHRDKPIREQAENIIHLFTLTNLGAPAAFKYFDTTIDRKRYTSTKEVLDATLIHQSITGLYETRIDLSQLGGDGGPAPGGGGSSGGWVQEISDSRPMLHIYLNGRRFLGLLNTGADKTCIAGRDWPANWPIHQTESSLQGLGMACGVARSSQPLRWQHEDKSGIIHPFVIPTLPFTLWGRDIMKDIKVRLMTDSPDDSQDLMIGAIESNLFADQISWKSDQPVWLNQWPLKQEKLQALQQLVTEQLQLGHLEESNSPWNTPVFVIKKKSGKWRLLQDLRAVNATMHDMGALQPGLPSPVAVPKGWEIIIIDLQDCFFNIKLHPEDCKRFAFSVPSPNFKRPYQRFQWKVLPQGMKNSPTLCQKFVDKAILTVRDKYQDSYIVHYMDDILLAHPSRSIVDEILTSMIQALNKHGLVVSTEKIQKYDNLKYLGTHIQGDSVSYQKLQIRTDKLRTLNDFQKLLGNINWIRPFLKLTTGELKPLFEILNGDSNPISTRKLTPEACKALQLMNERLSTARVKRLDLSQPWSLCILKTEYTPTACLWQDGVVEWIHLPHISPKVITPYDIFCTQLIIKGRHRSKELFSKDPDYIVVPYTKVQFDLLLQEKEDWPISLLGFLGEVHFHLPKDPLLTFTLQTAIIFPHMTSTTPLEKGIVIFTDGSANGRSVTYIQGREPIIKENTQNTAQQAEIVAVITAFEEVSQPFNLYTDSKYVTGLFPEIETATLSPRTKIYTELKHLQRLIHKRQEKFYIGHIRGHTGLPGPLAQGNAYADSLTRILTAGKRTADGSEFEKRTADGSEFESPKKKAKVE

SEQ ID NO: 3196 - protein, 2024 aa, synthetic construct
MPAAKRVKLDGGDKKYSIGLDIGTNSVGWAVITDEYKVPSKKFKVLGNTDRHSIKKNLIGALLFDSGETAEATRLKRTARRRYTRRKNRICYLQEIFSNEMAKVDDSFFHRLEESFLVEEDKKHERHPIFGNIVDEVAYHEKYPTIYHLRKKLVDSTDKADLRLIYLALAHMIKFRGHFLIEGDLNPDNSDVDKLFIQLVQTYNQLFEENPINASGVDAKAILSARLSKSRRLENLIAQLPGEKKNGLFGNLIALSLGLTPNFKSNFDLAEDAKLQLSKDTYDDDLDNLLAQIGDQYADLFLAAKNLSDAILLSDILRVNTEITKAPLSASMIKRYDEHHQDLTLLKALVRQQLPEKYKEIFFDQSKNGYAGYIDGGASQEEFYKFIKPILEKMDGTEELLVKLNREDLLRKQRTFDNGSIPHQIHLGELHAILRRQEDFYPFLKDNREKIEKILTFRIPYYVGPLARGNSRFAWMTRKSEETITPWNFEEVVDKGASAQSFIERMTNFDKNLPNEKVLPKHSLLYEYFTVYNELTKVKYVTEGMRKPAFLSGEQKKAIVDLLFKTNRKVTVKQLKEDYFKKIECFDSVEISGVEDRFNASLGTYHDLLKIIKDKDFLDNEENEDILEDIVLTLTLFEDREMIEERLKTYAHLFDDKVMKQLKRRRYTGWGRLSRKLINGIRDKQSGKTILDFLKSDGFANRNFMQLIHDDSLTFKEDIQKAQVSGQGDSLHEHIANLAGSPAIKKGILQTVKVVDELVKVMGRHKPENIVIEMARENQTTQKGQKNSRERMKRIEEGIKELGSQILKEHPVENTQLQNEKLYLYYLQNGRDMYVDQELDINRLSDYDVDHIVPQSFLKDDSIDNKVLTRSDKARGKSDNVPSEEVVKKMKNYWRQLLNAKLITQRKFDNLTKAERGGLSELDKAGFIKRQLVETRQITKHVAQILDSRMNTKYDENDKLIREVKVITLKSKLVSDFRKDFQFYKVREINNYHHAHDAYLNAVVGTALIKKYPKLESEFVYGDYKVYDVRKMIAKSEQEIGKATAKYFFYSNIMNFFKTEITLANGEIRKRPLIETNGETGEIVWDKGRDFATVRKVLSMPQVNIVKKTEVQTGGFSKESILPKRNSDKLIARKKDWDPKKYGGFDSPTVAYSVLVVAKVEKGKSKKLKSVKELLGITIMERSSFEKNPIDFLEAKGYKEVKKDLIIKLPKYSLFELENGRKRMLASAGELQKGNELALPSKYVNFLYLASHYEKLKGSPEDNEQKQLFVEQHKHYLDEIIEQISEFSKRVILADANLDKVLSAYNKHRDKPIREQAENIIHLFTLTNLGAPAAFKYFDTTIDRKRYTSTKEVLDATLIHQSITGLYETRIDLSQLGGDGGGGGPAPEAAAKGGGRDIMKDIKVRLMTDSPDDSQDLMIGAIESNLFADQISWKSDQPVWLNQWPLKQEKLQALQQLVTEQLQLGHLEESNSPWNTPVFVIKKKSGKWRLLQDLRAVNATMHDMGALQPGLPSPVAVPKGWEIIIIDLQDCFFNIKLHPEDCKRFAFSVPSPNFKRPYQRFQWKVLPQGMKNSPTLCQKFVDKAILTVRDKYQDSYIVHYMDDILLAHPSRSIVDEILTSMIQALNKHGLVVSTEKIQKYDNLKYLGTHIQGDSVSYQKLQIRTDKLRTLNDFQKLLGNINWIRPFLKLTTGELKPLFEILNGDSNPISTRKLTPEACKALQLMNERLSTARVKRLDLSQPWSLCILKTEYTPTACLWQDGVVEWIHLPHISPKVITPYDIFCTQLIIKGRHRSKELFSKDPDYIVVPYTKVQFDLLLQEKEDWPISLLGFLGEVHFHLPKDPLLTFTLQTAIIFPHMTSTTPLEKGIVIFTDGSANGRSVTYIQGREPIIKENTQNTAQQAEIVAVITAFEEVSQPFNLYTDSKYVTGLFPEIETATLSPRTKIYTELKHLQRLIHKRQEKFYIGHIRGHTGLPGPLAQGNAYADSLTRILTAGKRTADGSEFEKRTADGSEFESPKKKAKVE

SEQ ID NO: 3197 - protein, 2059 aa, synthetic construct
MPAAKRVKLDGGDKKYSIGLDIGTNSVGWAVITDEYKVPSKKFKVLGNTDRHSIKKNLIGALLFDSGETAEATRLKRTARRRYTRRKNRICYLQEIFSNEMAKVDDSFFHRLEESFLVEEDKKHERHPIFGNIVDEVAYHEKYPTIYHLRKKLVDSTDKADLRLIYLALAHMIKFRGHFLIEGDLNPDNSDVDKLFIQLVQTYNQLFEENPINASGVDAKAILSARLSKSRRLENLIAQLPGEKKNGLFGNLIALSLGLTPNFKSNFDLAEDAKLQLSKDTYDDDLDNLLAQIGDQYADLFLAAKNLSDAILLSDILRVNTEITKAPLSASMIKRYDEHHQDLTLLKALVRQQLPEKYKEIFFDQSKNGYAGYIDGGASQEEFYKFIKPILEKMDGTEELLVKLNREDLLRKQRTFDNGSIPHQIHLGELHAILRRQEDFYPFLKDNREKIEKILTFRIPYYVGPLARGNSRFAWMTRKSEETITPWNFEEVVDKGASAQSFIERMTNFDKNLPNEKVLPKHSLLYEYFTVYNELTKVKYVTEGMRKPAFLSGEQKKAIVDLLFKTNRKVTVKQLKEDYFKKIECFDSVEISGVEDRFNASLGTYHDLLKIIKDKDFLDNEENEDILEDIVLTLTLFEDREMIEERLKTYAHLFDDKVMKQLKRRRYTGWGRLSRKLINGIRDKQSGKTILDFLKSDGFANRNFMQLIHDDSLTFKEDIQKAQVSGQGDSLHEHIANLAGSPAIKKGILQTVKVVDELVKVMGRHKPENIVIEMARENQTTQKGQKNSRERMKRIEEGIKELGSQILKEHPVENTQLQNEKLYLYYLQNGRDMYVDQELDINRLSDYDVDHIVPQSFLKDDSIDNKVLTRSDKARGKSDNVPSEEVVKKMKNYWRQLLNAKLITQRKFDNLTKAERGGLSELDKAGFIKRQLVETRQITKHVAQILDSRMNTKYDENDKLIREVKVITLKSKLVSDFRKDFQFYKVREINNYHHAHDAYLNAVVGTALIKKYPKLESEFVYGDYKVYDVRKMIAKSEQEIGKATAKYFFYSNIMNFFKTEITLANGEIRKRPLIETNGETGEIVWDKGRDFATVRKVLSMPQVNIVKKTEVQTGGFSKESILPKRNSDKLIARKKDWDPKKYGGFDSPTVAYSVLVVAKVEKGKSKKLKSVKELLGITIMERSSFEKNPIDFLEAKGYKEVKKDLIIKLPKYSLFELENGRKRMLASAGELQKGNELALPSKYVNFLYLASHYEKLKGSPEDNEQKQLFVEQHKHYLDEIIEQISEFSKRVILADANLDKVLSAYNKHRDKPIREQAENIIHLFTLTNLGAPAAFKYFDTTIDRKRYTSTKEVLDATLIHQSITGLYETRIDLSQLGGDGGAEAAAKEAAAKEAAAKEAAAKALEAEAAAKEAAAKEAAAKEAAAKAGGGRDIMKDIKVRLMTDSPDDSQDLMIGAIESNLFADQISWKSDQPVWLNQWPLKQEKLQALQQLVTEQLQLGHLEESNSPWNTPVFVIKKKSGKWRLLQDLRAVNATMHDMGALQPGLPSPVAVPKGWEIIIIDLQDCFFNIKLHPEDCKRFAFSVPSPNFKRPYQRFQWKVLPQGMKNSPTLCQKFVDKAILTVRDKYQDSYIVHYMDDILLAHPSRSIVDEILTSMIQALNKHGLVVSTEKIQKYDNLKYLGTHIQGDSVSYQKLQIRTDKLRTLNDFQKLLGNINWIRPFLKLTTGELKPLFEILNGDSNPISTRKLTPEACKALQLMNERLSTARVKRLDLSQPWSLCILKTEYTPTACLWQDGVVEWIHLPHISPKVITPYDIFCTQLIIKGRHRSKELFSKDPDYIVVPYTKVQFDLLLQEKEDWPISLLGFLGEVHFHLPKDPLLTFTLQTAIIFPHMTSTTPLEKGIVIFTDGSANGRSVTYIQGREPIIKENTQNTAQQAEIVAVITAFEEVSQPFNLYTDSKYVTGLFPEIETATLSPRTKIYTELKHLQRLIHKRQEKFYIGHIRGHTGLPGPLAQGNAYADSLTRILTAGKRTADGSEFEKRTADGSEFESPKKKAKVE

SEQ ID NO: 3198 - protein, 2024 aa, synthetic construct
MPAAKRVKLDGGDKKYSIGLDIGTNSVGWAVITDEYKVPSKKFKVLGNTDRHSIKKNLIGALLFDSGETAEATRLKRTARRRYTRRKNRICYLQEIFSNEMAKVDDSFFHRLEESFLVEEDKKHERHPIFGNIVDEVAYHEKYPTIYHLRKKLVDSTDKADLRLIYLALAHMIKFRGHFLIEGDLNPDNSDVDKLFIQLVQTYNQLFEENPINASGVDAKAILSARLSKSRRLENLIAQLPGEKKNGLFGNLIALSLGLTPNFKSNFDLAEDAKLQLSKDTYDDDLDNLLAQIGDQYADLFLAAKNLSDAILLSDILRVNTEITKAPLSASMIKRYDEHHQDLTLLKALVRQQLPEKYKEIFFDQSKNGYAGYIDGGASQEEFYKFIKPILEKMDGTEELLVKLNREDLLRKQRTFDNGSIPHQIHLGELHAILRRQEDFYPFLKDNREKIEKILTFRIPYYVGPLARGNSRFAWMTRKSEETITPWNFEEVVDKGASAQSFIERMTNFDKNLPNEKVLPKHSLLYEYFTVYNELTKVKYVTEGMRKPAFLSGEQKKAIVDLLFKTNRKVTVKQLKEDYFKKIECFDSVEISGVEDRFNASLGTYHDLLKIIKDKDFLDNEENEDILEDIVLTLTLFEDREMIEERLKTYAHLFDDKVMKQLKRRRYTGWGRLSRKLINGIRDKQSGKTILDFLKSDGFANRNFMQLIHDDSLTFKEDIQKAQVSGQGDSLHEHIANLAGSPAIKKGILQTVKVVDELVKVMGRHKPENIVIEMARENQTTQKGQKNSRERMKRIEEGIKELGSQILKEHPVENTQLQNEKLYLYYLQNGRDMYVDQELDINRLSDYDVDHIVPQSFLKDDSIDNKVLTRSDKARGKSDNVPSEEVVKKMKNYWRQLLNAKLITQRKFDNLTKAERGGLSELDKAGFIKRQLVETRQITKHVAQILDSRMNTKYDENDKLIREVKVITLKSKLVSDFRKDFQFYKVREINNYHHAHDAYLNAVVGTALIKKYPKLESEFVYGDYKVYDVRKMIAKSEQEIGKATAKYFFYSNIMNFFKTEITLANGEIRKRPLIETNGETGEIVWDKGRDFATVRKVLSMPQVNIVKKTEVQTGGFSKESILPKRNSDKLIARKKDWDPKKYGGFDSPTVAYSVLVVAKVEKGKSKKLKSVKELLGITIMERSSFEKNPIDFLEAKGYKEVKKDLIIKLPKYSLFELENGRKRMLASAGELQKGNELALPSKYVNFLYLASHYEKLKGSPEDNEQKQLFVEQHKHYLDEIIEQISEFSKRVILADANLDKVLSAYNKHRDKPIREQAENIIHLFTLTNLGAPAAFKYFDTTIDRKRYTSTKEVLDATLIHQSITGLYETRIDLSQLGGDGGPAPGSSEAAAKGGGRDIMKDIKVRLMTDSPDDSQDLMIGAIESNLFADQISWKSDQPVWLNQWPLKQEKLQALQQLVTEQLQLGHLEESNSPWNTPVFVIKKKSGKWRLLQDLRAVNATMHDMGALQPGLPSPVAVPKGWEIIIIDLQDCFFNIKLHPEDCKRFAFSVPSPNFKRPYQRFQWKVLPQGMKNSPTLCQKFVDKAILTVRDKYQDSYIVHYMDDILLAHPSRSIVDEILTSMIQALNKHGLVVSTEKIQKYDNLKYLGTHIQGDSVSYQKLQIRTDKLRTLNDFQKLLGNINWIRPFLKLTTGELKPLFEILNGDSNPISTRKLTPEACKALQLMNERLSTARVKRLDLSQPWSLCILKTEYTPTACLWQDGVVEWIHLPHISPKVITPYDIFCTQLIIKGRHRSKELFSKDPDYIVVPYTKVQFDLLLQEKEDWPISLLGFLGEVHFHLPKDPLLTFTLQTAIIFPHMTSTTPLEKGIVIFTDGSANGRSVTYIQGREPIIKENTQNTAQQAEIVAVITAFEEVSQPFNLYTDSKYVTGLFPEIETATLSPRTKIYTELKHLQRLIHKRQEKFYIGHIRGHTGLPGPLAQGNAYADSLTRILTAGKRTADGSEFEKRTADGSEFESPKKKAKVE

SEQ ID NO: 3199 - protein, 2022 aa, synthetic construct
MPAAKRVKLDGGDKKYSIGLDIGTNSVGWAVITDEYKVPSKKFKVLGNTDRHSIKKNLIGALLFDSGETAEATRLKRTARRRYTRRKNRICYLQEIFSNEMAKVDDSFFHRLEESFLVEEDKKHERHPIFGNIVDEVAYHEKYPTIYHLRKKLVDSTDKADLRLIYLALAHMIKFRGHFLIEGDLNPDNSDVDKLFIQLVQTYNQLFEENPINASGVDAKAILSARLSKSRRLENLIAQLPGEKKNGLFGNLIALSLGLTPNFKSNFDLAEDAKLQLSKDTYDDDLDNLLAQIGDQYADLFLAAKNLSDAILLSDILRVNTEITKAPLSASMIKRYDEHHQDLTLLKALVRQQLPEKYKEIFFDQSKNGYAGYIDGGASQEEFYKFIKPILEKMDGTEELLVKLNREDLLRKQRTFDNGSIPHQIHLGELHAILRRQEDFYPFLKDNREKIEKILTFRIPYYVGPLARGNSRFAWMTRKSEETITPWNFEEVVDKGASAQSFIERMTNFDKNLPNEKVLPKHSLLYEYFTVYNELTKVKYVTEGMRKPAFLSGEQKKAIVDLLFKTNRKVTVKQLKEDYFKKIECFDSVEISGVEDRFNASLGTYHDLLKIIKDKDFLDNEENEDILEDIVLTLTLFEDREMIEERLKTYAHLFDDKVMKQLKRRRYTGWGRLSRKLINGIRDKQSGKTILDFLKSDGFANRNFMQLIHDDSLTFKEDIQKAQVSGQGDSLHEHIANLAGSPAIKKGILQTVKVVDELVKVMGRHKPENIVIEMARENQTTQKGQKNSRERMKRIEEGIKELGSQILKEHPVENTQLQNEKLYLYYLQNGRDMYVDQELDINRLSDYDVDHIVPQSFLKDDSIDNKVLTRSDKARGKSDNVPSEEVVKKMKNYWRQLLNAKLITQRKFDNLTKAERGGLSELDKAGFIKRQLVETRQITKHVAQILDSRMNTKYDENDKLIREVKVITLKSKLVSDFRKDFQFYKVREINNYHHAHDAYLNAVVGTALIKKYPKLESEFVYGDYKVYDVRKMIAKSEQEIGKATAKYFFYSNIMNFFKTEITLANGEIRKRPLIETNGETGEIVWDKGRDFATVRKVLSMPQVNIVKKTEVQTGGFSKESILPKRNSDKLIARKKDWDPKKYGGFDSPTVAYSVLVVAKVEKGKSKKLKSVKELLGITIMERSSFEKNPIDFLEAKGYKEVKKDLIIKLPKYSLFELENGRKRMLASAGELQKGNELALPSKYVNFLYLASHYEKLKGSPEDNEQKQLFVEQHKHYLDEIIEQISEFSKRVILADANLDKVLSAYNKHRDKPIREQAENIIHLFTLTNLGAPAAFKYFDTTIDRKRYTSTKEVLDATLIHQSITGLYETRIDLSQLGGDGGGGSGGGGSSGGGRDIMKDIKVRLMTDSPDDSQDLMIGAIESNLFADQISWKSDQPVWLNQWPLKQEKLQALQQLVTEQLQLGHLEESNSPWNTPVFVIKKKSGKWRLLQDLRAVNATMHDMGALQPGLPSPVAVPKGWEIIIIDLQDCFFNIKLHPEDCKRFAFSVPSPNFKRPYQRFQWKVLPQGMKNSPTLCQKFVDKAILTVRDKYQDSYIVHYMDDILLAHPSRSIVDEILTSMIQALNKHGLVVSTEKIQKYDNLKYLGTHIQGDSVSYQKLQIRTDKLRTLNDFQKLLGNINWIRPFLKLTTGELKPLFEILNGDSNPISTRKLTPEACKALQLMNERLSTARVKRLDLSQPWSLCILKTEYTPTACLWQDGVVEWIHLPHISPKVITPYDIFCTQLIIKGRHRSKELFSKDPDYIVVPYTKVQFDLLLQEKEDWPISLLGFLGEVHFHLPKDPLLTFTLQTAIIFPHMTSTTPLEKGIVIFTDGSANGRSVTYIQGREPIIKENTQNTAQQAEIVAVITAFEEVSQPFNLYTDSKYVTGLFPEIETATLSPRTKIYTELKHLQRLIHKRQEKFYIGHIRGHTGLPGPLAQGNAYADSLTRILTAGKRTADGSEFEKRTADGSEFESPKKKAKVE

SEQ ID NO: 3200 - protein, 2024 aa, synthetic construct
MPAAKRVKLDGGDKKYSIGLDIGTNSVGWAVITDEYKVPSKKFKVLGNTDRHSIKKNLIGALLFDSGETAEATRLKRTARRRYTRRKNRICYLQEIFSNEMAKVDDSFFHRLEESFLVEEDKKHERHPIFGNIVDEVAYHEKYPTIYHLRKKLVDSTDKADLRLIYLALAHMIKFRGHFLIEGDLNPDNSDVDKLFIQLVQTYNQLFEENPINASGVDAKAILSARLSKSRRLENLIAQLPGEKKNGLFGNLIALSLGLTPNFKSNFDLAEDAKLQLSKDTYDDDLDNLLAQIGDQYADLFLAAKNLSDAILLSDILRVNTEITKAPLSASMIKRYDEHHQDLTLLKALVRQQLPEKYKEIFFDQSKNGYAGYIDGGASQEEFYKFIKPILEKMDGTEELLVKLNREDLLRKQRTFDNGSIPHQIHLGELHAILRRQEDFYPFLKDNREKIEKILTFRIPYYVGPLARGNSRFAWMTRKSEETITPWNFEEVVDKGASAQSFIERMTNFDKNLPNEKVLPKHSLLYEYFTVYNELTKVKYVTEGMRKPAFLSGEQKKAIVDLLFKTNRKVTVKQLKEDYFKKIECFDSVEISGVEDRFNASLGTYHDLLKIIKDKDFLDNEENEDILEDIVLTLTLFEDREMIEERLKTYAHLFDDKVMKQLKRRRYTGWGRLSRKLINGIRDKQSGKTILDFLKSDGFANRNFMQLIHDDSLTFKEDIQKAQVSGQGDSLHEHIANLAGSPAIKKGILQTVKVVDELVKVMGRHKPENIVIEMARENQTTQKGQKNSRERMKRIEEGIKELGSQILKEHPVENTQLQNEKLYLYYLQNGRDMYVDQELDINRLSDYDVDHIVPQSFLKDDSIDNKVLTRSDKARGKSDNVPSEEVVKKMKNYWRQLLNAKLITQRKFDNLTKAERGGLSELDKAGFIKRQLVETRQITKHVAQILDSRMNTKYDENDKLIREVKVITLKSKLVSDFRKDFQFYKVREINNYHHAHDAYLNAVVGTALIKKYPKLESEFVYGDYKVYDVRKMIAKSEQEIGKATAKYFFYSNIMNFFKTEITLANGEIRKRPLIETNGETGEIVWDKGRDFATVRKVLSMPQVNIVKKTEVQTGGFSKESILPKRNSDKLIARKKDWDPKKYGGFDSPTVAYSVLVVAKVEKGKSKKLKSVKELLGITIMERSSFEKNPIDFLEAKGYKEVKKDLIIKLPKYSLFELENGRKRMLASAGELQKGNELALPSKYVNFLYLASHYEKLKGSPEDNEQKQLFVEQHKHYLDEIIEQISEFSKRVILADANLDKVLSAYNKHRDKPIREQAENIIHLFTLTNLGAPAAFKYFDTTIDRKRYTSTKEVLDATLIHQSITGLYETRIDLSQLGGDGGPAPEAAAKGGGGGGRDIMKDIKVRLMTDSPDDSQDLMIGAIESNLFADQISWKSDQPVWLNQWPLKQEKLQALQQLVTEQLQLGHLEESNSPWNTPVFVIKKKSGKWRLLQDLRAVNATMHDMGALQPGLPSPVAVPKGWEIIIIDLQDCFFNIKLHPEDCKRFAFSVPSPNFKRPYQRFQWKVLPQGMKNSPTLCQKFVDKAILTVRDKYQDSYIVHYMDDILLAHPSRSIVDEILTSMIQALNKHGLVVSTEKIQKYDNLKYLGTHIQGDSVSYQKLQIRTDKLRTLNDFQKLLGNINWIRPFLKLTTGELKPLFEILNGDSNPISTRKLTPEACKALQLMNERLSTARVKRLDLSQPWSLCILKTEYTPTACLWQDGVVEWIHLPHISPKVITPYDIFCTQLIIKGRHRSKELFSKDPDYIVVPYTKVQFDLLLQEKEDWPISLLGFLGEVHFHLPKDPLLTFTLQTAIIFPHMTSTTPLEKGIVIFTDGSANGRSVTYIQGREPIIKENTQNTAQQAEIVAVITAFEEVSQPFNLYTDSKYVTGLFPEIETATLSPRTKIYTELKHLQRLIHKRQEKFYIGHIRGHTGLPGPLAQGNAYADSLTRILTAGKRTADGSEFEKRTADGSEFESPKKKAKVE

SEQ ID NO: 3201 - protein, 2028 aa, synthetic construct
MPAAKRVKLDGGDKKYSIGLDIGTNSVGWAVITDEYKVPSKKFKVLGNTDRHSIKKNLIGALLFDSGETAEATRLKRTARRRYTRRKNRICYLQEIFSNEMAKVDDSFFHRLEESFLVEEDKKHERHPIFGNIVDEVAYHEKYPTIYHLRKKLVDSTDKADLRLIYLALAHMIKFRGHFLIEGDLNPDNSDVDKLFIQLVQTYNQLFEENPINASGVDAKAILSARLSKSRRLENLIAQLPGEKKNGLFGNLIALSLGLTPNFKSNFDLAEDAKLQLSKDTYDDDLDNLLAQIGDQYADLFLAAKNLSDAILLSDILRVNTEITKAPLSASMIKRYDEHHQDLTLLKALVRQQLPEKYKEIFFDQSKNGYAGYIDGGASQEEFYKFIKPILEKMDGTEELLVKLNREDLLRKQRTFDNGSIPHQIHLGELHAILRRQEDFYPFLKDNREKIEKILTFRIPYYVGPLARGNSRFAWMTRKSEETITPWNFEEVVDKGASAQSFIERMTNFDKNLPNEKVLPKHSLLYEYFTVYNELTKVKYVTEGMRKPAFLSGEQKKAIVDLLFKTNRKVTVKQLKEDYFKKIECFDSVEISGVEDRFNASLGTYHDLLKIIKDKDFLDNEENEDILEDIVLTLTLFEDREMIEERLKTYAHLFDDKVMKQLKRRRYTGWGRLSRKLINGIRDKQSGKTILDFLKSDGFANRNFMQLIHDDSLTFKEDIQKAQVSGQGDSLHEHIANLAGSPAIKKGILQTVKVVDELVKVMGRHKPENIVIEMARENQTTQKGQKNSRERMKRIEEGIKELGSQILKEHPVENTQLQNEKLYLYYLQNGRDMYVDQELDINRLSDYDVDHIVPQSFLKDDSIDNKVLTRSDKARGKSDNVPSEEVVKKMKNYWRQLLNAKLITQRKFDNLTKAERGGLSELDKAGFIKRQLVETRQITKHVAQILDSRMNTKYDENDKLIREVKVITLKSKLVSDFRKDFQFYKVREINNYHHAHDAYLNAVVGTALIKKYPKLESEFVYGDYKVYDVRKMIAKSEQEIGKATAKYFFYSNIMNFFKTEITLANGEIRKRPLIETNGETGEIVWDKGRDFATVRKVLSMPQVNIVKKTEVQTGGFSKESILPKRNSDKLIARKKDWDPKKYGGFDSPTVAYSVLVVAKVEKGKSKKLKSVKELLGITIMERSSFEKNPIDFLEAKGYKEVKKDLIIKLPKYSLFELENGRKRMLASAGELQKGNELALPSKYVNFLYLASHYEKLKGSPEDNEQKQLFVEQHKHYLDEIIEQISEFSKRVILADANLDKVLSAYNKHRDKPIREQAENIIHLFTLTNLGAPAAFKYFDTTIDRKRYTSTKEVLDATLIHQSITGLYETRIDLSQLGGDGGEAAAKGGGGSEAAAKGGGRDIMKDIKVRLMTDSPDDSQDLMIGAIESNLFADQISWKSDQPVWLNQWPLKQEKLQALQQLVTEQLQLGHLEESNSPWNTPVFVIKKKSGKWRLLQDLRAVNATMHDMGALQPGLPSPVAVPKGWEIIIIDLQDCFFNIKLHPEDCKRFAFSVPSPNFKRPYQRFQWKVLPQGMKNSPTLCQKFVDKAILTVRDKYQDSYIVHYMDDILLAHPSRSIVDEILTSMIQALNKHGLVVSTEKIQKYDNLKYLGTHIQGDSVSYQKLQIRTDKLRTLNDFQKLLGNINWIRPFLKLTTGELKPLFEILNGDSNPISTRKLTPEACKALQLMNERLSTARVKRLDLSQPWSLCILKTEYTPTACLWQDGVVEWIHLPHISPKVITPYDIFCTQLIIKGRHRSKELFSKDPDYIVVPYTKVQFDLLLQEKEDWPISLLGFLGEVHFHLPKDPLLTFTLQTAIIFPHMTSTTPLEKGIVIFTDGSANGRSVTYIQGREPIIKENTQNTAQQAEIVAVITAFEEVSQPFNLYTDSKYVTGLFPEIETATLSPRTKIYTELKHLQRLIHKRQEKFYIGHIRGHTGLPGPLAQGNAYADSLTRILTAGKRTADGSEFEKRTADGSEFESPKKKAKVE

SEQ ID NO: 3202 - protein, 2019 aa, synthetic construct
MPAAKRVKLDGGDKKYSIGLDIGTNSVGWAVITDEYKVPSKKFKVLGNTDRHSIKKNLIGALLFDSGETAEATRLKRTARRRYTRRKNRICYLQEIFSNEMAKVDDSFFHRLEESFLVEEDKKHERHPIFGNIVDEVAYHEKYPTIYHLRKKLVDSTDKADLRLIYLALAHMIKFRGHFLIEGDLNPDNSDVDKLFIQLVQTYNQLFEENPINASGVDAKAILSARLSKSRRLENLIAQLPGEKKNGLFGNLIALSLGLTPNFKSNFDLAEDAKLQLSKDTYDDDLDNLLAQIGDQYADLFLAAKNLSDAILLSDILRVNTEITKAPLSASMIKRYDEHHQDLTLLKALVRQQLPEKYKEIFFDQSKNGYAGYIDGGASQEEFYKFIKPILEKMDGTEELLVKLNREDLLRKQRTFDNGSIPHQIHLGELHAILRRQEDFYPFLKDNREKIEKILTFRIPYYVGPLARGNSRFAWMTRKSEETITPWNFEEVVDKGASAQSFIERMTNFDKNLPNEKVLPKHSLLYEYFTVYNELTKVKYVTEGMRKPAFLSGEQKKAIVDLLFKTNRKVTVKQLKEDYFKKIECFDSVEISGVEDRFNASLGTYHDLLKIIKDKDFLDNEENEDILEDIVLTLTLFEDREMIEERLKTYAHLFDDKVMKQLKRRRYTGWGRLSRKLINGIRDKQSGKTILDFLKSDGFANRNFMQLIHDDSLTFKEDIQKAQVSGQGDSLHEHIANLAGSPAIKKGILQTVKVVDELVKVMGRHKPENIVIEMARENQTTQKGQKNSRERMKRIEEGIKELGSQILKEHPVENTQLQNEKLYLYYLQNGRDMYVDQELDINRLSDYDVDHIVPQSFLKDDSIDNKVLTRSDKARGKSDNVPSEEVVKKMKNYWRQLLNAKLITQRKFDNLTKAERGGLSELDKAGFIKRQLVETRQITKHVAQILDSRMNTKYDENDKLIREVKVITLKSKLVSDFRKDFQFYKVREINNYHHAHDAYLNAVVGTALIKKYPKLESEFVYGDYKVYDVRKMIAKSEQEIGKATAKYFFYSNIMNFFKTEITLANGEIRKRPLIETNGETGEIVWDKGRDFATVRKVLSMPQVNIVKKTEVQTGGFSKESILPKRNSDKLIARKKDWDPKKYGGFDSPTVAYSVLVVAKVEKGKSKKLKSVKELLGITIMERSSFEKNPIDFLEAKGYKEVKKDLIIKLPKYSLFELENGRKRMLASAGELQKGNELALPSKYVNFLYLASHYEKLKGSPEDNEQKQLFVEQHKHYLDEIIEQISEFSKRVILADANLDKVLSAYNKHRDKPIREQAENIIHLFTLTNLGAPAAFKYFDTTIDRKRYTSTKEVLDATLIHQSITGLYETRIDLSQLGGDGGGGGPAPGGGRDIMKDIKVRLMTDSPDDSQDLMIGAIESNLFADQISWKSDQPVWLNQWPLKQEKLQALQQLVTEQLQLGHLEESNSPWNTPVFVIKKKSGKWRLLQDLRAVNATMHDMGALQPGLPSPVAVPKGWEIIIIDLQDCFFNIKLHPEDCKRFAFSVPSPNFKRPYQRFQWKVLPQGMKNSPTLCQKFVDKAILTVRDKYQDSYIVHYMDDILLAHPSRSIVDEILTSMIQALNKHGLVVSTEKIQKYDNLKYLGTHIQGDSVSYQKLQIRTDKLRTLNDFQKLLGNINWIRPFLKLTTGELKPLFEILNGDSNPISTRKLTPEACKALQLMNERLSTARVKRLDLSQPWSLCILKTEYTPTACLWQDGVVEWIHLPHISPKVITPYDIFCTQLIIKGRHRSKELFSKDPDYIVVPYTKVQFDLLLQEKEDWPISLLGFLGEVHFHLPKDPLLTFTLQTAIIFPHMTSTTPLEKGIVIFTDGSANGRSVTYIQGREPIIKENTQNTAQQAEIVAVITAFEEVSQPFNLYTDSKYVTGLFPEIETATLSPRTKIYTELKHLQRLIHKRQEKFYIGHIRGHTGLPGPLAQGNAYADSLTRILTAGKRTADGSEFEKRTADGSEFESPKKKAKVE

SEQ ID NO: 3203 - protein, 2028 aa, synthetic construct
MPAAKRVKLDGGDKKYSIGLDIGTNSVGWAVITDEYKVPSKKFKVLGNTDRHSIKKNLIGALLFDSGETAEATRLKRTARRRYTRRKNRICYLQEIFSNEMAKVDDSFFHRLEESFLVEEDKKHERHPIFGNIVDEVAYHEKYPTIYHLRKKLVDSTDKADLRLIYLALAHMIKFRGHFLIEGDLNPDNSDVDKLFIQLVQTYNQLFEENPINASGVDAKAILSARLSKSRRLENLIAQLPGEKKNGLFGNLIALSLGLTPNFKSNFDLAEDAKLQLSKDTYDDDLDNLLAQIGDQYADLFLAAKNLSDAILLSDILRVNTEITKAPLSASMIKRYDEHHQDLTLLKALVRQQLPEKYKEIFFDQSKNGYAGYIDGGASQEEFYKFIKPILEKMDGTEELLVKLNREDLLRKQRTFDNGSIPHQIHLGELHAILRRQEDFYPFLKDNREKIEKILTFRIPYYVGPLARGNSRFAWMTRKSEETITPWNFEEVVDKGASAQSFIERMTNFDKNLPNEKVLPKHSLLYEYFTVYNELTKVKYVTEGMRKPAFLSGEQKKAIVDLLFKTNRKVTVKQLKEDYFKKIECFDSVEISGVEDRFNASLGTYHDLLKIIKDKDFLDNEENEDILEDIVLTLTLFEDREMIEERLKTYAHLFDDKVMKQLKRRRYTGWGRLSRKLINGIRDKQSGKTILDFLKSDGFANRNFMQLIHDDSLTFKEDIQKAQVSGQGDSLHEHIANLAGSPAIKKGILQTVKVVDELVKVMGRHKPENIVIEMARENQTTQKGQKNSRERMKRIEEGIKELGSQILKEHPVENTQLQNEKLYLYYLQNGRDMYVDQELDINRLSDYDVDHIVPQSFLKDDSIDNKVLTRSDKARGKSDNVPSEEVVKKMKNYWRQLLNAKLITQRKFDNLTKAERGGLSELDKAGFIKRQLVETRQITKHVAQILDSRMNTKYDENDKLIREVKVITLKSKLVSDFRKDFQFYKVREINNYHHAHDAYLNAVVGTALIKKYPKLESEFVYGDYKVYDVRKMIAKSEQEIGKATAKYFFYSNIMNFFKTEITLANGEIRKRPLIETNGETGEIVWDKGRDFATVRKVLSMPQVNIVKKTEVQTGGFSKESILPKRNSDKLIARKKDWDPKKYGGFDSPTVAYSVLVVAKVEKGKSKKLKSVKELLGITIMERSSFEKNPIDFLEAKGYKEVKKDLIIKLPKYSLFELENGRKRMLASAGELQKGNELALPSKYVNFLYLASHYEKLKGSPEDNEQKQLFVEQHKHYLDEIIEQISEFSKRVILADANLDKVLSAYNKHRDKPIREQAENIIHLFTLTNLGAPAAFKYFDTTIDRKRYTSTKEVLDATLIHQSITGLYETRIDLSQLGGDGGGGGGSGGGGSGGGGSGGGRDIMKDIKVRLMTDSPDDSQDLMIGAIESNLFADQISWKSDQPVWLNQWPLKQEKLQALQQLVTEQLQLGHLEESNSPWNTPVFVIKKKSGKWRLLQDLRAVNATMHDMGALQPGLPSPVAVPKGWEIIIIDLQDCFFNIKLHPEDCKRFAFSVPSPNFKRPYQRFQWKVLPQGMKNSPTLCQKFVDKAILTVRDKYQDSYIVHYMDDILLAHPSRSIVDEILTSMIQALNKHGLVVSTEKIQKYDNLKYLGTHIQGDSVSYQKLQIRTDKLRTLNDFQKLLGNINWIRPFLKLTTGELKPLFEILNGDSNPISTRKLTPEACKALQLMNERLSTARVKRLDLSQPWSLCILKTEYTPTACLWQDGVVEWIHLPHISPKVITPYDIFCTQLIIKGRHRSKELFSKDPDYIVVPYTKVQFDLLLQEKEDWPISLLGFLGEVHFHLPKDPLLTFTLQTAIIFPHMTSTTPLEKGIVIFTDGSANGRSVTYIQGREPIIKENTQNTAQQAEIVAVITAFEEVSQPFNLYTDSKYVTGLFPEIETATLSPRTKIYTELKHLQRLIHKRQEKFYIGHIRGHTGLPGPLAQGNAYADSLTRILTAGKRTADGSEFEKRTADGSEFESPKKKAKVE

SEQ ID NO: 3204 - protein, 2022 aa, synthetic construct
MPAAKRVKLDGGDKKYSIGLDIGTNSVGWAVITDEYKVPSKKFKVLGNTDRHSIKKNLIGALLFDSGETAEATRLKRTARRRYTRRKNRICYLQEIFSNEMAKVDDSFFHRLEESFLVEEDKKHERHPIFGNIVDEVAYHEKYPTIYHLRKKLVDSTDKADLRLIYLALAHMIKFRGHFLIEGDLNPDNSDVDKLFIQLVQTYNQLFEENPINASGVDAKAILSARLSKSRRLENLIAQLPGEKKNGLFGNLIALSLGLTPNFKSNFDLAEDAKLQLSKDTYDDDLDNLLAQIGDQYADLFLAAKNLSDAILLSDILRVNTEITKAPLSASMIKRYDEHHQDLTLLKALVRQQLPEKYKEIFFDQSKNGYAGYIDGGASQEEFYKFIKPILEKMDGTEELLVKLNREDLLRKQRTFDNGSIPHQIHLGELHAILRRQEDFYPFLKDNREKIEKILTFRIPYYVGPLARGNSRFAWMTRKSEETITPWNFEEVVDKGASAQSFIERMTNFDKNLPNEKVLPKHSLLYEYFTVYNELTKVKYVTEGMRKPAFLSGEQKKAIVDLLFKTNRKVTVKQLKEDYFKKIECFDSVEISGVEDRFNASLGTYHDLLKIIKDKDFLDNEENEDILEDIVLTLTLFEDREMIEERLKTYAHLFDDKVMKQLKRRRYTGWGRLSRKLINGIRDKQSGKTILDFLKSDGFANRNFMQLIHDDSLTFKEDIQKAQVSGQGDSLHEHIANLAGSPAIKKGILQTVKVVDELVKVMGRHKPENIVIEMARENQTTQKGQKNSRERMKRIEEGIKELGSQILKEHPVENTQLQNEKLYLYYLQNGRDMYVDQELDINRLSDYDVDHIVPQSFLKDDSIDNKVLTRSDKARGKSDNVPSEEVVKKMKNYWRQLLNAKLITQRKFDNLTKAERGGLSELDKAGFIKRQLVETRQITKHVAQILDSRMNTKYDENDKLIREVKVITLKSKLVSDFRKDFQFYKVREINNYHHAHDAYLNAVVGTALIKKYPKLESEFVYGDYKVYDVRKMIAKSEQEIGKATAKYFFYSNIMNFFKTEITLANGEIRKRPLIETNGETGEIVWDKGRDFATVRKVLSMPQVNIVKKTEVQTGGFSKESILPKRNSDKLIARKKDWDPKKYGGFDSPTVAYSVLVVAKVEKGKSKKLKSVKELLGITIMERSSFEKNPIDFLEAKGYKEVKKDLIIKLPKYSLFELENGRKRMLASAGELQKGNELALPSKYVNFLYLASHYEKLKGSPEDNEQKQLFVEQHKHYLDEIIEQISEFSKRVILADANLDKVLSAYNKHRDKPIREQAENIIHLFTLTNLGAPAAFKYFDTTIDRKRYTSTKEVLDATLIHQSITGLYETRIDLSQLGGDGGGSSGGGPAPGGGRDIMKDIKVRLMTDSPDDSQDLMIGAIESNLFADQISWKSDQPVWLNQWPLKQEKLQALQQLVTEQLQLGHLEESNSPWNTPVFVIKKKSGKWRLLQDLRAVNATMHDMGALQPGLPSPVAVPKGWEIIIIDLQDCFFNIKLHPEDCKRFAFSVPSPNFKRPYQRFQWKVLPQGMKNSPTLCQKFVDKAILTVRDKYQDSYIVHYMDDILLAHPSRSIVDEILTSMIQALNKHGLVVSTEKIQKYDNLKYLGTHIQGDSVSYQKLQIRTDKLRTLNDFQKLLGNINWIRPFLKLTTGELKPLFEILNGDSNPISTRKLTPEACKALQLMNERLSTARVKRLDLSQPWSLCILKTEYTPTACLWQDGVVEWIHLPHISPKVITPYDIFCTQLIIKGRHRSKELFSKDPDYIVVPYTKVQFDLLLQEKEDWPISLLGFLGEVHFHLPKDPLLTFTLQTAIIFPHMTSTTPLEKGIVIFTDGSANGRSVTYIQGREPIIKENTQNTAQQAEIVAVITAFEEVSQPFNLYTDSKYVTGLFPEIETATLSPRTKIYTELKHLQRLIHKRQEKFYIGHIRGHTGLPGPLAQGNAYADSLTRILTAGKRTADGSEFEKRTADGSEFESPKKKAKVE

SEQ ID NO: 3205 - protein, 2022 aa, synthetic construct
MPAAKRVKLDGGDKKYSIGLDIGTNSVGWAVITDEYKVPSKKFKVLGNTDRHSIKKNLIGALLFDSGETAEATRLKRTARRRYTRRKNRICYLQEIFSNEMAKVDDSFFHRLEESFLVEEDKKHERHPIFGNIVDEVAYHEKYPTIYHLRKKLVDSTDKADLRLIYLALAHMIKFRGHFLIEGDLNPDNSDVDKLFIQLVQTYNQLFEENPINASGVDAKAILSARLSKSRRLENLIAQLPGEKKNGLFGNLIALSLGLTPNFKSNFDLAEDAKLQLSKDTYDDDLDNLLAQIGDQYADLFLAAKNLSDAILLSDILRVNTEITKAPLSASMIKRYDEHHQDLTLLKALVRQQLPEKYKEIFFDQSKNGYAGYIDGGASQEEFYKFIKPILEKMDGTEELLVKLNREDLLRKQRTFDNGSIPHQIHLGELHAILRRQEDFYPFLKDNREKIEKILTFRIPYYVGPLARGNSRFAWMTRKSEETITPWNFEEVVDKGASAQSFIERMTNFDKNLPNEKVLPKHSLLYEYFTVYNELTKVKYVTEGMRKPAFLSGEQKKAIVDLLFKTNRKVTVKQLKEDYFKKIECFDSVEISGVEDRFNASLGTYHDLLKIIKDKDFLDNEENEDILEDIVLTLTLFEDREMIEERLKTYAHLFDDKVMKQLKRRRYTGWGRLSRKLINGIRDKQSGKTILDFLKSDGFANRNFMQLIHDDSLTFKEDIQKAQVSGQGDSLHEHIANLAGSPAIKKGILQTVKVVDELVKVMGRHKPENIVIEMARENQTTQKGQKNSRERMKRIEEGIKELGSQILKEHPVENTQLQNEKLYLYYLQNGRDMYVDQELDINRLSDYDVDHIVPQSFLKDDSIDNKVLTRSDKARGKSDNVPSEEVVKKMKNYWRQLLNAKLITQRKFDNLTKAERGGLSELDKAGFIKRQLVETRQITKHVAQILDSRMNTKYDENDKLIREVKVITLKSKLVSDFRKDFQFYKVREINNYHHAHDAYLNAVVGTALIKKYPKLESEFVYGDYKVYDVRKMIAKSEQEIGKATAKYFFYSNIMNFFKTEITLANGEIRKRPLIETNGETGEIVWDKGRDFATVRKVLSMPQVNIVKKTEVQTGGFSKESILPKRNSDKLIARKKDWDPKKYGGFDSPTVAYSVLVVAKVEKGKSKKLKSVKELLGITIMERSSFEKNPIDFLEAKGYKEVKKDLIIKLPKYSLFELENGRKRMLASAGELQKGNELALPSKYVNFLYLASHYEKLKGSPEDNEQKQLFVEQHKHYLDEIIEQISEFSKRVILADANLDKVLSAYNKHRDKPIREQAENIIHLFTLTNLGAPAAFKYFDTTIDRKRYTSTKEVLDATLIHQSITGLYETRIDLSQLGGDGGGSSGGSGGGGGGRDIMKDIKVRLMTDSPDDSQDLMIGAIESNLFADQISWKSDQPVWLNQWPLKQEKLQALQQLVTEQLQLGHLEESNSPWNTPVFVIKKKSGKWRLLQDLRAVNATMHDMGALQPGLPSPVAVPKGWEIIIIDLQDCFFNIKLHPEDCKRFAFSVPSPNFKRPYQRFQWKVLPQGMKNSPTLCQKFVDKAILTVRDKYQDSYIVHYMDDILLAHPSRSIVDEILTSMIQALNKHGLVVSTEKIQKYDNLKYLGTHIQGDSVSYQKLQIRTDKLRTLNDFQKLLGNINWIRPFLKLTTGELKPLFEILNGDSNPISTRKLTPEACKALQLMNERLSTARVKRLDLSQPWSLCILKTEYTPTACLWQDGVVEWIHLPHISPKVITPYDIFCTQLIIKGRHRSKELFSKDPDYIVVPYTKVQFDLLLQEKEDWPISLLGFLGEVHFHLPKDPLLTFTLQTAIIFPHMTSTTPLEKGIVIFTDGSANGRSVTYIQGREPIIKENTQNTAQQAEIVAVITAFEEVSQPFNLYTDSKYVTGLFPEIETATLSPRTKIYTELKHLQRLIHKRQEKFYIGHIRGHTGLPGPLAQGNAYADSLTRILTAGKRTADGSEFEKRTADGSEFESPKKKAKVE

SEQ ID NO: 3206 - protein, 2021 aa, synthetic construct
MPAAKRVKLDGGDKKYSIGLDIGTNSVGWAVITDEYKVPSKKFKVLGNTDRHSIKKNLIGALLFDSGETAEATRLKRTARRRYTRRKNRICYLQEIFSNEMAKVDDSFFHRLEESFLVEEDKKHERHPIFGNIVDEVAYHEKYPTIYHLRKKLVDSTDKADLRLIYLALAHMIKFRGHFLIEGDLNPDNSDVDKLFIQLVQTYNQLFEENPINASGVDAKAILSARLSKSRRLENLIAQLPGEKKNGLFGNLIALSLGLTPNFKSNFDLAEDAKLQLSKDTYDDDLDNLLAQIGDQYADLFLAAKNLSDAILLSDILRVNTEITKAPLSASMIKRYDEHHQDLTLLKALVRQQLPEKYKEIFFDQSKNGYAGYIDGGASQEEFYKFIKPILEKMDGTEELLVKLNREDLLRKQRTFDNGSIPHQIHLGELHAILRRQEDFYPFLKDNREKIEKILTFRIPYYVGPLARGNSRFAWMTRKSEETITPWNFEEVVDKGASAQSFIERMTNFDKNLPNEKVLPKHSLLYEYFTVYNELTKVKYVTEGMRKPAFLSGEQKKAIVDLLFKTNRKVTVKQLKEDYFKKIECFDSVEISGVEDRFNASLGTYHDLLKIIKDKDFLDNEENEDILEDIVLTLTLFEDREMIEERLKTYAHLFDDKVMKQLKRRRYTGWGRLSRKLINGIRDKQSGKTILDFLKSDGFANRNFMQLIHDDSLTFKEDIQKAQVSGQGDSLHEHIANLAGSPAIKKGILQTVKVVDELVKVMGRHKPENIVIEMARENQTTQKGQKNSRERMKRIEEGIKELGSQILKEHPVENTQLQNEKLYLYYLQNGRDMYVDQELDINRLSDYDVDHIVPQSFLKDDSIDNKVLTRSDKARGKSDNVPSEEVVKKMKNYWRQLLNAKLITQRKFDNLTKAERGGLSELDKAGFIKRQLVETRQITKHVAQILDSRMNTKYDENDKLIREVKVITLKSKLVSDFRKDFQFYKVREINNYHHAHDAYLNAVVGTALIKKYPKLESEFVYGDYKVYDVRKMIAKSEQEIGKATAKYFFYSNIMNFFKTEITLANGEIRKRPLIETNGETGEIVWDKGRDFATVRKVLSMPQVNIVKKTEVQTGGFSKESILPKRNSDKLIARKKDWDPKKYGGFDSPTVAYSVLVVAKVEKGKSKKLKSVKELLGITIMERSSFEKNPIDFLEAKGYKEVKKDLIIKLPKYSLFELENGRKRMLASAGELQKGNELALPSKYVNFLYLASHYEKLKGSPEDNEQKQLFVEQHKHYLDEIIEQISEFSKRVILADANLDKVLSAYNKHRDKPIREQAENIIHLFTLTNLGAPAAFKYFDTTIDRKRYTSTKEVLDATLIHQSITGLYETRIDLSQLGGDGGEAAAKGGSGGGRDIMKDIKVRLMTDSPDDSQDLMIGAIESNLFADQISWKSDQPVWLNQWPLKQEKLQALQQLVTEQLQLGHLEESNSPWNTPVFVIKKKSGKWRLLQDLRAVNATMHDMGALQPGLPSPVAVPKGWEIIIIDLQDCFFNIKLHPEDCKRFAFSVPSPNFKRPYQRFQWKVLPQGMKNSPTLCQKFVDKAILTVRDKYQDSYIVHYMDDILLAHPSRSIVDEILTSMIQALNKHGLVVSTEKIQKYDNLKYLGTHIQGDSVSYQKLQIRTDKLRTLNDFQKLLGNINWIRPFLKLTTGELKPLFEILNGDSNPISTRKLTPEACKALQLMNERLSTARVKRLDLSQPWSLCILKTEYTPTACLWQDGVVEWIHLPHISPKVITPYDIFCTQLIIKGRHRSKELFSKDPDYIVVPYTKVQFDLLLQEKEDWPISLLGFLGEVHFHLPKDPLLTFTLQTAIIFPHMTSTTPLEKGIVIFTDGSANGRSVTYIQGREPIIKENTQNTAQQAEIVAVITAFEEVSQPFNLYTDSKYVTGLFPEIETATLSPRTKIYTELKHLQRLIHKRQEKFYIGHIRGHTGLPGPLAQGNAYADSLTRILTAGKRTADGSEFEKRTADGSEFESPKKKAKVE

SEQ ID NO: 3207 - protein, 2024 aa, synthetic construct
MPAAKRVKLDGGDKKYSIGLDIGTNSVGWAVITDEYKVPSKKFKVLGNTDRHSIKKNLIGALLFDSGETAEATRLKRTARRRYTRRKNRICYLQEIFSNEMAKVDDSFFHRLEESFLVEEDKKHERHPIFGNIVDEVAYHEKYPTIYHLRKKLVDSTDKADLRLIYLALAHMIKFRGHFLIEGDLNPDNSDVDKLFIQLVQTYNQLFEENPINASGVDAKAILSARLSKSRRLENLIAQLPGEKKNGLFGNLIALSLGLTPNFKSNFDLAEDAKLQLSKDTYDDDLDNLLAQIGDQYADLFLAAKNLSDAILLSDILRVNTEITKAPLSASMIKRYDEHHQDLTLLKALVRQQLPEKYKEIFFDQSKNGYAGYIDGGASQEEFYKFIKPILEKMDGTEELLVKLNREDLLRKQRTFDNGSIPHQIHLGELHAILRRQEDFYPFLKDNREKIEKILTFRIPYYVGPLARGNSRFAWMTRKSEETITPWNFEEVVDKGASAQSFIERMTNFDKNLPNEKVLPKHSLLYEYFTVYNELTKVKYVTEGMRKPAFLSGEQKKAIVDLLFKTNRKVTVKQLKEDYFKKIECFDSVEISGVEDRFNASLGTYHDLLKIIKDKDFLDNEENEDILEDIVLTLTLFEDREMIEERLKTYAHLFDDKVMKQLKRRRYTGWGRLSRKLINGIRDKQSGKTILDFLKSDGFANRNFMQLIHDDSLTFKEDIQKAQVSGQGDSLHEHIANLAGSPAIKKGILQTVKVVDELVKVMGRHKPENIVIEMARENQTTQKGQKNSRERMKRIEEGIKELGSQILKEHPVENTQLQNEKLYLYYLQNGRDMYVDQELDINRLSDYDVDHIVPQSFLKDDSIDNKVLTRSDKARGKSDNVPSEEVVKKMKNYWRQLLNAKLITQRKFDNLTKAERGGLSELDKAGFIKRQLVETRQITKHVAQILDSRMNTKYDENDKLIREVKVITLKSKLVSDFRKDFQFYKVREINNYHHAHDAYLNAVVGTALIKKYPKLESEFVYGDYKVYDVRKMIAKSEQEIGKATAKYFFYSNIMNFFKTEITLANGEIRKRPLIETNGETGEIVWDKGRDFATVRKVLSMPQVNIVKKTEVQTGGFSKESILPKRNSDKLIARKKDWDPKKYGGFDSPTVAYSVLVVAKVEKGKSKKLKSVKELLGITIMERSSFEKNPIDFLEAKGYKEVKKDLIIKLPKYSLFELENGRKRMLASAGELQKGNELALPSKYVNFLYLASHYEKLKGSPEDNEQKQLFVEQHKHYLDEIIEQISEFSKRVILADANLDKVLSAYNKHRDKPIREQAENIIHLFTLTNLGAPAAFKYFDTTIDRKRYTSTKEVLDATLIHQSITGLYETRIDLSQLGGDGGGSSEAAAKPAPGGGRDIMKDIKVRLMTDSPDDSQDLMIGAIESNLFADQISWKSDQPVWLNQWPLKQEKLQALQQLVTEQLQLGHLEESNSPWNTPVFVIKKKSGKWRLLQDLRAVNATMHDMGALQPGLPSPVAVPKGWEIIIIDLQDCFFNIKLHPEDCKRFAFSVPSPNFKRPYQRFQWKVLPQGMKNSPTLCQKFVDKAILTVRDKYQDSYIVHYMDDILLAHPSRSIVDEILTSMIQALNKHGLVVSTEKIQKYDNLKYLGTHIQGDSVSYQKLQIRTDKLRTLNDFQKLLGNINWIRPFLKLTTGELKPLFEILNGDSNPISTRKLTPEACKALQLMNERLSTARVKRLDLSQPWSLCILKTEYTPTACLWQDGVVEWIHLPHISPKVITPYDIFCTQLIIKGRHRSKELFSKDPDYIVVPYTKVQFDLLLQEKEDWPISLLGFLGEVHFHLPKDPLLTFTLQTAIIFPHMTSTTPLEKGIVIFTDGSANGRSVTYIQGREPIIKENTQNTAQQAEIVAVITAFEEVSQPFNLYTDSKYVTGLFPEIETATLSPRTKIYTELKHLQRLIHKRQEKFYIGHIRGHTGLPGPLAQGNAYADSLTRILTAGKRTADGSEFEKRTADGSEFESPKKKAKVE

SEQ ID NO: 3208 - protein, 2021 aa, synthetic construct
MPAAKRVKLDGGDKKYSIGLDIGTNSVGWAVITDEYKVPSKKFKVLGNTDRHSIKKNLIGALLFDSGETAEATRLKRTARRRYTRRKNRICYLQEIFSNEMAKVDDSFFHRLEESFLVEEDKKHERHPIFGNIVDEVAYHEKYPTIYHLRKKLVDSTDKADLRLIYLALAHMIKFRGHFLIEGDLNPDNSDVDKLFIQLVQTYNQLFEENPINASGVDAKAILSARLSKSRRLENLIAQLPGEKKNGLFGNLIALSLGLTPNFKSNFDLAEDAKLQLSKDTYDDDLDNLLAQIGDQYADLFLAAKNLSDAILLSDILRVNTEITKAPLSASMIKRYDEHHQDLTLLKALVRQQLPEKYKEIFFDQSKNGYAGYIDGGASQEEFYKFIKPILEKMDGTEELLVKLNREDLLRKQRTFDNGSIPHQIHLGELHAILRRQEDFYPFLKDNREKIEKILTFRIPYYVGPLARGNSRFAWMTRKSEETITPWNFEEVVDKGASAQSFIERMTNFDKNLPNEKVLPKHSLLYEYFTVYNELTKVKYVTEGMRKPAFLSGEQKKAIVDLLFKTNRKVTVKQLKEDYFKKIECFDSVEISGVEDRFNASLGTYHDLLKIIKDKDFLDNEENEDILEDIVLTLTLFEDREMIEERLKTYAHLFDDKVMKQLKRRRYTGWGRLSRKLINGIRDKQSGKTILDFLKSDGFANRNFMQLIHDDSLTFKEDIQKAQVSGQGDSLHEHIANLAGSPAIKKGILQTVKVVDELVKVMGRHKPENIVIEMARENQTTQKGQKNSRERMKRIEEGIKELGSQILKEHPVENTQLQNEKLYLYYLQNGRDMYVDQELDINRLSDYDVDHIVPQSFLKDDSIDNKVLTRSDKARGKSDNVPSEEVVKKMKNYWRQLLNAKLITQRKFDNLTKAERGGLSELDKAGFIKRQLVETRQITKHVAQILDSRMNTKYDENDKLIREVKVITLKSKLVSDFRKDFQFYKVREINNYHHAHDAYLNAVVGTALIKKYPKLESEFVYGDYKVYDVRKMIAKSEQEIGKATAKYFFYSNIMNFFKTEITLANGEIRKRPLIETNGETGEIVWDKGRDFATVRKVLSMPQVNIVKKTEVQTGGFSKESILPKRNSDKLIARKKDWDPKKYGGFDSPTVAYSVLVVAKVEKGKSKKLKSVKELLGITIMERSSFEKNPIDFLEAKGYKEVKKDLIIKLPKYSLFELENGRKRMLASAGELQKGNELALPSKYVNFLYLASHYEKLKGSPEDNEQKQLFVEQHKHYLDEIIEQISEFSKRVILADANLDKVLSAYNKHRDKPIREQAENIIHLFTLTNLGAPAAFKYFDTTIDRKRYTSTKEVLDATLIHQSITGLYETRIDLSQLGGDGGGGGEAAAKGGGRDIMKDIKVRLMTDSPDDSQDLMIGAIESNLFADQISWKSDQPVWLNQWPLKQEKLQALQQLVTEQLQLGHLEESNSPWNTPVFVIKKKSGKWRLLQDLRAVNATMHDMGALQPGLPSPVAVPKGWEIIIIDLQDCFFNIKLHPEDCKRFAFSVPSPNFKRPYQRFQWKVLPQGMKNSPTLCQKFVDKAILTVRDKYQDSYIVHYMDDILLAHPSRSIVDEILTSMIQALNKHGLVVSTEKIQKYDNLKYLGTHIQGDSVSYQKLQIRTDKLRTLNDFQKLLGNINWIRPFLKLTTGELKPLFEILNGDSNPISTRKLTPEACKALQLMNERLSTARVKRLDLSQPWSLCILKTEYTPTACLWQDGVVEWIHLPHISPKVITPYDIFCTQLIIKGRHRSKELFSKDPDYIVVPYTKVQFDLLLQEKEDWPISLLGFLGEVHFHLPKDPLLTFTLQTAIIFPHMTSTTPLEKGIVIFTDGSANGRSVTYIQGREPIIKENTQNTAQQAEIVAVITAFEEVSQPFNLYTDSKYVTGLFPEIETATLSPRTKIYTELKHLQRLIHKRQEKFYIGHIRGHTGLPGPLAQGNAYADSLTRILTAGKRTADGSEFEKRTADGSEFESPKKKAKVE

SEQ ID NO: 3209 - protein, 2022 aa, synthetic construct
MPAAKRVKLDGGDKKYSIGLDIGTNSVGWAVITDEYKVPSKKFKVLGNTDRHSIKKNLIGALLFDSGETAEATRLKRTARRRYTRRKNRICYLQEIFSNEMAKVDDSFFHRLEESFLVEEDKKHERHPIFGNIVDEVAYHEKYPTIYHLRKKLVDSTDKADLRLIYLALAHMIKFRGHFLIEGDLNPDNSDVDKLFIQLVQTYNQLFEENPINASGVDAKAILSARLSKSRRLENLIAQLPGEKKNGLFGNLIALSLGLTPNFKSNFDLAEDAKLQLSKDTYDDDLDNLLAQIGDQYADLFLAAKNLSDAILLSDILRVNTEITKAPLSASMIKRYDEHHQDLTLLKALVRQQLPEKYKEIFFDQSKNGYAGYIDGGASQEEFYKFIKPILEKMDGTEELLVKLNREDLLRKQRTFDNGSIPHQIHLGELHAILRRQEDFYPFLKDNREKIEKILTFRIPYYVGPLARGNSRFAWMTRKSEETITPWNFEEVVDKGASAQSFIERMTNFDKNLPNEKVLPKHSLLYEYFTVYNELTKVKYVTEGMRKPAFLSGEQKKAIVDLLFKTNRKVTVKQLKEDYFKKIECFDSVEISGVEDRFNASLGTYHDLLKIIKDKDFLDNEENEDILEDIVLTLTLFEDREMIEERLKTYAHLFDDKVMKQLKRRRYTGWGRLSRKLINGIRDKQSGKTILDFLKSDGFANRNFMQLIHDDSLTFKEDIQKAQVSGQGDSLHEHIANLAGSPAIKKGILQTVKVVDELVKVMGRHKPENIVIEMARENQTTQKGQKNSRERMKRIEEGIKELGSQILKEHPVENTQLQNEKLYLYYLQNGRDMYVDQELDINRLSDYDVDHIVPQSFLKDDSIDNKVLTRSDKARGKSDNVPSEEVVKKMKNYWRQLLNAKLITQRKFDNLTKAERGGLSELDKAGFIKRQLVETRQITKHVAQILDSRMNTKYDENDKLIREVKVITLKSKLVSDFRKDFQFYKVREINNYHHAHDAYLNAVVGTALIKKYPKLESEFVYGDYKVYDVRKMIAKSEQEIGKATAKYFFYSNIMNFFKTEITLANGEIRKRPLIETNGETGEIVWDKGRDFATVRKVLSMPQVNIVKKTEVQTGGFSKESILPKRNSDKLIARKKDWDPKKYGGFDSPTVAYSVLVVAKVEKGKSKKLKSVKELLGITIMERSSFEKNPIDFLEAKGYKEVKKDLIIKLPKYSLFELENGRKRMLASAGELQKGNELALPSKYVNFLYLASHYEKLKGSPEDNEQKQLFVEQHKHYLDEIIEQISEFSKRVILADANLDKVLSAYNKHRDKPIREQAENIIHLFTLTNLGAPAAFKYFDTTIDRKRYTSTKEVLDATLIHQSITGLYETRIDLSQLGGDGGPAPGGSGSSGGGRDIMKDIKVRLMTDSPDDSQDLMIGAIESNLFADQISWKSDQPVWLNQWPLKQEKLQALQQLVTEQLQLGHLEESNSPWNTPVFVIKKKSGKWRLLQDLRAVNATMHDMGALQPGLPSPVAVPKGWEIIIIDLQDCFFNIKLHPEDCKRFAFSVPSPNFKRPYQRFQWKVLPQGMKNSPTLCQKFVDKAILTVRDKYQDSYIVHYMDDILLAHPSRSIVDEILTSMIQALNKHGLVVSTEKIQKYDNLKYLGTHIQGDSVSYQKLQIRTDKLRTLNDFQKLLGNINWIRPFLKLTTGELKPLFEILNGDSNPISTRKLTPEACKALQLMNERLSTARVKRLDLSQPWSLCILKTEYTPTACLWQDGVVEWIHLPHISPKVITPYDIFCTQLIIKGRHRSKELFSKDPDYIVVPYTKVQFDLLLQEKEDWPISLLGFLGEVHFHLPKDPLLTFTLQTAIIFPHMTSTTPLEKGIVIFTDGSANGRSVTYIQGREPIIKENTQNTAQQAEIVAVITAFEEVSQPFNLYTDSKYVTGLFPEIETATLSPRTKIYTELKHLQRLIHKRQEKFYIGHIRGHTGLPGPLAQGNAYADSLTRILTAGKRTADGSEFEKRTADGSEFESPKKKAKVE

SEQ ID NO: 3210 - protein, 2016 aa, synthetic construct
MPAAKRVKLDGGDKKYSIGLDIGTNSVGWAVITDEYKVPSKKFKVLGNTDRHSIKKNLIGALLFDSGETAEATRLKRTARRRYTRRKNRICYLQEIFSNEMAKVDDSFFHRLEESFLVEEDKKHERHPIFGNIVDEVAYHEKYPTIYHLRKKLVDSTDKADLRLIYLALAHMIKFRGHFLIEGDLNPDNSDVDKLFIQLVQTYNQLFEENPINASGVDAKAILSARLSKSRRLENLIAQLPGEKKNGLFGNLIALSLGLTPNFKSNFDLAEDAKLQLSKDTYDDDLDNLLAQIGDQYADLFLAAKNLSDAILLSDILRVNTEITKAPLSASMIKRYDEHHQDLTLLKALVRQQLPEKYKEIFFDQSKNGYAGYIDGGASQEEFYKFIKPILEKMDGTEELLVKLNREDLLRKQRTFDNGSIPHQIHLGELHAILRRQEDFYPFLKDNREKIEKILTFRIPYYVGPLARGNSRFAWMTRKSEETITPWNFEEVVDKGASAQSFIERMTNFDKNLPNEKVLPKHSLLYEYFTVYNELTKVKYVTEGMRKPAFLSGEQKKAIVDLLFKTNRKVTVKQLKEDYFKKIECFDSVEISGVEDRFNASLGTYHDLLKIIKDKDFLDNEENEDILEDIVLTLTLFEDREMIEERLKTYAHLFDDKVMKQLKRRRYTGWGRLSRKLINGIRDKQSGKTILDFLKSDGFANRNFMQLIHDDSLTFKEDIQKAQVSGQGDSLHEHIANLAGSPAIKKGILQTVKVVDELVKVMGRHKPENIVIEMARENQTTQKGQKNSRERMKRIEEGIKELGSQILKEHPVENTQLQNEKLYLYYLQNGRDMYVDQELDINRLSDYDVDHIVPQSFLKDDSIDNKVLTRSDKARGKSDNVPSEEVVKKMKNYWRQLLNAKLITQRKFDNLTKAERGGLSELDKAGFIKRQLVETRQITKHVAQILDSRMNTKYDENDKLIREVKVITLKSKLVSDFRKDFQFYKVREINNYHHAHDAYLNAVVGTALIKKYPKLESEFVYGDYKVYDVRKMIAKSEQEIGKATAKYFFYSNIMNFFKTEITLANGEIRKRPLIETNGETGEIVWDKGRDFATVRKVLSMPQVNIVKKTEVQTGGFSKESILPKRNSDKLIARKKDWDPKKYGGFDSPTVAYSVLVVAKVEKGKSKKLKSVKELLGITIMERSSFEKNPIDFLEAKGYKEVKKDLIIKLPKYSLFELENGRKRMLASAGELQKGNELALPSKYVNFLYLASHYEKLKGSPEDNEQKQLFVEQHKHYLDEIIEQISEFSKRVILADANLDKVLSAYNKHRDKPIREQAENIIHLFTLTNLGAPAAFKYFDTTIDRKRYTSTKEVLDATLIHQSITGLYETRIDLSQLGGDGGGGGGGGRDIMKDIKVRLMTDSPDDSQDLMIGAIESNLFADQISWKSDQPVWLNQWPLKQEKLQALQQLVTEQLQLGHLEESNSPWNTPVFVIKKKSGKWRLLQDLRAVNATMHDMGALQPGLPSPVAVPKGWEIIIIDLQDCFFNIKLHPEDCKRFAFSVPSPNFKRPYQRFQWKVLPQGMKNSPTLCQKFVDKAILTVRDKYQDSYIVHYMDDILLAHPSRSIVDEILTSMIQALNKHGLVVSTEKIQKYDNLKYLGTHIQGDSVSYQKLQIRTDKLRTLNDFQKLLGNINWIRPFLKLTTGELKPLFEILNGDSNPISTRKLTPEACKALQLMNERLSTARVKRLDLSQPWSLCILKTEYTPTACLWQDGVVEWIHLPHISPKVITPYDIFCTQLIIKGRHRSKELFSKDPDYIVVPYTKVQFDLLLQEKEDWPISLLGFLGEVHFHLPKDPLLTFTLQTAIIFPHMTSTTPLEKGIVIFTDGSANGRSVTYIQGREPIIKENTQNTAQQAEIVAVITAFEEVSQPFNLYTDSKYVTGLFPEIETATLSPRTKIYTELKHLQRLIHKRQEKFYIGHIRGHTGLPGPLAQGNAYADSLTRILTAGKRTADGSEFEKRTADGSEFESPKKKAKVE

SEQ ID NO: 3211 - protein, 2019 aa, synthetic construct
MPAAKRVKLDGGDKKYSIGLDIGTNSVGWAVITDEYKVPSKKFKVLGNTDRHSIKKNLIGALLFDSGETAEATRLKRTARRRYTRRKNRICYLQEIFSNEMAKVDDSFFHRLEESFLVEEDKKHERHPIFGNIVDEVAYHEKYPTIYHLRKKLVDSTDKADLRLIYLALAHMIKFRGHFLIEGDLNPDNSDVDKLFIQLVQTYNQLFEENPINASGVDAKAILSARLSKSRRLENLIAQLPGEKKNGLFGNLIALSLGLTPNFKSNFDLAEDAKLQLSKDTYDDDLDNLLAQIGDQYADLFLAAKNLSDAILLSDILRVNTEITKAPLSASMIKRYDEHHQDLTLLKALVRQQLPEKYKEIFFDQSKNGYAGYIDGGASQEEFYKFIKPILEKMDGTEELLVKLNREDLLRKQRTFDNGSIPHQIHLGELHAILRRQEDFYPFLKDNREKIEKILTFRIPYYVGPLARGNSRFAWMTRKSEETITPWNFEEVVDKGASAQSFIERMTNFDKNLPNEKVLPKHSLLYEYFTVYNELTKVKYVTEGMRKPAFLSGEQKKAIVDLLFKTNRKVTVKQLKEDYFKKIECFDSVEISGVEDRFNASLGTYHDLLKIIKDKDFLDNEENEDILEDIVLTLTLFEDREMIEERLKTYAHLFDDKVMKQLKRRRYTGWGRLSRKLINGIRDKQSGKTILDFLKSDGFANRNFMQLIHDDSLTFKEDIQKAQVSGQGDSLHEHIANLAGSPAIKKGILQTVKVVDELVKVMGRHKPENIVIEMARENQTTQKGQKNSRERMKRIEEGIKELGSQILKEHPVENTQLQNEKLYLYYLQNGRDMYVDQELDINRLSDYDVDHIVPQSFLKDDSIDNKVLTRSDKARGKSDNVPSEEVVKKMKNYWRQLLNAKLITQRKFDNLTKAERGGLSELDKAGFIKRQLVETRQITKHVAQILDSRMNTKYDENDKLIREVKVITLKSKLVSDFRKDFQFYKVREINNYHHAHDAYLNAVVGTALIKKYPKLESEFVYGDYKVYDVRKMIAKSEQEIGKATAKYFFYSNIMNFFKTEITLANGEIRKRPLIETNGETGEIVWDKGRDFATVRKVLSMPQVNIVKKTEVQTGGFSKESILPKRNSDKLIARKKDWDPKKYGGFDSPTVAYSVLVVAKVEKGKSKKLKSVKELLGITIMERSSFEKNPIDFLEAKGYKEVKKDLIIKLPKYSLFELENGRKRMLASAGELQKGNELALPSKYVNFLYLASHYEKLKGSPEDNEQKQLFVEQHKHYLDEIIEQISEFSKRVILADANLDKVLSAYNKHRDKPIREQAENIIHLFTLTNLGAPAAFKYFDTTIDRKRYTSTKEVLDATLIHQSITGLYETRIDLSQLGGDGGGSSGGGGGGRDIMKDIKVRLMTDSPDDSQDLMIGAIESNLFADQISWKSDQPVWLNQWPLKQEKLQALQQLVTEQLQLGHLEESNSPWNTPVFVIKKKSGKWRLLQDLRAVNATMHDMGALQPGLPSPVAVPKGWEIIIIDLQDCFFNIKLHPEDCKRFAFSVPSPNFKRPYQRFQWKVLPQGMKNSPTLCQKFVDKAILTVRDKYQDSYIVHYMDDILLAHPSRSIVDEILTSMIQALNKHGLVVSTEKIQKYDNLKYLGTHIQGDSVSYQKLQIRTDKLRTLNDFQKLLGNINWIRPFLKLTTGELKPLFEILNGDSNPISTRKLTPEACKALQLMNERLSTARVKRLDLSQPWSLCILKTEYTPTACLWQDGVVEWIHLPHISPKVITPYDIFCTQLIIKGRHRSKELFSKDPDYIVVPYTKVQFDLLLQEKEDWPISLLGFLGEVHFHLPKDPLLTFTLQTAIIFPHMTSTTPLEKGIVIFTDGSANGRSVTYIQGREPIIKENTQNTAQQAEIVAVITAFEEVSQPFNLYTDSKYVTGLFPEIETATLSPRTKIYTELKHLQRLIHKRQEKFYIGHIRGHTGLPGPLAQGNAYADSLTRILTAGKRTADGSEFEKRTADGSEFESPKKKAKVE

SEQ ID NO: 3212 - protein, 2020 aa, synthetic construct
MPAAKRVKLDGGDKKYSIGLDIGTNSVGWAVITDEYKVPSKKFKVLGNTDRHSIKKNLIGALLFDSGETAEATRLKRTARRRYTRRKNRICYLQEIFSNEMAKVDDSFFHRLEESFLVEEDKKHERHPIFGNIVDEVAYHEKYPTIYHLRKKLVDSTDKADLRLIYLALAHMIKFRGHFLIEGDLNPDNSDVDKLFIQLVQTYNQLFEENPINASGVDAKAILSARLSKSRRLENLIAQLPGEKKNGLFGNLIALSLGLTPNFKSNFDLAEDAKLQLSKDTYDDDLDNLLAQIGDQYADLFLAAKNLSDAILLSDILRVNTEITKAPLSASMIKRYDEHHQDLTLLKALVRQQLPEKYKEIFFDQSKNGYAGYIDGGASQEEFYKFIKPILEKMDGTEELLVKLNREDLLRKQRTFDNGSIPHQIHLGELHAILRRQEDFYPFLKDNREKIEKILTFRIPYYVGPLARGNSRFAWMTRKSEETITPWNFEEVVDKGASAQSFIERMTNFDKNLPNEKVLPKHSLLYEYFTVYNELTKVKYVTEGMRKPAFLSGEQKKAIVDLLFKTNRKVTVKQLKEDYFKKIECFDSVEISGVEDRFNASLGTYHDLLKIIKDKDFLDNEENEDILEDIVLTLTLFEDREMIEERLKTYAHLFDDKVMKQLKRRRYTGWGRLSRKLINGIRDKQSGKTILDFLKSDGFANRNFMQLIHDDSLTFKEDIQKAQVSGQGDSLHEHIANLAGSPAIKKGILQTVKVVDELVKVMGRHKPENIVIEMARENQTTQKGQKNSRERMKRIEEGIKELGSQILKEHPVENTQLQNEKLYLYYLQNGRDMYVDQELDINRLSDYDVDHIVPQSFLKDDSIDNKVLTRSDKARGKSDNVPSEEVVKKMKNYWRQLLNAKLITQRKFDNLTKAERGGLSELDKAGFIKRQLVETRQITKHVAQILDSRMNTKYDENDKLIREVKVITLKSKLVSDFRKDFQFYKVREINNYHHAHDAYLNAVVGTALIKKYPKLESEFVYGDYKVYDVRKMIAKSEQEIGKATAKYFFYSNIMNFFKTEITLANGEIRKRPLIETNGETGEIVWDKGRDFATVRKVLSMPQVNIVKKTEVQTGGFSKESILPKRNSDKLIARKKDWDPKKYGGFDSPTVAYSVLVVAKVEKGKSKKLKSVKELLGITIMERSSFEKNPIDFLEAKGYKEVKKDLIIKLPKYSLFELENGRKRMLASAGELQKGNELALPSKYVNFLYLASHYEKLKGSPEDNEQKQLFVEQHKHYLDEIIEQISEFSKRVILADANLDKVLSAYNKHRDKPIREQAENIIHLFTLTNLGAPAAFKYFDTTIDRKRYTSTKEVLDATLIHQSITGLYETRIDLSQLGGDGGGGGGGGGGGGRDIMKDIKVRLMTDSPDDSQDLMIGAIESNLFADQISWKSDQPVWLNQWPLKQEKLQALQQLVTEQLQLGHLEESNSPWNTPVFVIKKKSGKWRLLQDLRAVNATMHDMGALQPGLPSPVAVPKGWEIIIIDLQDCFFNIKLHPEDCKRFAFSVPSPNFKRPYQRFQWKVLPQGMKNSPTLCQKFVDKAILTVRDKYQDSYIVHYMDDILLAHPSRSIVDEILTSMIQALNKHGLVVSTEKIQKYDNLKYLGTHIQGDSVSYQKLQIRTDKLRTLNDFQKLLGNINWIRPFLKLTTGELKPLFEILNGDSNPISTRKLTPEACKALQLMNERLSTARVKRLDLSQPWSLCILKTEYTPTACLWQDGVVEWIHLPHISPKVITPYDIFCTQLIIKGRHRSKELFSKDPDYIVVPYTKVQFDLLLQEKEDWPISLLGFLGEVHFHLPKDPLLTFTLQTAIIFPHMTSTTPLEKGIVIFTDGSANGRSVTYIQGREPIIKENTQNTAQQAEIVAVITAFEEVSQPFNLYTDSKYVTGLFPEIETATLSPRTKIYTELKHLQRLIHKRQEKFYIGHIRGHTGLPGPLAQGNAYADSLTRILTAGKRTADGSEFEKRTADGSEFESPKKKAKVE

SEQ ID NO: 3213 - protein, 2024 aa, synthetic construct
MPAAKRVKLDGGDKKYSIGLDIGTNSVGWAVITDEYKVPSKKFKVLGNTDRHSIKKNLIGALLFDSGETAEATRLKRTARRRYTRRKNRICYLQEIFSNEMAKVDDSFFHRLEESFLVEEDKKHERHPIFGNIVDEVAYHEKYPTIYHLRKKLVDSTDKADLRLIYLALAHMIKFRGHFLIEGDLNPDNSDVDKLFIQLVQTYNQLFEENPINASGVDAKAILSARLSKSRRLENLIAQLPGEKKNGLFGNLIALSLGLTPNFKSNFDLAEDAKLQLSKDTYDDDLDNLLAQIGDQYADLFLAAKNLSDAILLSDILRVNTEITKAPLSASMIKRYDEHHQDLTLLKALVRQQLPEKYKEIFFDQSKNGYAGYIDGGASQEEFYKFIKPILEKMDGTEELLVKLNREDLLRKQRTFDNGSIPHQIHLGELHAILRRQEDFYPFLKDNREKIEKILTFRIPYYVGPLARGNSRFAWMTRKSEETITPWNFEEVVDKGASAQSFIERMTNFDKNLPNEKVLPKHSLLYEYFTVYNELTKVKYVTEGMRKPAFLSGEQKKAIVDLLFKTNRKVTVKQLKEDYFKKIECFDSVEISGVEDRFNASLGTYHDLLKIIKDKDFLDNEENEDILEDIVLTLTLFEDREMIEERLKTYAHLFDDKVMKQLKRRRYTGWGRLSRKLINGIRDKQSGKTILDFLKSDGFANRNFMQLIHDDSLTFKEDIQKAQVSGQGDSLHEHIANLAGSPAIKKGILQTVKVVDELVKVMGRHKPENIVIEMARENQTTQKGQKNSRERMKRIEEGIKELGSQILKEHPVENTQLQNEKLYLYYLQNGRDMYVDQELDINRLSDYDVDHIVPQSFLKDDSIDNKVLTRSDKARGKSDNVPSEEVVKKMKNYWRQLLNAKLITQRKFDNLTKAERGGLSELDKAGFIKRQLVETRQITKHVAQILDSRMNTKYDENDKLIREVKVITLKSKLVSDFRKDFQFYKVREINNYHHAHDAYLNAVVGTALIKKYPKLESEFVYGDYKVYDVRKMIAKSEQEIGKATAKYFFYSNIMNFFKTEITLANGEIRKRPLIETNGETGEIVWDKGRDFATVRKVLSMPQVNIVKKTEVQTGGFSKESILPKRNSDKLIARKKDWDPKKYGGFDSPTVAYSVLVVAKVEKGKSKKLKSVKELLGITIMERSSFEKNPIDFLEAKGYKEVKKDLIIKLPKYSLFELENGRKRMLASAGELQKGNELALPSKYVNFLYLASHYEKLKGSPEDNEQKQLFVEQHKHYLDEIIEQISEFSKRVILADANLDKVLSAYNKHRDKPIREQAENIIHLFTLTNLGAPAAFKYFDTTIDRKRYTSTKEVLDATLIHQSITGLYETRIDLSQLGGDGGGGGEAAAKPAPGGGRDIMKDIKVRLMTDSPDDSQDLMIGAIESNLFADQISWKSDQPVWLNQWPLKQEKLQALQQLVTEQLQLGHLEESNSPWNTPVFVIKKKSGKWRLLQDLRAVNATMHDMGALQPGLPSPVAVPKGWEIIIIDLQDCFFNIKLHPEDCKRFAFSVPSPNFKRPYQRFQWKVLPQGMKNSPTLCQKFVDKAILTVRDKYQDSYIVHYMDDILLAHPSRSIVDEILTSMIQALNKHGLVVSTEKIQKYDNLKYLGTHIQGDSVSYQKLQIRTDKLRTLNDFQKLLGNINWIRPFLKLTTGELKPLFEILNGDSNPISTRKLTPEACKALQLMNERLSTARVKRLDLSQPWSLCILKTEYTPTACLWQDGVVEWIHLPHISPKVITPYDIFCTQLIIKGRHRSKELFSKDPDYIVVPYTKVQFDLLLQEKEDWPISLLGFLGEVHFHLPKDPLLTFTLQTAIIFPHMTSTTPLEKGIVIFTDGSANGRSVTYIQGREPIIKENTQNTAQQAEIVAVITAFEEVSQPFNLYTDSKYVTGLFPEIETATLSPRTKIYTELKHLQRLIHKRQEKFYIGHIRGHTGLPGPLAQGNAYADSLTRILTAGKRTADGSEFEKRTADGSEFESPKKKAKVE

SEQ ID NO: 3214 - protein, 2024 aa, synthetic construct
MPAAKRVKLDGGDKKYSIGLDIGTNSVGWAVITDEYKVPSKKFKVLGNTDRHSIKKNLIGALLFDSGETAEATRLKRTARRRYTRRKNRICYLQEIFSNEMAKVDDSFFHRLEESFLVEEDKKHERHPIFGNIVDEVAYHEKYPTIYHLRKKLVDSTDKADLRLIYLALAHMIKFRGHFLIEGDLNPDNSDVDKLFIQLVQTYNQLFEENPINASGVDAKAILSARLSKSRRLENLIAQLPGEKKNGLFGNLIALSLGLTPNFKSNFDLAEDAKLQLSKDTYDDDLDNLLAQIGDQYADLFLAAKNLSDAILLSDILRVNTEITKAPLSASMIKRYDEHHQDLTLLKALVRQQLPEKYKEIFFDQSKNGYAGYIDGGASQEEFYKFIKPILEKMDGTEELLVKLNREDLLRKQRTFDNGSIPHQIHLGELHAILRRQEDFYPFLKDNREKIEKILTFRIPYYVGPLARGNSRFAWMTRKSEETITPWNFEEVVDKGASAQSFIERMTNFDKNLPNEKVLPKHSLLYEYFTVYNELTKVKYVTEGMRKPAFLSGEQKKAIVDLLFKTNRKVTVKQLKEDYFKKIECFDSVEISGVEDRFNASLGTYHDLLKIIKDKDFLDNEENEDILEDIVLTLTLFEDREMIEERLKTYAHLFDDKVMKQLKRRRYTGWGRLSRKLINGIRDKQSGKTILDFLKSDGFANRNFMQLIHDDSLTFKEDIQKAQVSGQGDSLHEHIANLAGSPAIKKGILQTVKVVDELVKVMGRHKPENIVIEMARENQTTQKGQKNSRERMKRIEEGIKELGSQILKEHPVENTQLQNEKLYLYYLQNGRDMYVDQELDINRLSDYDVDHIVPQSFLKDDSIDNKVLTRSDKARGKSDNVPSEEVVKKMKNYWRQLLNAKLITQRKFDNLTKAERGGLSELDKAGFIKRQLVETRQITKHVAQILDSRMNTKYDENDKLIREVKVITLKSKLVSDFRKDFQFYKVREINNYHHAHDAYLNAVVGTALIKKYPKLESEFVYGDYKVYDVRKMIAKSEQEIGKATAKYFFYSNIMNFFKTEITLANGEIRKRPLIETNGETGEIVWDKGRDFATVRKVLSMPQVNIVKKTEVQTGGFSKESILPKRNSDKLIARKKDWDPKKYGGFDSPTVAYSVLVVAKVEKGKSKKLKSVKELLGITIMERSSFEKNPIDFLEAKGYKEVKKDLIIKLPKYSLFELENGRKRMLASAGELQKGNELALPSKYVNFLYLASHYEKLKGSPEDNEQKQLFVEQHKHYLDEIIEQISEFSKRVILADANLDKVLSAYNKHRDKPIREQAENIIHLFTLTNLGAPAAFKYFDTTIDRKRYTSTKEVLDATLIHQSITGLYETRIDLSQLGGDGGGGGEAAAKGGSGGGRDIMKDIKVRLMTDSPDDSQDLMIGAIESNLFADQISWKSDQPVWLNQWPLKQEKLQALQQLVTEQLQLGHLEESNSPWNTPVFVIKKKSGKWRLLQDLRAVNATMHDMGALQPGLPSPVAVPKGWEIIIIDLQDCFFNIKLHPEDCKRFAFSVPSPNFKRPYQRFQWKVLPQGMKNSPTLCQKFVDKAILTVRDKYQDSYIVHYMDDILLAHPSRSIVDEILTSMIQALNKHGLVVSTEKIQKYDNLKYLGTHIQGDSVSYQKLQIRTDKLRTLNDFQKLLGNINWIRPFLKLTTGELKPLFEILNGDSNPISTRKLTPEACKALQLMNERLSTARVKRLDLSQPWSLCILKTEYTPTACLWQDGVVEWIHLPHISPKVITPYDIFCTQLIIKGRHRSKELFSKDPDYIVVPYTKVQFDLLLQEKEDWPISLLGFLGEVHFHLPKDPLLTFTLQTAIIFPHMTSTTPLEKGIVIFTDGSANGRSVTYIQGREPIIKENTQNTAQQAEIVAVITAFEEVSQPFNLYTDSKYVTGLFPEIETATLSPRTKIYTELKHLQRLIHKRQEKFYIGHIRGHTGLPGPLAQGNAYADSLTRILTAGKRTADGSEFEKRTADGSEFESPKKKAKVE

SEQ ID NO: 3215 - protein, 2022 aa, synthetic construct
MPAAKRVKLDGGDKKYSIGLDIGTNSVGWAVITDEYKVPSKKFKVLGNTDRHSIKKNLIGALLFDSGETAEATRLKRTARRRYTRRKNRICYLQEIFSNEMAKVDDSFFHRLEESFLVEEDKKHERHPIFGNIVDEVAYHEKYPTIYHLRKKLVDSTDKADLRLIYLALAHMIKFRGHFLIEGDLNPDNSDVDKLFIQLVQTYNQLFEENPINASGVDAKAILSARLSKSRRLENLIAQLPGEKKNGLFGNLIALSLGLTPNFKSNFDLAEDAKLQLSKDTYDDDLDNLLAQIGDQYADLFLAAKNLSDAILLSDILRVNTEITKAPLSASMIKRYDEHHQDLTLLKALVRQQLPEKYKEIFFDQSKNGYAGYIDGGASQEEFYKFIKPILEKMDGTEELLVKLNREDLLRKQRTFDNGSIPHQIHLGELHAILRRQEDFYPFLKDNREKIEKILTFRIPYYVGPLARGNSRFAWMTRKSEETITPWNFEEVVDKGASAQSFIERMTNFDKNLPNEKVLPKHSLLYEYFTVYNELTKVKYVTEGMRKPAFLSGEQKKAIVDLLFKTNRKVTVKQLKEDYFKKIECFDSVEISGVEDRFNASLGTYHDLLKIIKDKDFLDNEENEDILEDIVLTLTLFEDREMIEERLKTYAHLFDDKVMKQLKRRRYTGWGRLSRKLINGIRDKQSGKTILDFLKSDGFANRNFMQLIHDDSLTFKEDIQKAQVSGQGDSLHEHIANLAGSPAIKKGILQTVKVVDELVKVMGRHKPENIVIEMARENQTTQKGQKNSRERMKRIEEGIKELGSQILKEHPVENTQLQNEKLYLYYLQNGRDMYVDQELDINRLSDYDVDHIVPQSFLKDDSIDNKVLTRSDKARGKSDNVPSEEVVKKMKNYWRQLLNAKLITQRKFDNLTKAERGGLSELDKAGFIKRQLVETRQITKHVAQILDSRMNTKYDENDKLIREVKVITLKSKLVSDFRKDFQFYKVREINNYHHAHDAYLNAVVGTALIKKYPKLESEFVYGDYKVYDVRKMIAKSEQEIGKATAKYFFYSNIMNFFKTEITLANGEIRKRPLIETNGETGEIVWDKGRDFATVRKVLSMPQVNIVKKTEVQTGGFSKESILPKRNSDKLIARKKDWDPKKYGGFDSPTVAYSVLVVAKVEKGKSKKLKSVKELLGITIMERSSFEKNPIDFLEAKGYKEVKKDLIIKLPKYSLFELENGRKRMLASAGELQKGNELALPSKYVNFLYLASHYEKLKGSPEDNEQKQLFVEQHKHYLDEIIEQISEFSKRVILADANLDKVLSAYNKHRDKPIREQAENIIHLFTLTNLGAPAAFKYFDTTIDRKRYTSTKEVLDATLIHQSITGLYETRIDLSQLGGDGGPAPGSSGGSGGGRDIMKDIKVRLMTDSPDDSQDLMIGAIESNLFADQISWKSDQPVWLNQWPLKQEKLQALQQLVTEQLQLGHLEESNSPWNTPVFVIKKKSGKWRLLQDLRAVNATMHDMGALQPGLPSPVAVPKGWEIIIIDLQDCFFNIKLHPEDCKRFAFSVPSPNFKRPYQRFQWKVLPQGMKNSPTLCQKFVDKAILTVRDKYQDSYIVHYMDDILLAHPSRSIVDEILTSMIQALNKHGLVVSTEKIQKYDNLKYLGTHIQGDSVSYQKLQIRTDKLRTLNDFQKLLGNINWIRPFLKLTTGELKPLFEILNGDSNPISTRKLTPEACKALQLMNERLSTARVKRLDLSQPWSLCILKTEYTPTACLWQDGVVEWIHLPHISPKVITPYDIFCTQLIIKGRHRSKELFSKDPDYIVVPYTKVQFDLLLQEKEDWPISLLGFLGEVHFHLPKDPLLTFTLQTAIIFPHMTSTTPLEKGIVIFTDGSANGRSVTYIQGREPIIKENTQNTAQQAEIVAVITAFEEVSQPFNLYTDSKYVTGLFPEIETATLSPRTKIYTELKHLQRLIHKRQEKFYIGHIRGHTGLPGPLAQGNAYADSLTRILTAGKRTADGSEFEKRTADGSEFESPKKKAKVE

SEQ ID NO: 3216 - protein, 2043 aa, synthetic construct
MPAAKRVKLDGGDKKYSIGLDIGTNSVGWAVITDEYKVPSKKFKVLGNTDRHSIKKNLIGALLFDSGETAEATRLKRTARRRYTRRKNRICYLQEIFSNEMAKVDDSFFHRLEESFLVEEDKKHERHPIFGNIVDEVAYHEKYPTIYHLRKKLVDSTDKADLRLIYLALAHMIKFRGHFLIEGDLNPDNSDVDKLFIQLVQTYNQLFEENPINASGVDAKAILSARLSKSRRLENLIAQLPGEKKNGLFGNLIALSLGLTPNFKSNFDLAEDAKLQLSKDTYDDDLDNLLAQIGDQYADLFLAAKNLSDAILLSDILRVNTEITKAPLSASMIKRYDEHHQDLTLLKALVRQQLPEKYKEIFFDQSKNGYAGYIDGGASQEEFYKFIKPILEKMDGTEELLVKLNREDLLRKQRTFDNGSIPHQIHLGELHAILRRQEDFYPFLKDNREKIEKILTFRIPYYVGPLARGNSRFAWMTRKSEETITPWNFEEVVDKGASAQSFIERMTNFDKNLPNEKVLPKHSLLYEYFTVYNELTKVKYVTEGMRKPAFLSGEQKKAIVDLLFKTNRKVTVKQLKEDYFKKIECFDSVEISGVEDRFNASLGTYHDLLKIIKDKDFLDNEENEDILEDIVLTLTLFEDREMIEERLKTYAHLFDDKVMKQLKRRRYTGWGRLSRKLINGIRDKQSGKTILDFLKSDGFANRNFMQLIHDDSLTFKEDIQKAQVSGQGDSLHEHIANLAGSPAIKKGILQTVKVVDELVKVMGRHKPENIVIEMARENQTTQKGQKNSRERMKRIEEGIKELGSQILKEHPVENTQLQNEKLYLYYLQNGRDMYVDQELDINRLSDYDVDHIVPQSFLKDDSIDNKVLTRSDKARGKSDNVPSEEVVKKMKNYWRQLLNAKLITQRKFDNLTKAERGGLSELDKAGFIKRQLVETRQITKHVAQILDSRMNTKYDENDKLIREVKVITLKSKLVSDFRKDFQFYKVREINNYHHAHDAYLNAVVGTALIKKYPKLESEFVYGDYKVYDVRKMIAKSEQEIGKATAKYFFYSNIMNFFKTEITLANGEIRKRPLIETNGETGEIVWDKGRDFATVRKVLSMPQVNIVKKTEVQTGGFSKESILPKRNSDKLIARKKDWDPKKYGGFDSPTVAYSVLVVAKVEKGKSKKLKSVKELLGITIMERSSFEKNPIDFLEAKGYKEVKKDLIIKLPKYSLFELENGRKRMLASAGELQKGNELALPSKYVNFLYLASHYEKLKGSPEDNEQKQLFVEQHKHYLDEIIEQISEFSKRVILADANLDKVLSAYNKHRDKPIREQAENIIHLFTLTNLGAPAAFKYFDTTIDRKRYTSTKEVLDATLIHQSITGLYETRIDLSQLGGDGGGGGGSGGGGSGGGGSGGGGSGGGGSGGGGSGGGRDIMKDIKVRLMTDSPDDSQDLMIGAIESNLFADQISWKSDQPVWLNQWPLKQEKLQALQQLVTEQLQLGHLEESNSPWNTPVFVIKKKSGKWRLLQDLRAVNATMHDMGALQPGLPSPVAVPKGWEIIIIDLQDCFFNIKLHPEDCKRFAFSVPSPNFKRPYQRFQWKVLPQGMKNSPTLCQKFVDKAILTVRDKYQDSYIVHYMDDILLAHPSRSIVDEILTSMIQALNKHGLVVSTEKIQKYDNLKYLGTHIQGDSVSYQKLQIRTDKLRTLNDFQKLLGNINWIRPFLKLTTGELKPLFEILNGDSNPISTRKLTPEACKALQLMNERLSTARVKRLDLSQPWSLCILKTEYTPTACLWQDGVVEWIHLPHISPKVITPYDIFCTQLIIKGRHRSKELFSKDPDYIVVPYTKVQFDLLLQEKEDWPISLLGFLGEVHFHLPKDPLLTFTLQTAIIFPHMTSTTPLEKGIVIFTDGSANGRSVTYIQGREPIIKENTQNTAQQAEIVAVITAFEEVSQPFNLYTDSKYVTGLFPEIETATLSPRTKIYTELKHLQRLIHKRQEKFYIGHIRGHTGLPGPLAQGNAYADSLTRILTAGKRTADGSEFEKRTADGSEFESPKKKAKVE

SEQ ID NO: 3217 - protein, 2021 aa, synthetic construct
MPAAKRVKLDGGDKKYSIGLDIGTNSVGWAVITDEYKVPSKKFKVLGNTDRHSIKKNLIGALLFDSGETAEATRLKRTARRRYTRRKNRICYLQEIFSNEMAKVDDSFFHRLEESFLVEEDKKHERHPIFGNIVDEVAYHEKYPTIYHLRKKLVDSTDKADLRLIYLALAHMIKFRGHFLIEGDLNPDNSDVDKLFIQLVQTYNQLFEENPINASGVDAKAILSARLSKSRRLENLIAQLPGEKKNGLFGNLIALSLGLTPNFKSNFDLAEDAKLQLSKDTYDDDLDNLLAQIGDQYADLFLAAKNLSDAILLSDILRVNTEITKAPLSASMIKRYDEHHQDLTLLKALVRQQLPEKYKEIFFDQSKNGYAGYIDGGASQEEFYKFIKPILEKMDGTEELLVKLNREDLLRKQRTFDNGSIPHQIHLGELHAILRRQEDFYPFLKDNREKIEKILTFRIPYYVGPLARGNSRFAWMTRKSEETITPWNFEEVVDKGASAQSFIERMTNFDKNLPNEKVLPKHSLLYEYFTVYNELTKVKYVTEGMRKPAFLSGEQKKAIVDLLFKTNRKVTVKQLKEDYFKKIECFDSVEISGVEDRFNASLGTYHDLLKIIKDKDFLDNEENEDILEDIVLTLTLFEDREMIEERLKTYAHLFDDKVMKQLKRRRYTGWGRLSRKLINGIRDKQSGKTILDFLKSDGFANRNFMQLIHDDSLTFKEDIQKAQVSGQGDSLHEHIANLAGSPAIKKGILQTVKVVDELVKVMGRHKPENIVIEMARENQTTQKGQKNSRERMKRIEEGIKELGSQILKEHPVENTQLQNEKLYLYYLQNGRDMYVDQELDINRLSDYDVDHIVPQSFLKDDSIDNKVLTRSDKARGKSDNVPSEEVVKKMKNYWRQLLNAKLITQRKFDNLTKAERGGLSELDKAGFIKRQLVETRQITKHVAQILDSRMNTKYDENDKLIREVKVITLKSKLVSDFRKDFQFYKVREINNYHHAHDAYLNAVVGTALIKKYPKLESEFVYGDYKVYDVRKMIAKSEQEIGKATAKYFFYSNIMNFFKTEITLANGEIRKRPLIETNGETGEIVWDKGRDFATVRKVLSMPQVNIVKKTEVQTGGFSKESILPKRNSDKLIARKKDWDPKKYGGFDSPTVAYSVLVVAKVEKGKSKKLKSVKELLGITIMERSSFEKNPIDFLEAKGYKEVKKDLIIKLPKYSLFELENGRKRMLASAGELQKGNELALPSKYVNFLYLASHYEKLKGSPEDNEQKQLFVEQHKHYLDEIIEQISEFSKRVILADANLDKVLSAYNKHRDKPIREQAENIIHLFTLTNLGAPAAFKYFDTTIDRKRYTSTKEVLDATLIHQSITGLYETRIDLSQLGGDGGPAPEAAAKGGGRDIMKDIKVRLMTDSPDDSQDLMIGAIESNLFADQISWKSDQPVWLNQWPLKQEKLQALQQLVTEQLQLGHLEESNSPWNTPVFVIKKKSGKWRLLQDLRAVNATMHDMGALQPGLPSPVAVPKGWEIIIIDLQDCFFNIKLHPEDCKRFAFSVPSPNFKRPYQRFQWKVLPQGMKNSPTLCQKFVDKAILTVRDKYQDSYIVHYMDDILLAHPSRSIVDEILTSMIQALNKHGLVVSTEKIQKYDNLKYLGTHIQGDSVSYQKLQIRTDKLRTLNDFQKLLGNINWIRPFLKLTTGELKPLFEILNGDSNPISTRKLTPEACKALQLMNERLSTARVKRLDLSQPWSLCILKTEYTPTACLWQDGVVEWIHLPHISPKVITPYDIFCTQLIIKGRHRSKELFSKDPDYIVVPYTKVQFDLLLQEKEDWPISLLGFLGEVHFHLPKDPLLTFTLQTAIIFPHMTSTTPLEKGIVIFTDGSANGRSVTYIQGREPIIKENTQNTAQQAEIVAVITAFEEVSQPFNLYTDSKYVTGLFPEIETATLSPRTKIYTELKHLQRLIHKRQEKFYIGHIRGHTGLPGPLAQGNAYADSLTRILTAGKRTADGSEFEKRTADGSEFESPKKKAKVE

SEQ ID NO: 3218 - protein, 2018 aa, synthetic construct
MPAAKRVKLDGGDKKYSIGLDIGTNSVGWAVITDEYKVPSKKFKVLGNTDRHSIKKNLIGALLFDSGETAEATRLKRTARRRYTRRKNRICYLQEIFSNEMAKVDDSFFHRLEESFLVEEDKKHERHPIFGNIVDEVAYHEKYPTIYHLRKKLVDSTDKADLRLIYLALAHMIKFRGHFLIEGDLNPDNSDVDKLFIQLVQTYNQLFEENPINASGVDAKAILSARLSKSRRLENLIAQLPGEKKNGLFGNLIALSLGLTPNFKSNFDLAEDAKLQLSKDTYDDDLDNLLAQIGDQYADLFLAAKNLSDAILLSDILRVNTEITKAPLSASMIKRYDEHHQDLTLLKALVRQQLPEKYKEIFFDQSKNGYAGYIDGGASQEEFYKFIKPILEKMDGTEELLVKLNREDLLRKQRTFDNGSIPHQIHLGELHAILRRQEDFYPFLKDNREKIEKILTFRIPYYVGPLARGNSRFAWMTRKSEETITPWNFEEVVDKGASAQSFIERMTNFDKNLPNEKVLPKHSLLYEYFTVYNELTKVKYVTEGMRKPAFLSGEQKKAIVDLLFKTNRKVTVKQLKEDYFKKIECFDSVEISGVEDRFNASLGTYHDLLKIIKDKDFLDNEENEDILEDIVLTLTLFEDREMIEERLKTYAHLFDDKVMKQLKRRRYTGWGRLSRKLINGIRDKQSGKTILDFLKSDGFANRNFMQLIHDDSLTFKEDIQKAQVSGQGDSLHEHIANLAGSPAIKKGILQTVKVVDELVKVMGRHKPENIVIEMARENQTTQKGQKNSRERMKRIEEGIKELGSQILKEHPVENTQLQNEKLYLYYLQNGRDMYVDQELDINRLSDYDVDHIVPQSFLKDDSIDNKVLTRSDKARGKSDNVPSEEVVKKMKNYWRQLLNAKLITQRKFDNLTKAERGGLSELDKAGFIKRQLVETRQITKHVAQILDSRMNTKYDENDKLIREVKVITLKSKLVSDFRKDFQFYKVREINNYHHAHDAYLNAVVGTALIKKYPKLESEFVYGDYKVYDVRKMIAKSEQEIGKATAKYFFYSNIMNFFKTEITLANGEIRKRPLIETNGETGEIVWDKGRDFATVRKVLSMPQVNIVKKTEVQTGGFSKESILPKRNSDKLIARKKDWDPKKYGGFDSPTVAYSVLVVAKVEKGKSKKLKSVKELLGITIMERSSFEKNPIDFLEAKGYKEVKKDLIIKLPKYSLFELENGRKRMLASAGELQKGNELALPSKYVNFLYLASHYEKLKGSPEDNEQKQLFVEQHKHYLDEIIEQISEFSKRVILADANLDKVLSAYNKHRDKPIREQAENIIHLFTLTNLGAPAAFKYFDTTIDRKRYTSTKEVLDATLIHQSITGLYETRIDLSQLGGDGGPAPAPGGGRDIMKDIKVRLMTDSPDDSQDLMIGAIESNLFADQISWKSDQPVWLNQWPLKQEKLQALQQLVTEQLQLGHLEESNSPWNTPVFVIKKKSGKWRLLQDLRAVNATMHDMGALQPGLPSPVAVPKGWEIIIIDLQDCFFNIKLHPEDCKRFAFSVPSPNFKRPYQRFQWKVLPQGMKNSPTLCQKFVDKAILTVRDKYQDSYIVHYMDDILLAHPSRSIVDEILTSMIQALNKHGLVVSTEKIQKYDNLKYLGTHIQGDSVSYQKLQIRTDKLRTLNDFQKLLGNINWIRPFLKLTTGELKPLFEILNGDSNPISTRKLTPEACKALQLMNERLSTARVKRLDLSQPWSLCILKTEYTPTACLWQDGVVEWIHLPHISPKVITPYDIFCTQLIIKGRHRSKELFSKDPDYIVVPYTKVQFDLLLQEKEDWPISLLGFLGEVHFHLPKDPLLTFTLQTAIIFPHMTSTTPLEKGIVIFTDGSANGRSVTYIQGREPIIKENTQNTAQQAEIVAVITAFEEVSQPFNLYTDSKYVTGLFPEIETATLSPRTKIYTELKHLQRLIHKRQEKFYIGHIRGHTGLPGPLAQGNAYADSLTRILTAGKRTADGSEFEKRTADGSEFESPKKKAKVE

SEQ ID NO: 3219 - protein, 2025 aa, synthetic construct
MPAAKRVKLDGGDKKYSIGLDIGTNSVGWAVITDEYKVPSKKFKVLGNTDRHSIKKNLIGALLFDSGETAEATRLKRTARRRYTRRKNRICYLQEIFSNEMAKVDDSFFHRLEESFLVEEDKKHERHPIFGNIVDEVAYHEKYPTIYHLRKKLVDSTDKADLRLIYLALAHMIKFRGHFLIEGDLNPDNSDVDKLFIQLVQTYNQLFEENPINASGVDAKAILSARLSKSRRLENLIAQLPGEKKNGLFGNLIALSLGLTPNFKSNFDLAEDAKLQLSKDTYDDDLDNLLAQIGDQYADLFLAAKNLSDAILLSDILRVNTEITKAPLSASMIKRYDEHHQDLTLLKALVRQQLPEKYKEIFFDQSKNGYAGYIDGGASQEEFYKFIKPILEKMDGTEELLVKLNREDLLRKQRTFDNGSIPHQIHLGELHAILRRQEDFYPFLKDNREKIEKILTFRIPYYVGPLARGNSRFAWMTRKSEETITPWNFEEVVDKGASAQSFIERMTNFDKNLPNEKVLPKHSLLYEYFTVYNELTKVKYVTEGMRKPAFLSGEQKKAIVDLLFKTNRKVTVKQLKEDYFKKIECFDSVEISGVEDRFNASLGTYHDLLKIIKDKDFLDNEENEDILEDIVLTLTLFEDREMIEERLKTYAHLFDDKVMKQLKRRRYTGWGRLSRKLINGIRDKQSGKTILDFLKSDGFANRNFMQLIHDDSLTFKEDIQKAQVSGQGDSLHEHIANLAGSPAIKKGILQTVKVVDELVKVMGRHKPENIVIEMARENQTTQKGQKNSRERMKRIEEGIKELGSQILKEHPVENTQLQNEKLYLYYLQNGRDMYVDQELDINRLSDYDVDHIVPQSFLKDDSIDNKVLTRSDKARGKSDNVPSEEVVKKMKNYWRQLLNAKLITQRKFDNLTKAERGGLSELDKAGFIKRQLVETRQITKHVAQILDSRMNTKYDENDKLIREVKVITLKSKLVSDFRKDFQFYKVREINNYHHAHDAYLNAVVGTALIKKYPKLESEFVYGDYKVYDVRKMIAKSEQEIGKATAKYFFYSNIMNFFKTEITLANGEIRKRPLIETNGETGEIVWDKGRDFATVRKVLSMPQVNIVKKTEVQTGGFSKESILPKRNSDKLIARKKDWDPKKYGGFDSPTVAYSVLVVAKVEKGKSKKLKSVKELLGITIMERSSFEKNPIDFLEAKGYKEVKKDLIIKLPKYSLFELENGRKRMLASAGELQKGNELALPSKYVNFLYLASHYEKLKGSPEDNEQKQLFVEQHKHYLDEIIEQISEFSKRVILADANLDKVLSAYNKHRDKPIREQAENIIHLFTLTNLGAPAAFKYFDTTIDRKRYTSTKEVLDATLIHQSITGLYETRIDLSQLGGDGGGSAGSAAGSGEFGGGRDIMKDIKVRLMTDSPDDSQDLMIGAIESNLFADQISWKSDQPVWLNQWPLKQEKLQALQQLVTEQLQLGHLEESNSPWNTPVFVIKKKSGKWRLLQDLRAVNATMHDMGALQPGLPSPVAVPKGWEIIIIDLQDCFFNIKLHPEDCKRFAFSVPSPNFKRPYQRFQWKVLPQGMKNSPTLCQKFVDKAILTVRDKYQDSYIVHYMDDILLAHPSRSIVDEILTSMIQALNKHGLVVSTEKIQKYDNLKYLGTHIQGDSVSYQKLQIRTDKLRTLNDFQKLLGNINWIRPFLKLTTGELKPLFEILNGDSNPISTRKLTPEACKALQLMNERLSTARVKRLDLSQPWSLCILKTEYTPTACLWQDGVVEWIHLPHISPKVITPYDIFCTQLIIKGRHRSKELFSKDPDYIVVPYTKVQFDLLLQEKEDWPISLLGFLGEVHFHLPKDPLLTFTLQTAIIFPHMTSTTPLEKGIVIFTDGSANGRSVTYIQGREPIIKENTQNTAQQAEIVAVITAFEEVSQPFNLYTDSKYVTGLFPEIETATLSPRTKIYTELKHLQRLIHKRQEKFYIGHIRGHTGLPGPLAQGNAYADSLTRILTAGKRTADGSEFEKRTADGSEFESPKKKAKVE

SEQ ID NO: 3220 - protein, 2022 aa, synthetic construct
MPAAKRVKLDGGDKKYSIGLDIGTNSVGWAVITDEYKVPSKKFKVLGNTDRHSIKKNLIGALLFDSGETAEATRLKRTARRRYTRRKNRICYLQEIFSNEMAKVDDSFFHRLEESFLVEEDKKHERHPIFGNIVDEVAYHEKYPTIYHLRKKLVDSTDKADLRLIYLALAHMIKFRGHFLIEGDLNPDNSDVDKLFIQLVQTYNQLFEENPINASGVDAKAILSARLSKSRRLENLIAQLPGEKKNGLFGNLIALSLGLTPNFKSNFDLAEDAKLQLSKDTYDDDLDNLLAQIGDQYADLFLAAKNLSDAILLSDILRVNTEITKAPLSASMIKRYDEHHQDLTLLKALVRQQLPEKYKEIFFDQSKNGYAGYIDGGASQEEFYKFIKPILEKMDGTEELLVKLNREDLLRKQRTFDNGSIPHQIHLGELHAILRRQEDFYPFLKDNREKIEKILTFRIPYYVGPLARGNSRFAWMTRKSEETITPWNFEEVVDKGASAQSFIERMTNFDKNLPNEKVLPKHSLLYEYFTVYNELTKVKYVTEGMRKPAFLSGEQKKAIVDLLFKTNRKVTVKQLKEDYFKKIECFDSVEISGVEDRFNASLGTYHDLLKIIKDKDFLDNEENEDILEDIVLTLTLFEDREMIEERLKTYAHLFDDKVMKQLKRRRYTGWGRLSRKLINGIRDKQSGKTILDFLKSDGFANRNFMQLIHDDSLTFKEDIQKAQVSGQGDSLHEHIANLAGSPAIKKGILQTVKVVDELVKVMGRHKPENIVIEMARENQTTQKGQKNSRERMKRIEEGIKELGSQILKEHPVENTQLQNEKLYLYYLQNGRDMYVDQELDINRLSDYDVDHIVPQSFLKDDSIDNKVLTRSDKARGKSDNVPSEEVVKKMKNYWRQLLNAKLITQRKFDNLTKAERGGLSELDKAGFIKRQLVETRQITKHVAQILDSRMNTKYDENDKLIREVKVITLKSKLVSDFRKDFQFYKVREINNYHHAHDAYLNAVVGTALIKKYPKLESEFVYGDYKVYDVRKMIAKSEQEIGKATAKYFFYSNIMNFFKTEITLANGEIRKRPLIETNGETGEIVWDKGRDFATVRKVLSMPQVNIVKKTEVQTGGFSKESILPKRNSDKLIARKKDWDPKKYGGFDSPTVAYSVLVVAKVEKGKSKKLKSVKELLGITIMERSSFEKNPIDFLEAKGYKEVKKDLIIKLPKYSLFELENGRKRMLASAGELQKGNELALPSKYVNFLYLASHYEKLKGSPEDNEQKQLFVEQHKHYLDEIIEQISEFSKRVILADANLDKVLSAYNKHRDKPIREQAENIIHLFTLTNLGAPAAFKYFDTTIDRKRYTSTKEVLDATLIHQSITGLYETRIDLSQLGGDGGPAPGGGGGSGGGRDIMKDIKVRLMTDSPDDSQDLMIGAIESNLFADQISWKSDQPVWLNQWPLKQEKLQALQQLVTEQLQLGHLEESNSPWNTPVFVIKKKSGKWRLLQDLRAVNATMHDMGALQPGLPSPVAVPKGWEIIIIDLQDCFFNIKLHPEDCKRFAFSVPSPNFKRPYQRFQWKVLPQGMKNSPTLCQKFVDKAILTVRDKYQDSYIVHYMDDILLAHPSRSIVDEILTSMIQALNKHGLVVSTEKIQKYDNLKYLGTHIQGDSVSYQKLQIRTDKLRTLNDFQKLLGNINWIRPFLKLTTGELKPLFEILNGDSNPISTRKLTPEACKALQLMNERLSTARVKRLDLSQPWSLCILKTEYTPTACLWQDGVVEWIHLPHISPKVITPYDIFCTQLIIKGRHRSKELFSKDPDYIVVPYTKVQFDLLLQEKEDWPISLLGFLGEVHFHLPKDPLLTFTLQTAIIFPHMTSTTPLEKGIVIFTDGSANGRSVTYIQGREPIIKENTQNTAQQAEIVAVITAFEEVSQPFNLYTDSKYVTGLFPEIETATLSPRTKIYTELKHLQRLIHKRQEKFYIGHIRGHTGLPGPLAQGNAYADSLTRILTAGKRTADGSEFEKRTADGSEFESPKKKAKVE

SEQ ID NO: 3221 - protein, 2022 aa, synthetic construct
MPAAKRVKLDGGDKKYSIGLDIGTNSVGWAVITDEYKVPSKKFKVLGNTDRHSIKKNLIGALLFDSGETAEATRLKRTARRRYTRRKNRICYLQEIFSNEMAKVDDSFFHRLEESFLVEEDKKHERHPIFGNIVDEVAYHEKYPTIYHLRKKLVDSTDKADLRLIYLALAHMIKFRGHFLIEGDLNPDNSDVDKLFIQLVQTYNQLFEENPINASGVDAKAILSARLSKSRRLENLIAQLPGEKKNGLFGNLIALSLGLTPNFKSNFDLAEDAKLQLSKDTYDDDLDNLLAQIGDQYADLFLAAKNLSDAILLSDILRVNTEITKAPLSASMIKRYDEHHQDLTLLKALVRQQLPEKYKEIFFDQSKNGYAGYIDGGASQEEFYKFIKPILEKMDGTEELLVKLNREDLLRKQRTFDNGSIPHQIHLGELHAILRRQEDFYPFLKDNREKIEKILTFRIPYYVGPLARGNSRFAWMTRKSEETITPWNFEEVVDKGASAQSFIERMTNFDKNLPNEKVLPKHSLLYEYFTVYNELTKVKYVTEGMRKPAFLSGEQKKAIVDLLFKTNRKVTVKQLKEDYFKKIECFDSVEISGVEDRFNASLGTYHDLLKIIKDKDFLDNEENEDILEDIVLTLTLFEDREMIEERLKTYAHLFDDKVMKQLKRRRYTGWGRLSRKLINGIRDKQSGKTILDFLKSDGFANRNFMQLIHDDSLTFKEDIQKAQVSGQGDSLHEHIANLAGSPAIKKGILQTVKVVDELVKVMGRHKPENIVIEMARENQTTQKGQKNSRERMKRIEEGIKELGSQILKEHPVENTQLQNEKLYLYYLQNGRDMYVDQELDINRLSDYDVDHIVPQSFLKDDSIDNKVLTRSDKARGKSDNVPSEEVVKKMKNYWRQLLNAKLITQRKFDNLTKAERGGLSELDKAGFIKRQLVETRQITKHVAQILDSRMNTKYDENDKLIREVKVITLKSKLVSDFRKDFQFYKVREINNYHHAHDAYLNAVVGTALIKKYPKLESEFVYGDYKVYDVRKMIAKSEQEIGKATAKYFFYSNIMNFFKTEITLANGEIRKRPLIETNGETGEIVWDKGRDFATVRKVLSMPQVNIVKKTEVQTGGFSKESILPKRNSDKLIARKKDWDPKKYGGFDSPTVAYSVLVVAKVEKGKSKKLKSVKELLGITIMERSSFEKNPIDFLEAKGYKEVKKDLIIKLPKYSLFELENGRKRMLASAGELQKGNELALPSKYVNFLYLASHYEKLKGSPEDNEQKQLFVEQHKHYLDEIIEQISEFSKRVILADANLDKVLSAYNKHRDKPIREQAENIIHLFTLTNLGAPAAFKYFDTTIDRKRYTSTKEVLDATLIHQSITGLYETRIDLSQLGGDGGPAPAPAPAPGGGRDIMKDIKVRLMTDSPDDSQDLMIGAIESNLFADQISWKSDQPVWLNQWPLKQEKLQALQQLVTEQLQLGHLEESNSPWNTPVFVIKKKSGKWRLLQDLRAVNATMHDMGALQPGLPSPVAVPKGWEIIIIDLQDCFFNIKLHPEDCKRFAFSVPSPNFKRPYQRFQWKVLPQGMKNSPTLCQKFVDKAILTVRDKYQDSYIVHYMDDILLAHPSRSIVDEILTSMIQALNKHGLVVSTEKIQKYDNLKYLGTHIQGDSVSYQKLQIRTDKLRTLNDFQKLLGNINWIRPFLKLTTGELKPLFEILNGDSNPISTRKLTPEACKALQLMNERLSTARVKRLDLSQPWSLCILKTEYTPTACLWQDGVVEWIHLPHISPKVITPYDIFCTQLIIKGRHRSKELFSKDPDYIVVPYTKVQFDLLLQEKEDWPISLLGFLGEVHFHLPKDPLLTFTLQTAIIFPHMTSTTPLEKGIVIFTDGSANGRSVTYIQGREPIIKENTQNTAQQAEIVAVITAFEEVSQPFNLYTDSKYVTGLFPEIETATLSPRTKIYTELKHLQRLIHKRQEKFYIGHIRGHTGLPGPLAQGNAYADSLTRILTAGKRTADGSEFEKRTADGSEFESPKKKAKVE

SEQ ID NO: 3222 - protein, 2024 aa, synthetic construct
MPAAKRVKLDGGDKKYSIGLDIGTNSVGWAVITDEYKVPSKKFKVLGNTDRHSIKKNLIGALLFDSGETAEATRLKRTARRRYTRRKNRICYLQEIFSNEMAKVDDSFFHRLEESFLVEEDKKHERHPIFGNIVDEVAYHEKYPTIYHLRKKLVDSTDKADLRLIYLALAHMIKFRGHFLIEGDLNPDNSDVDKLFIQLVQTYNQLFEENPINASGVDAKAILSARLSKSRRLENLIAQLPGEKKNGLFGNLIALSLGLTPNFKSNFDLAEDAKLQLSKDTYDDDLDNLLAQIGDQYADLFLAAKNLSDAILLSDILRVNTEITKAPLSASMIKRYDEHHQDLTLLKALVRQQLPEKYKEIFFDQSKNGYAGYIDGGASQEEFYKFIKPILEKMDGTEELLVKLNREDLLRKQRTFDNGSIPHQIHLGELHAILRRQEDFYPFLKDNREKIEKILTFRIPYYVGPLARGNSRFAWMTRKSEETITPWNFEEVVDKGASAQSFIERMTNFDKNLPNEKVLPKHSLLYEYFTVYNELTKVKYVTEGMRKPAFLSGEQKKAIVDLLFKTNRKVTVKQLKEDYFKKIECFDSVEISGVEDRFNASLGTYHDLLKIIKDKDFLDNEENEDILEDIVLTLTLFEDREMIEERLKTYAHLFDDKVMKQLKRRRYTGWGRLSRKLINGIRDKQSGKTILDFLKSDGFANRNFMQLIHDDSLTFKEDIQKAQVSGQGDSLHEHIANLAGSPAIKKGILQTVKVVDELVKVMGRHKPENIVIEMARENQTTQKGQKNSRERMKRIEEGIKELGSQILKEHPVENTQLQNEKLYLYYLQNGRDMYVDQELDINRLSDYDVDHIVPQSFLKDDSIDNKVLTRSDKARGKSDNVPSEEVVKKMKNYWRQLLNAKLITQRKFDNLTKAERGGLSELDKAGFIKRQLVETRQITKHVAQILDSRMNTKYDENDKLIREVKVITLKSKLVSDFRKDFQFYKVREINNYHHAHDAYLNAVVGTALIKKYPKLESEFVYGDYKVYDVRKMIAKSEQEIGKATAKYFFYSNIMNFFKTEITLANGEIRKRPLIETNGETGEIVWDKGRDFATVRKVLSMPQVNIVKKTEVQTGGFSKESILPKRNSDKLIARKKDWDPKKYGGFDSPTVAYSVLVVAKVEKGKSKKLKSVKELLGITIMERSSFEKNPIDFLEAKGYKEVKKDLIIKLPKYSLFELENGRKRMLASAGELQKGNELALPSKYVNFLYLASHYEKLKGSPEDNEQKQLFVEQHKHYLDEIIEQISEFSKRVILADANLDKVLSAYNKHRDKPIREQAENIIHLFTLTNLGAPAAFKYFDTTIDRKRYTSTKEVLDATLIHQSITGLYETRIDLSQLGGDGGPAPEAAAKGGSGGGRDIMKDIKVRLMTDSPDDSQDLMIGAIESNLFADQISWKSDQPVWLNQWPLKQEKLQALQQLVTEQLQLGHLEESNSPWNTPVFVIKKKSGKWRLLQDLRAVNATMHDMGALQPGLPSPVAVPKGWEIIIIDLQDCFFNIKLHPEDCKRFAFSVPSPNFKRPYQRFQWKVLPQGMKNSPTLCQKFVDKAILTVRDKYQDSYIVHYMDDILLAHPSRSIVDEILTSMIQALNKHGLVVSTEKIQKYDNLKYLGTHIQGDSVSYQKLQIRTDKLRTLNDFQKLLGNINWIRPFLKLTTGELKPLFEILNGDSNPISTRKLTPEACKALQLMNERLSTARVKRLDLSQPWSLCILKTEYTPTACLWQDGVVEWIHLPHISPKVITPYDIFCTQLIIKGRHRSKELFSKDPDYIVVPYTKVQFDLLLQEKEDWPISLLGFLGEVHFHLPKDPLLTFTLQTAIIFPHMTSTTPLEKGIVIFTDGSANGRSVTYIQGREPIIKENTQNTAQQAEIVAVITAFEEVSQPFNLYTDSKYVTGLFPEIETATLSPRTKIYTELKHLQRLIHKRQEKFYIGHIRGHTGLPGPLAQGNAYADSLTRILTAGKRTADGSEFEKRTADGSEFESPKKKAKVE

SEQ ID NO: 3223 - protein, 2022 aa, synthetic construct
MPAAKRVKLDGGDKKYSIGLDIGTNSVGWAVITDEYKVPSKKFKVLGNTDRHSIKKNLIGALLFDSGETAEATRLKRTARRRYTRRKNRICYLQEIFSNEMAKVDDSFFHRLEESFLVEEDKKHERHPIFGNIVDEVAYHEKYPTIYHLRKKLVDSTDKADLRLIYLALAHMIKFRGHFLIEGDLNPDNSDVDKLFIQLVQTYNQLFEENPINASGVDAKAILSARLSKSRRLENLIAQLPGEKKNGLFGNLIALSLGLTPNFKSNFDLAEDAKLQLSKDTYDDDLDNLLAQIGDQYADLFLAAKNLSDAILLSDILRVNTEITKAPLSASMIKRYDEHHQDLTLLKALVRQQLPEKYKEIFFDQSKNGYAGYIDGGASQEEFYKFIKPILEKMDGTEELLVKLNREDLLRKQRTFDNGSIPHQIHLGELHAILRRQEDFYPFLKDNREKIEKILTFRIPYYVGPLARGNSRFAWMTRKSEETITPWNFEEVVDKGASAQSFIERMTNFDKNLPNEKVLPKHSLLYEYFTVYNELTKVKYVTEGMRKPAFLSGEQKKAIVDLLFKTNRKVTVKQLKEDYFKKIECFDSVEISGVEDRFNASLGTYHDLLKIIKDKDFLDNEENEDILEDIVLTLTLFEDREMIEERLKTYAHLFDDKVMKQLKRRRYTGWGRLSRKLINGIRDKQSGKTILDFLKSDGFANRNFMQLIHDDSLTFKEDIQKAQVSGQGDSLHEHIANLAGSPAIKKGILQTVKVVDELVKVMGRHKPENIVIEMARENQTTQKGQKNSRERMKRIEEGIKELGSQILKEHPVENTQLQNEKLYLYYLQNGRDMYVDQELDINRLSDYDVDHIVPQSFLKDDSIDNKVLTRSDKARGKSDNVPSEEVVKKMKNYWRQLLNAKLITQRKFDNLTKAERGGLSELDKAGFIKRQLVETRQITKHVAQILDSRMNTKYDENDKLIREVKVITLKSKLVSDFRKDFQFYKVREINNYHHAHDAYLNAVVGTALIKKYPKLESEFVYGDYKVYDVRKMIAKSEQEIGKATAKYFFYSNIMNFFKTEITLANGEIRKRPLIETNGETGEIVWDKGRDFATVRKVLSMPQVNIVKKTEVQTGGFSKESILPKRNSDKLIARKKDWDPKKYGGFDSPTVAYSVLVVAKVEKGKSKKLKSVKELLGITIMERSSFEKNPIDFLEAKGYKEVKKDLIIKLPKYSLFELENGRKRMLASAGELQKGNELALPSKYVNFLYLASHYEKLKGSPEDNEQKQLFVEQHKHYLDEIIEQISEFSKRVILADANLDKVLSAYNKHRDKPIREQAENIIHLFTLTNLGAPAAFKYFDTTIDRKRYTSTKEVLDATLIHQSITGLYETRIDLSQLGGDGGGGGPAPGSSGGGRDIMKDIKVRLMTDSPDDSQDLMIGAIESNLFADQISWKSDQPVWLNQWPLKQEKLQALQQLVTEQLQLGHLEESNSPWNTPVFVIKKKSGKWRLLQDLRAVNATMHDMGALQPGLPSPVAVPKGWEIIIIDLQDCFFNIKLHPEDCKRFAFSVPSPNFKRPYQRFQWKVLPQGMKNSPTLCQKFVDKAILTVRDKYQDSYIVHYMDDILLAHPSRSIVDEILTSMIQALNKHGLVVSTEKIQKYDNLKYLGTHIQGDSVSYQKLQIRTDKLRTLNDFQKLLGNINWIRPFLKLTTGELKPLFEILNGDSNPISTRKLTPEACKALQLMNERLSTARVKRLDLSQPWSLCILKTEYTPTACLWQDGVVEWIHLPHISPKVITPYDIFCTQLIIKGRHRSKELFSKDPDYIVVPYTKVQFDLLLQEKEDWPISLLGFLGEVHFHLPKDPLLTFTLQTAIIFPHMTSTTPLEKGIVIFTDGSANGRSVTYIQGREPIIKENTQNTAQQAEIVAVITAFEEVSQPFNLYTDSKYVTGLFPEIETATLSPRTKIYTELKHLQRLIHKRQEKFYIGHIRGHTGLPGPLAQGNAYADSLTRILTAGKRTADGSEFEKRTADGSEFESPKKKAKVE

SEQ ID NO: 3224 - protein, 2022 aa, synthetic construct
MPAAKRVKLDGGDKKYSIGLDIGTNSVGWAVITDEYKVPSKKFKVLGNTDRHSIKKNLIGALLFDSGETAEATRLKRTARRRYTRRKNRICYLQEIFSNEMAKVDDSFFHRLEESFLVEEDKKHERHPIFGNIVDEVAYHEKYPTIYHLRKKLVDSTDKADLRLIYLALAHMIKFRGHFLIEGDLNPDNSDVDKLFIQLVQTYNQLFEENPINASGVDAKAILSARLSKSRRLENLIAQLPGEKKNGLFGNLIALSLGLTPNFKSNFDLAEDAKLQLSKDTYDDDLDNLLAQIGDQYADLFLAAKNLSDAILLSDILRVNTEITKAPLSASMIKRYDEHHQDLTLLKALVRQQLPEKYKEIFFDQSKNGYAGYIDGGASQEEFYKFIKPILEKMDGTEELLVKLNREDLLRKQRTFDNGSIPHQIHLGELHAILRRQEDFYPFLKDNREKIEKILTFRIPYYVGPLARGNSRFAWMTRKSEETITPWNFEEVVDKGASAQSFIERMTNFDKNLPNEKVLPKHSLLYEYFTVYNELTKVKYVTEGMRKPAFLSGEQKKAIVDLLFKTNRKVTVKQLKEDYFKKIECFDSVEISGVEDRFNASLGTYHDLLKIIKDKDFLDNEENEDILEDIVLTLTLFEDREMIEERLKTYAHLFDDKVMKQLKRRRYTGWGRLSRKLINGIRDKQSGKTILDFLKSDGFANRNFMQLIHDDSLTFKEDIQKAQVSGQGDSLHEHIANLAGSPAIKKGILQTVKVVDELVKVMGRHKPENIVIEMARENQTTQKGQKNSRERMKRIEEGIKELGSQILKEHPVENTQLQNEKLYLYYLQNGRDMYVDQELDINRLSDYDVDHIVPQSFLKDDSIDNKVLTRSDKARGKSDNVPSEEVVKKMKNYWRQLLNAKLITQRKFDNLTKAERGGLSELDKAGFIKRQLVETRQITKHVAQILDSRMNTKYDENDKLIREVKVITLKSKLVSDFRKDFQFYKVREINNYHHAHDAYLNAVVGTALIKKYPKLESEFVYGDYKVYDVRKMIAKSEQEIGKATAKYFFYSNIMNFFKTEITLANGEIRKRPLIETNGETGEIVWDKGRDFATVRKVLSMPQVNIVKKTEVQTGGFSKESILPKRNSDKLIARKKDWDPKKYGGFDSPTVAYSVLVVAKVEKGKSKKLKSVKELLGITIMERSSFEKNPIDFLEAKGYKEVKKDLIIKLPKYSLFELENGRKRMLASAGELQKGNELALPSKYVNFLYLASHYEKLKGSPEDNEQKQLFVEQHKHYLDEIIEQISEFSKRVILADANLDKVLSAYNKHRDKPIREQAENIIHLFTLTNLGAPAAFKYFDTTIDRKRYTSTKEVLDATLIHQSITGLYETRIDLSQLGGDGGGGSPAPGGGGGGRDIMKDIKVRLMTDSPDDSQDLMIGAIESNLFADQISWKSDQPVWLNQWPLKQEKLQALQQLVTEQLQLGHLEESNSPWNTPVFVIKKKSGKWRLLQDLRAVNATMHDMGALQPGLPSPVAVPKGWEIIIIDLQDCFFNIKLHPEDCKRFAFSVPSPNFKRPYQRFQWKVLPQGMKNSPTLCQKFVDKAILTVRDKYQDSYIVHYMDDILLAHPSRSIVDEILTSMIQALNKHGLVVSTEKIQKYDNLKYLGTHIQGDSVSYQKLQIRTDKLRTLNDFQKLLGNINWIRPFLKLTTGELKPLFEILNGDSNPISTRKLTPEACKALQLMNERLSTARVKRLDLSQPWSLCILKTEYTPTACLWQDGVVEWIHLPHISPKVITPYDIFCTQLIIKGRHRSKELFSKDPDYIVVPYTKVQFDLLLQEKEDWPISLLGFLGEVHFHLPKDPLLTFTLQTAIIFPHMTSTTPLEKGIVIFTDGSANGRSVTYIQGREPIIKENTQNTAQQAEIVAVITAFEEVSQPFNLYTDSKYVTGLFPEIETATLSPRTKIYTELKHLQRLIHKRQEKFYIGHIRGHTGLPGPLAQGNAYADSLTRILTAGKRTADGSEFEKRTADGSEFESPKKKAKVE

SEQ ID NO: 3225 - protein, 2019 aa, synthetic construct
MPAAKRVKLDGGDKKYSIGLDIGTNSVGWAVITDEYKVPSKKFKVLGNTDRHSIKKNLIGALLFDSGETAEATRLKRTARRRYTRRKNRICYLQEIFSNEMAKVDDSFFHRLEESFLVEEDKKHERHPIFGNIVDEVAYHEKYPTIYHLRKKLVDSTDKADLRLIYLALAHMIKFRGHFLIEGDLNPDNSDVDKLFIQLVQTYNQLFEENPINASGVDAKAILSARLSKSRRLENLIAQLPGEKKNGLFGNLIALSLGLTPNFKSNFDLAEDAKLQLSKDTYDDDLDNLLAQIGDQYADLFLAAKNLSDAILLSDILRVNTEITKAPLSASMIKRYDEHHQDLTLLKALVRQQLPEKYKEIFFDQSKNGYAGYIDGGASQEEFYKFIKPILEKMDGTEELLVKLNREDLLRKQRTFDNGSIPHQIHLGELHAILRRQEDFYPFLKDNREKIEKILTFRIPYYVGPLARGNSRFAWMTRKSEETITPWNFEEVVDKGASAQSFIERMTNFDKNLPNEKVLPKHSLLYEYFTVYNELTKVKYVTEGMRKPAFLSGEQKKAIVDLLFKTNRKVTVKQLKEDYFKKIECFDSVEISGVEDRFNASLGTYHDLLKIIKDKDFLDNEENEDILEDIVLTLTLFEDREMIEERLKTYAHLFDDKVMKQLKRRRYTGWGRLSRKLINGIRDKQSGKTILDFLKSDGFANRNFMQLIHDDSLTFKEDIQKAQVSGQGDSLHEHIANLAGSPAIKKGILQTVKVVDELVKVMGRHKPENIVIEMARENQTTQKGQKNSRERMKRIEEGIKELGSQILKEHPVENTQLQNEKLYLYYLQNGRDMYVDQELDINRLSDYDVDHIVPQSFLKDDSIDNKVLTRSDKARGKSDNVPSEEVVKKMKNYWRQLLNAKLITQRKFDNLTKAERGGLSELDKAGFIKRQLVETRQITKHVAQILDSRMNTKYDENDKLIREVKVITLKSKLVSDFRKDFQFYKVREINNYHHAHDAYLNAVVGTALIKKYPKLESEFVYGDYKVYDVRKMIAKSEQEIGKATAKYFFYSNIMNFFKTEITLANGEIRKRPLIETNGETGEIVWDKGRDFATVRKVLSMPQVNIVKKTEVQTGGFSKESILPKRNSDKLIARKKDWDPKKYGGFDSPTVAYSVLVVAKVEKGKSKKLKSVKELLGITIMERSSFEKNPIDFLEAKGYKEVKKDLIIKLPKYSLFELENGRKRMLASAGELQKGNELALPSKYVNFLYLASHYEKLKGSPEDNEQKQLFVEQHKHYLDEIIEQISEFSKRVILADANLDKVLSAYNKHRDKPIREQAENIIHLFTLTNLGAPAAFKYFDTTIDRKRYTSTKEVLDATLIHQSITGLYETRIDLSQLGGDGGGGGGGSGGGRDIMKDIKVRLMTDSPDDSQDLMIGAIESNLFADQISWKSDQPVWLNQWPLKQEKLQALQQLVTEQLQLGHLEESNSPWNTPVFVIKKKSGKWRLLQDLRAVNATMHDMGALQPGLPSPVAVPKGWEIIIIDLQDCFFNIKLHPEDCKRFAFSVPSPNFKRPYQRFQWKVLPQGMKNSPTLCQKFVDKAILTVRDKYQDSYIVHYMDDILLAHPSRSIVDEILTSMIQALNKHGLVVSTEKIQKYDNLKYLGTHIQGDSVSYQKLQIRTDKLRTLNDFQKLLGNINWIRPFLKLTTGELKPLFEILNGDSNPISTRKLTPEACKALQLMNERLSTARVKRLDLSQPWSLCILKTEYTPTACLWQDGVVEWIHLPHISPKVITPYDIFCTQLIIKGRHRSKELFSKDPDYIVVPYTKVQFDLLLQEKEDWPISLLGFLGEVHFHLPKDPLLTFTLQTAIIFPHMTSTTPLEKGIVIFTDGSANGRSVTYIQGREPIIKENTQNTAQQAEIVAVITAFEEVSQPFNLYTDSKYVTGLFPEIETATLSPRTKIYTELKHLQRLIHKRQEKFYIGHIRGHTGLPGPLAQGNAYADSLTRILTAGKRTADGSEFEKRTADGSEFESPKKKAKVE

SEQ ID NO: 3226 - protein, 2024 aa, synthetic construct
MPAAKRVKLDGGDKKYSIGLDIGTNSVGWAVITDEYKVPSKKFKVLGNTDRHSIKKNLIGALLFDSGETAEATRLKRTARRRYTRRKNRICYLQEIFSNEMAKVDDSFFHRLEESFLVEEDKKHERHPIFGNIVDEVAYHEKYPTIYHLRKKLVDSTDKADLRLIYLALAHMIKFRGHFLIEGDLNPDNSDVDKLFIQLVQTYNQLFEENPINASGVDAKAILSARLSKSRRLENLIAQLPGEKKNGLFGNLIALSLGLTPNFKSNFDLAEDAKLQLSKDTYDDDLDNLLAQIGDQYADLFLAAKNLSDAILLSDILRVNTEITKAPLSASMIKRYDEHHQDLTLLKALVRQQLPEKYKEIFFDQSKNGYAGYIDGGASQEEFYKFIKPILEKMDGTEELLVKLNREDLLRKQRTFDNGSIPHQIHLGELHAILRRQEDFYPFLKDNREKIEKILTFRIPYYVGPLARGNSRFAWMTRKSEETITPWNFEEVVDKGASAQSFIERMTNFDKNLPNEKVLPKHSLLYEYFTVYNELTKVKYVTEGMRKPAFLSGEQKKAIVDLLFKTNRKVTVKQLKEDYFKKIECFDSVEISGVEDRFNASLGTYHDLLKIIKDKDFLDNEENEDILEDIVLTLTLFEDREMIEERLKTYAHLFDDKVMKQLKRRRYTGWGRLSRKLINGIRDKQSGKTILDFLKSDGFANRNFMQLIHDDSLTFKEDIQKAQVSGQGDSLHEHIANLAGSPAIKKGILQTVKVVDELVKVMGRHKPENIVIEMARENQTTQKGQKNSRERMKRIEEGIKELGSQILKEHPVENTQLQNEKLYLYYLQNGRDMYVDQELDINRLSDYDVDHIVPQSFLKDDSIDNKVLTRSDKARGKSDNVPSEEVVKKMKNYWRQLLNAKLITQRKFDNLTKAERGGLSELDKAGFIKRQLVETRQITKHVAQILDSRMNTKYDENDKLIREVKVITLKSKLVSDFRKDFQFYKVREINNYHHAHDAYLNAVVGTALIKKYPKLESEFVYGDYKVYDVRKMIAKSEQEIGKATAKYFFYSNIMNFFKTEITLANGEIRKRPLIETNGETGEIVWDKGRDFATVRKVLSMPQVNIVKKTEVQTGGFSKESILPKRNSDKLIARKKDWDPKKYGGFDSPTVAYSVLVVAKVEKGKSKKLKSVKELLGITIMERSSFEKNPIDFLEAKGYKEVKKDLIIKLPKYSLFELENGRKRMLASAGELQKGNELALPSKYVNFLYLASHYEKLKGSPEDNEQKQLFVEQHKHYLDEIIEQISEFSKRVILADANLDKVLSAYNKHRDKPIREQAENIIHLFTLTNLGAPAAFKYFDTTIDRKRYTSTKEVLDATLIHQSITGLYETRIDLSQLGGDGGEAAAKGGGGGSGGGRDIMKDIKVRLMTDSPDDSQDLMIGAIESNLFADQISWKSDQPVWLNQWPLKQEKLQALQQLVTEQLQLGHLEESNSPWNTPVFVIKKKSGKWRLLQDLRAVNATMHDMGALQPGLPSPVAVPKGWEIIIIDLQDCFFNIKLHPEDCKRFAFSVPSPNFKRPYQRFQWKVLPQGMKNSPTLCQKFVDKAILTVRDKYQDSYIVHYMDDILLAHPSRSIVDEILTSMIQALNKHGLVVSTEKIQKYDNLKYLGTHIQGDSVSYQKLQIRTDKLRTLNDFQKLLGNINWIRPFLKLTTGELKPLFEILNGDSNPISTRKLTPEACKALQLMNERLSTARVKRLDLSQPWSLCILKTEYTPTACLWQDGVVEWIHLPHISPKVITPYDIFCTQLIIKGRHRSKELFSKDPDYIVVPYTKVQFDLLLQEKEDWPISLLGFLGEVHFHLPKDPLLTFTLQTAIIFPHMTSTTPLEKGIVIFTDGSANGRSVTYIQGREPIIKENTQNTAQQAEIVAVITAFEEVSQPFNLYTDSKYVTGLFPEIETATLSPRTKIYTELKHLQRLIHKRQEKFYIGHIRGHTGLPGPLAQGNAYADSLTRILTAGKRTADGSEFEKRTADGSEFESPKKKAKVE

SEQ ID NO: 3227 - protein, 2019 aa, synthetic construct
MPAAKRVKLDGGDKKYSIGLDIGTNSVGWAVITDEYKVPSKKFKVLGNTDRHSIKKNLIGALLFDSGETAEATRLKRTARRRYTRRKNRICYLQEIFSNEMAKVDDSFFHRLEESFLVEEDKKHERHPIFGNIVDEVAYHEKYPTIYHLRKKLVDSTDKADLRLIYLALAHMIKFRGHFLIEGDLNPDNSDVDKLFIQLVQTYNQLFEENPINASGVDAKAILSARLSKSRRLENLIAQLPGEKKNGLFGNLIALSLGLTPNFKSNFDLAEDAKLQLSKDTYDDDLDNLLAQIGDQYADLFLAAKNLSDAILLSDILRVNTEITKAPLSASMIKRYDEHHQDLTLLKALVRQQLPEKYKEIFFDQSKNGYAGYIDGGASQEEFYKFIKPILEKMDGTEELLVKLNREDLLRKQRTFDNGSIPHQIHLGELHAILRRQEDFYPFLKDNREKIEKILTFRIPYYVGPLARGNSRFAWMTRKSEETITPWNFEEVVDKGASAQSFIERMTNFDKNLPNEKVLPKHSLLYEYFTVYNELTKVKYVTEGMRKPAFLSGEQKKAIVDLLFKTNRKVTVKQLKEDYFKKIECFDSVEISGVEDRFNASLGTYHDLLKIIKDKDFLDNEENEDILEDIVLTLTLFEDREMIEERLKTYAHLFDDKVMKQLKRRRYTGWGRLSRKLINGIRDKQSGKTILDFLKSDGFANRNFMQLIHDDSLTFKEDIQKAQVSGQGDSLHEHIANLAGSPAIKKGILQTVKVVDELVKVMGRHKPENIVIEMARENQTTQKGQKNSRERMKRIEEGIKELGSQILKEHPVENTQLQNEKLYLYYLQNGRDMYVDQELDINRLSDYDVDHIVPQSFLKDDSIDNKVLTRSDKARGKSDNVPSEEVVKKMKNYWRQLLNAKLITQRKFDNLTKAERGGLSELDKAGFIKRQLVETRQITKHVAQILDSRMNTKYDENDKLIREVKVITLKSKLVSDFRKDFQFYKVREINNYHHAHDAYLNAVVGTALIKKYPKLESEFVYGDYKVYDVRKMIAKSEQEIGKATAKYFFYSNIMNFFKTEITLANGEIRKRPLIETNGETGEIVWDKGRDFATVRKVLSMPQVNIVKKTEVQTGGFSKESILPKRNSDKLIARKKDWDPKKYGGFDSPTVAYSVLVVAKVEKGKSKKLKSVKELLGITIMERSSFEKNPIDFLEAKGYKEVKKDLIIKLPKYSLFELENGRKRMLASAGELQKGNELALPSKYVNFLYLASHYEKLKGSPEDNEQKQLFVEQHKHYLDEIIEQISEFSKRVILADANLDKVLSAYNKHRDKPIREQAENIIHLFTLTNLGAPAAFKYFDTTIDRKRYTSTKEVLDATLIHQSITGLYETRIDLSQLGGDGGGGSPAPGGGRDIMKDIKVRLMTDSPDDSQDLMIGAIESNLFADQISWKSDQPVWLNQWPLKQEKLQALQQLVTEQLQLGHLEESNSPWNTPVFVIKKKSGKWRLLQDLRAVNATMHDMGALQPGLPSPVAVPKGWEIIIIDLQDCFFNIKLHPEDCKRFAFSVPSPNFKRPYQRFQWKVLPQGMKNSPTLCQKFVDKAILTVRDKYQDSYIVHYMDDILLAHPSRSIVDEILTSMIQALNKHGLVVSTEKIQKYDNLKYLGTHIQGDSVSYQKLQIRTDKLRTLNDFQKLLGNINWIRPFLKLTTGELKPLFEILNGDSNPISTRKLTPEACKALQLMNERLSTARVKRLDLSQPWSLCILKTEYTPTACLWQDGVVEWIHLPHISPKVITPYDIFCTQLIIKGRHRSKELFSKDPDYIVVPYTKVQFDLLLQEKEDWPISLLGFLGEVHFHLPKDPLLTFTLQTAIIFPHMTSTTPLEKGIVIFTDGSANGRSVTYIQGREPIIKENTQNTAQQAEIVAVITAFEEVSQPFNLYTDSKYVTGLFPEIETATLSPRTKIYTELKHLQRLIHKRQEKFYIGHIRGHTGLPGPLAQGNAYADSLTRILTAGKRTADGSEFEKRTADGSEFESPKKKAKVE

SEQ ID NO: 3228 - protein, 2024 aa, synthetic construct
MPAAKRVKLDGGDKKYSIGLDIGTNSVGWAVITDEYKVPSKKFKVLGNTDRHSIKKNLIGALLFDSGETAEATRLKRTARRRYTRRKNRICYLQEIFSNEMAKVDDSFFHRLEESFLVEEDKKHERHPIFGNIVDEVAYHEKYPTIYHLRKKLVDSTDKADLRLIYLALAHMIKFRGHFLIEGDLNPDNSDVDKLFIQLVQTYNQLFEENPINASGVDAKAILSARLSKSRRLENLIAQLPGEKKNGLFGNLIALSLGLTPNFKSNFDLAEDAKLQLSKDTYDDDLDNLLAQIGDQYADLFLAAKNLSDAILLSDILRVNTEITKAPLSASMIKRYDEHHQDLTLLKALVRQQLPEKYKEIFFDQSKNGYAGYIDGGASQEEFYKFIKPILEKMDGTEELLVKLNREDLLRKQRTFDNGSIPHQIHLGELHAILRRQEDFYPFLKDNREKIEKILTFRIPYYVGPLARGNSRFAWMTRKSEETITPWNFEEVVDKGASAQSFIERMTNFDKNLPNEKVLPKHSLLYEYFTVYNELTKVKYVTEGMRKPAFLSGEQKKAIVDLLFKTNRKVTVKQLKEDYFKKIECFDSVEISGVEDRFNASLGTYHDLLKIIKDKDFLDNEENEDILEDIVLTLTLFEDREMIEERLKTYAHLFDDKVMKQLKRRRYTGWGRLSRKLINGIRDKQSGKTILDFLKSDGFANRNFMQLIHDDSLTFKEDIQKAQVSGQGDSLHEHIANLAGSPAIKKGILQTVKVVDELVKVMGRHKPENIVIEMARENQTTQKGQKNSRERMKRIEEGIKELGSQILKEHPVENTQLQNEKLYLYYLQNGRDMYVDQELDINRLSDYDVDHIVPQSFLKDDSIDNKVLTRSDKARGKSDNVPSEEVVKKMKNYWRQLLNAKLITQRKFDNLTKAERGGLSELDKAGFIKRQLVETRQITKHVAQILDSRMNTKYDENDKLIREVKVITLKSKLVSDFRKDFQFYKVREINNYHHAHDAYLNAVVGTALIKKYPKLESEFVYGDYKVYDVRKMIAKSEQEIGKATAKYFFYSNIMNFFKTEITLANGEIRKRPLIETNGETGEIVWDKGRDFATVRKVLSMPQVNIVKKTEVQTGGFSKESILPKRNSDKLIARKKDWDPKKYGGFDSPTVAYSVLVVAKVEKGKSKKLKSVKELLGITIMERSSFEKNPIDFLEAKGYKEVKKDLIIKLPKYSLFELENGRKRMLASAGELQKGNELALPSKYVNFLYLASHYEKLKGSPEDNEQKQLFVEQHKHYLDEIIEQISEFSKRVILADANLDKVLSAYNKHRDKPIREQAENIIHLFTLTNLGAPAAFKYFDTTIDRKRYTSTKEVLDATLIHQSITGLYETRIDLSQLGGDGGEAAAKGGSGGGGGGRDIMKDIKVRLMTDSPDDSQDLMIGAIESNLFADQISWKSDQPVWLNQWPLKQEKLQALQQLVTEQLQLGHLEESNSPWNTPVFVIKKKSGKWRLLQDLRAVNATMHDMGALQPGLPSPVAVPKGWEIIIIDLQDCFFNIKLHPEDCKRFAFSVPSPNFKRPYQRFQWKVLPQGMKNSPTLCQKFVDKAILTVRDKYQDSYIVHYMDDILLAHPSRSIVDEILTSMIQALNKHGLVVSTEKIQKYDNLKYLGTHIQGDSVSYQKLQIRTDKLRTLNDFQKLLGNINWIRPFLKLTTGELKPLFEILNGDSNPISTRKLTPEACKALQLMNERLSTARVKRLDLSQPWSLCILKTEYTPTACLWQDGVVEWIHLPHISPKVITPYDIFCTQLIIKGRHRSKELFSKDPDYIVVPYTKVQFDLLLQEKEDWPISLLGFLGEVHFHLPKDPLLTFTLQTAIIFPHMTSTTPLEKGIVIFTDGSANGRSVTYIQGREPIIKENTQNTAQQAEIVAVITAFEEVSQPFNLYTDSKYVTGLFPEIETATLSPRTKIYTELKHLQRLIHKRQEKFYIGHIRGHTGLPGPLAQGNAYADSLTRILTAGKRTADGSEFEKRTADGSEFESPKKKAKVE

SEQ ID NO: 3229 - protein, 2022 aa, synthetic construct
MPAAKRVKLDGGDKKYSIGLDIGTNSVGWAVITDEYKVPSKKFKVLGNTDRHSIKKNLIGALLFDSGETAEATRLKRTARRRYTRRKNRICYLQEIFSNEMAKVDDSFFHRLEESFLVEEDKKHERHPIFGNIVDEVAYHEKYPTIYHLRKKLVDSTDKADLRLIYLALAHMIKFRGHFLIEGDLNPDNSDVDKLFIQLVQTYNQLFEENPINASGVDAKAILSARLSKSRRLENLIAQLPGEKKNGLFGNLIALSLGLTPNFKSNFDLAEDAKLQLSKDTYDDDLDNLLAQIGDQYADLFLAAKNLSDAILLSDILRVNTEITKAPLSASMIKRYDEHHQDLTLLKALVRQQLPEKYKEIFFDQSKNGYAGYIDGGASQEEFYKFIKPILEKMDGTEELLVKLNREDLLRKQRTFDNGSIPHQIHLGELHAILRRQEDFYPFLKDNREKIEKILTFRIPYYVGPLARGNSRFAWMTRKSEETITPWNFEEVVDKGASAQSFIERMTNFDKNLPNEKVLPKHSLLYEYFTVYNELTKVKYVTEGMRKPAFLSGEQKKAIVDLLFKTNRKVTVKQLKEDYFKKIECFDSVEISGVEDRFNASLGTYHDLLKIIKDKDFLDNEENEDILEDIVLTLTLFEDREMIEERLKTYAHLFDDKVMKQLKRRRYTGWGRLSRKLINGIRDKQSGKTILDFLKSDGFANRNFMQLIHDDSLTFKEDIQKAQVSGQGDSLHEHIANLAGSPAIKKGILQTVKVVDELVKVMGRHKPENIVIEMARENQTTQKGQKNSRERMKRIEEGIKELGSQILKEHPVENTQLQNEKLYLYYLQNGRDMYVDQELDINRLSDYDVDHIVPQSFLKDDSIDNKVLTRSDKARGKSDNVPSEEVVKKMKNYWRQLLNAKLITQRKFDNLTKAERGGLSELDKAGFIKRQLVETRQITKHVAQILDSRMNTKYDENDKLIREVKVITLKSKLVSDFRKDFQFYKVREINNYHHAHDAYLNAVVGTALIKKYPKLESEFVYGDYKVYDVRKMIAKSEQEIGKATAKYFFYSNIMNFFKTEITLANGEIRKRPLIETNGETGEIVWDKGRDFATVRKVLSMPQVNIVKKTEVQTGGFSKESILPKRNSDKLIARKKDWDPKKYGGFDSPTVAYSVLVVAKVEKGKSKKLKSVKELLGITIMERSSFEKNPIDFLEAKGYKEVKKDLIIKLPKYSLFELENGRKRMLASAGELQKGNELALPSKYVNFLYLASHYEKLKGSPEDNEQKQLFVEQHKHYLDEIIEQISEFSKRVILADANLDKVLSAYNKHRDKPIREQAENIIHLFTLTNLGAPAAFKYFDTTIDRKRYTSTKEVLDATLIHQSITGLYETRIDLSQLGGDGGGGSPAPGSSGGGRDIMKDIKVRLMTDSPDDSQDLMIGAIESNLFADQISWKSDQPVWLNQWPLKQEKLQALQQLVTEQLQLGHLEESNSPWNTPVFVIKKKSGKWRLLQDLRAVNATMHDMGALQPGLPSPVAVPKGWEIIIIDLQDCFFNIKLHPEDCKRFAFSVPSPNFKRPYQRFQWKVLPQGMKNSPTLCQKFVDKAILTVRDKYQDSYIVHYMDDILLAHPSRSIVDEILTSMIQALNKHGLVVSTEKIQKYDNLKYLGTHIQGDSVSYQKLQIRTDKLRTLNDFQKLLGNINWIRPFLKLTTGELKPLFEILNGDSNPISTRKLTPEACKALQLMNERLSTARVKRLDLSQPWSLCILKTEYTPTACLWQDGVVEWIHLPHISPKVITPYDIFCTQLIIKGRHRSKELFSKDPDYIVVPYTKVQFDLLLQEKEDWPISLLGFLGEVHFHLPKDPLLTFTLQTAIIFPHMTSTTPLEKGIVIFTDGSANGRSVTYIQGREPIIKENTQNTAQQAEIVAVITAFEEVSQPFNLYTDSKYVTGLFPEIETATLSPRTKIYTELKHLQRLIHKRQEKFYIGHIRGHTGLPGPLAQGNAYADSLTRILTAGKRTADGSEFEKRTADGSEFESPKKKAKVE

SEQ ID NO: 3230 - protein, 2024 aa, synthetic construct
MPAAKRVKLDGGDKKYSIGLDIGTNSVGWAVITDEYKVPSKKFKVLGNTDRHSIKKNLIGALLFDSGETAEATRLKRTARRRYTRRKNRICYLQEIFSNEMAKVDDSFFHRLEESFLVEEDKKHERHPIFGNIVDEVAYHEKYPTIYHLRKKLVDSTDKADLRLIYLALAHMIKFRGHFLIEGDLNPDNSDVDKLFIQLVQTYNQLFEENPINASGVDAKAILSARLSKSRRLENLIAQLPGEKKNGLFGNLIALSLGLTPNFKSNFDLAEDAKLQLSKDTYDDDLDNLLAQIGDQYADLFLAAKNLSDAILLSDILRVNTEITKAPLSASMIKRYDEHHQDLTLLKALVRQQLPEKYKEIFFDQSKNGYAGYIDGGASQEEFYKFIKPILEKMDGTEELLVKLNREDLLRKQRTFDNGSIPHQIHLGELHAILRRQEDFYPFLKDNREKIEKILTFRIPYYVGPLARGNSRFAWMTRKSEETITPWNFEEVVDKGASAQSFIERMTNFDKNLPNEKVLPKHSLLYEYFTVYNELTKVKYVTEGMRKPAFLSGEQKKAIVDLLFKTNRKVTVKQLKEDYFKKIECFDSVEISGVEDRFNASLGTYHDLLKIIKDKDFLDNEENEDILEDIVLTLTLFEDREMIEERLKTYAHLFDDKVMKQLKRRRYTGWGRLSRKLINGIRDKQSGKTILDFLKSDGFANRNFMQLIHDDSLTFKEDIQKAQVSGQGDSLHEHIANLAGSPAIKKGILQTVKVVDELVKVMGRHKPENIVIEMARENQTTQKGQKNSRERMKRIEEGIKELGSQILKEHPVENTQLQNEKLYLYYLQNGRDMYVDQELDINRLSDYDVDHIVPQSFLKDDSIDNKVLTRSDKARGKSDNVPSEEVVKKMKNYWRQLLNAKLITQRKFDNLTKAERGGLSELDKAGFIKRQLVETRQITKHVAQILDSRMNTKYDENDKLIREVKVITLKSKLVSDFRKDFQFYKVREINNYHHAHDAYLNAVVGTALIKKYPKLESEFVYGDYKVYDVRKMIAKSEQEIGKATAKYFFYSNIMNFFKTEITLANGEIRKRPLIETNGETGEIVWDKGRDFATVRKVLSMPQVNIVKKTEVQTGGFSKESILPKRNSDKLIARKKDWDPKKYGGFDSPTVAYSVLVVAKVEKGKSKKLKSVKELLGITIMERSSFEKNPIDFLEAKGYKEVKKDLIIKLPKYSLFELENGRKRMLASAGELQKGNELALPSKYVNFLYLASHYEKLKGSPEDNEQKQLFVEQHKHYLDEIIEQISEFSKRVILADANLDKVLSAYNKHRDKPIREQAENIIHLFTLTNLGAPAAFKYFDTTIDRKRYTSTKEVLDATLIHQSITGLYETRIDLSQLGGDGGEAAAKGGSGSSGGGRDIMKDIKVRLMTDSPDDSQDLMIGAIESNLFADQISWKSDQPVWLNQWPLKQEKLQALQQLVTEQLQLGHLEESNSPWNTPVFVIKKKSGKWRLLQDLRAVNATMHDMGALQPGLPSPVAVPKGWEIIIIDLQDCFFNIKLHPEDCKRFAFSVPSPNFKRPYQRFQWKVLPQGMKNSPTLCQKFVDKAILTVRDKYQDSYIVHYMDDILLAHPSRSIVDEILTSMIQALNKHGLVVSTEKIQKYDNLKYLGTHIQGDSVSYQKLQIRTDKLRTLNDFQKLLGNINWIRPFLKLTTGELKPLFEILNGDSNPISTRKLTPEACKALQLMNERLSTARVKRLDLSQPWSLCILKTEYTPTACLWQDGVVEWIHLPHISPKVITPYDIFCTQLIIKGRHRSKELFSKDPDYIVVPYTKVQFDLLLQEKEDWPISLLGFLGEVHFHLPKDPLLTFTLQTAIIFPHMTSTTPLEKGIVIFTDGSANGRSVTYIQGREPIIKENTQNTAQQAEIVAVITAFEEVSQPFNLYTDSKYVTGLFPEIETATLSPRTKIYTELKHLQRLIHKRQEKFYIGHIRGHTGLPGPLAQGNAYADSLTRILTAGKRTADGSEFEKRTADGSEFESPKKKAKVE

SEQ ID NO: 3231 - protein, 2022 aa, synthetic construct
MPAAKRVKLDGGDKKYSIGLDIGTNSVGWAVITDEYKVPSKKFKVLGNTDRHSIKKNLIGALLFDSGETAEATRLKRTARRRYTRRKNRICYLQEIFSNEMAKVDDSFFHRLEESFLVEEDKKHERHPIFGNIVDEVAYHEKYPTIYHLRKKLVDSTDKADLRLIYLALAHMIKFRGHFLIEGDLNPDNSDVDKLFIQLVQTYNQLFEENPINASGVDAKAILSARLSKSRRLENLIAQLPGEKKNGLFGNLIALSLGLTPNFKSNFDLAEDAKLQLSKDTYDDDLDNLLAQIGDQYADLFLAAKNLSDAILLSDILRVNTEITKAPLSASMIKRYDEHHQDLTLLKALVRQQLPEKYKEIFFDQSKNGYAGYIDGGASQEEFYKFIKPILEKMDGTEELLVKLNREDLLRKQRTFDNGSIPHQIHLGELHAILRRQEDFYPFLKDNREKIEKILTFRIPYYVGPLARGNSRFAWMTRKSEETITPWNFEEVVDKGASAQSFIERMTNFDKNLPNEKVLPKHSLLYEYFTVYNELTKVKYVTEGMRKPAFLSGEQKKAIVDLLFKTNRKVTVKQLKEDYFKKIECFDSVEISGVEDRFNASLGTYHDLLKIIKDKDFLDNEENEDILEDIVLTLTLFEDREMIEERLKTYAHLFDDKVMKQLKRRRYTGWGRLSRKLINGIRDKQSGKTILDFLKSDGFANRNFMQLIHDDSLTFKEDIQKAQVSGQGDSLHEHIANLAGSPAIKKGILQTVKVVDELVKVMGRHKPENIVIEMARENQTTQKGQKNSRERMKRIEEGIKELGSQILKEHPVENTQLQNEKLYLYYLQNGRDMYVDQELDINRLSDYDVDHIVPQSFLKDDSIDNKVLTRSDKARGKSDNVPSEEVVKKMKNYWRQLLNAKLITQRKFDNLTKAERGGLSELDKAGFIKRQLVETRQITKHVAQILDSRMNTKYDENDKLIREVKVITLKSKLVSDFRKDFQFYKVREINNYHHAHDAYLNAVVGTALIKKYPKLESEFVYGDYKVYDVRKMIAKSEQEIGKATAKYFFYSNIMNFFKTEITLANGEIRKRPLIETNGETGEIVWDKGRDFATVRKVLSMPQVNIVKKTEVQTGGFSKESILPKRNSDKLIARKKDWDPKKYGGFDSPTVAYSVLVVAKVEKGKSKKLKSVKELLGITIMERSSFEKNPIDFLEAKGYKEVKKDLIIKLPKYSLFELENGRKRMLASAGELQKGNELALPSKYVNFLYLASHYEKLKGSPEDNEQKQLFVEQHKHYLDEIIEQISEFSKRVILADANLDKVLSAYNKHRDKPIREQAENIIHLFTLTNLGAPAAFKYFDTTIDRKRYTSTKEVLDATLIHQSITGLYETRIDLSQLGGDGGGGGGSSPAPGGGRDIMKDIKVRLMTDSPDDSQDLMIGAIESNLFADQISWKSDQPVWLNQWPLKQEKLQALQQLVTEQLQLGHLEESNSPWNTPVFVIKKKSGKWRLLQDLRAVNATMHDMGALQPGLPSPVAVPKGWEIIIIDLQDCFFNIKLHPEDCKRFAFSVPSPNFKRPYQRFQWKVLPQGMKNSPTLCQKFVDKAILTVRDKYQDSYIVHYMDDILLAHPSRSIVDEILTSMIQALNKHGLVVSTEKIQKYDNLKYLGTHIQGDSVSYQKLQIRTDKLRTLNDFQKLLGNINWIRPFLKLTTGELKPLFEILNGDSNPISTRKLTPEACKALQLMNERLSTARVKRLDLSQPWSLCILKTEYTPTACLWQDGVVEWIHLPHISPKVITPYDIFCTQLIIKGRHRSKELFSKDPDYIVVPYTKVQFDLLLQEKEDWPISLLGFLGEVHFHLPKDPLLTFTLQTAIIFPHMTSTTPLEKGIVIFTDGSANGRSVTYIQGREPIIKENTQNTAQQAEIVAVITAFEEVSQPFNLYTDSKYVTGLFPEIETATLSPRTKIYTELKHLQRLIHKRQEKFYIGHIRGHTGLPGPLAQGNAYADSLTRILTAGKRTADGSEFEKRTADGSEFESPKKKAKVE

SEQ ID NO: 3232 - protein, 2024 aa, synthetic construct
MPAAKRVKLDGGDKKYSIGLDIGTNSVGWAVITDEYKVPSKKFKVLGNTDRHSIKKNLIGALLFDSGETAEATRLKRTARRRYTRRKNRICYLQEIFSNEMAKVDDSFFHRLEESFLVEEDKKHERHPIFGNIVDEVAYHEKYPTIYHLRKKLVDSTDKADLRLIYLALAHMIKFRGHFLIEGDLNPDNSDVDKLFIQLVQTYNQLFEENPINASGVDAKAILSARLSKSRRLENLIAQLPGEKKNGLFGNLIALSLGLTPNFKSNFDLAEDAKLQLSKDTYDDDLDNLLAQIGDQYADLFLAAKNLSDAILLSDILRVNTEITKAPLSASMIKRYDEHHQDLTLLKALVRQQLPEKYKEIFFDQSKNGYAGYIDGGASQEEFYKFIKPILEKMDGTEELLVKLNREDLLRKQRTFDNGSIPHQIHLGELHAILRRQEDFYPFLKDNREKIEKILTFRIPYYVGPLARGNSRFAWMTRKSEETITPWNFEEVVDKGASAQSFIERMTNFDKNLPNEKVLPKHSLLYEYFTVYNELTKVKYVTEGMRKPAFLSGEQKKAIVDLLFKTNRKVTVKQLKEDYFKKIECFDSVEISGVEDRFNASLGTYHDLLKIIKDKDFLDNEENEDILEDIVLTLTLFEDREMIEERLKTYAHLFDDKVMKQLKRRRYTGWGRLSRKLINGIRDKQSGKTILDFLKSDGFANRNFMQLIHDDSLTFKEDIQKAQVSGQGDSLHEHIANLAGSPAIKKGILQTVKVVDELVKVMGRHKPENIVIEMARENQTTQKGQKNSRERMKRIEEGIKELGSQILKEHPVENTQLQNEKLYLYYLQNGRDMYVDQELDINRLSDYDVDHIVPQSFLKDDSIDNKVLTRSDKARGKSDNVPSEEVVKKMKNYWRQLLNAKLITQRKFDNLTKAERGGLSELDKAGFIKRQLVETRQITKHVAQILDSRMNTKYDENDKLIREVKVITLKSKLVSDFRKDFQFYKVREINNYHHAHDAYLNAVVGTALIKKYPKLESEFVYGDYKVYDVRKMIAKSEQEIGKATAKYFFYSNIMNFFKTEITLANGEIRKRPLIETNGETGEIVWDKGRDFATVRKVLSMPQVNIVKKTEVQTGGFSKESILPKRNSDKLIARKKDWDPKKYGGFDSPTVAYSVLVVAKVEKGKSKKLKSVKELLGITIMERSSFEKNPIDFLEAKGYKEVKKDLIIKLPKYSLFELENGRKRMLASAGELQKGNELALPSKYVNFLYLASHYEKLKGSPEDNEQKQLFVEQHKHYLDEIIEQISEFSKRVILADANLDKVLSAYNKHRDKPIREQAENIIHLFTLTNLGAPAAFKYFDTTIDRKRYTSTKEVLDATLIHQSITGLYETRIDLSQLGGDGGGSSPAPEAAAKGGGRDIMKDIKVRLMTDSPDDSQDLMIGAIESNLFADQISWKSDQPVWLNQWPLKQEKLQALQQLVTEQLQLGHLEESNSPWNTPVFVIKKKSGKWRLLQDLRAVNATMHDMGALQPGLPSPVAVPKGWEIIIIDLQDCFFNIKLHPEDCKRFAFSVPSPNFKRPYQRFQWKVLPQGMKNSPTLCQKFVDKAILTVRDKYQDSYIVHYMDDILLAHPSRSIVDEILTSMIQALNKHGLVVSTEKIQKYDNLKYLGTHIQGDSVSYQKLQIRTDKLRTLNDFQKLLGNINWIRPFLKLTTGELKPLFEILNGDSNPISTRKLTPEACKALQLMNERLSTARVKRLDLSQPWSLCILKTEYTPTACLWQDGVVEWIHLPHISPKVITPYDIFCTQLIIKGRHRSKELFSKDPDYIVVPYTKVQFDLLLQEKEDWPISLLGFLGEVHFHLPKDPLLTFTLQTAIIFPHMTSTTPLEKGIVIFTDGSANGRSVTYIQGREPIIKENTQNTAQQAEIVAVITAFEEVSQPFNLYTDSKYVTGLFPEIETATLSPRTKIYTELKHLQRLIHKRQEKFYIGHIRGHTGLPGPLAQGNAYADSLTRILTAGKRTADGSEFEKRTADGSEFESPKKKAKVE

SEQ ID NO: 3233 - protein, 2022 aa, synthetic construct
MPAAKRVKLDGGDKKYSIGLDIGTNSVGWAVITDEYKVPSKKFKVLGNTDRHSIKKNLIGALLFDSGETAEATRLKRTARRRYTRRKNRICYLQEIFSNEMAKVDDSFFHRLEESFLVEEDKKHERHPIFGNIVDEVAYHEKYPTIYHLRKKLVDSTDKADLRLIYLALAHMIKFRGHFLIEGDLNPDNSDVDKLFIQLVQTYNQLFEENPINASGVDAKAILSARLSKSRRLENLIAQLPGEKKNGLFGNLIALSLGLTPNFKSNFDLAEDAKLQLSKDTYDDDLDNLLAQIGDQYADLFLAAKNLSDAILLSDILRVNTEITKAPLSASMIKRYDEHHQDLTLLKALVRQQLPEKYKEIFFDQSKNGYAGYIDGGASQEEFYKFIKPILEKMDGTEELLVKLNREDLLRKQRTFDNGSIPHQIHLGELHAILRRQEDFYPFLKDNREKIEKILTFRIPYYVGPLARGNSRFAWMTRKSEETITPWNFEEVVDKGASAQSFIERMTNFDKNLPNEKVLPKHSLLYEYFTVYNELTKVKYVTEGMRKPAFLSGEQKKAIVDLLFKTNRKVTVKQLKEDYFKKIECFDSVEISGVEDRFNASLGTYHDLLKIIKDKDFLDNEENEDILEDIVLTLTLFEDREMIEERLKTYAHLFDDKVMKQLKRRRYTGWGRLSRKLINGIRDKQSGKTILDFLKSDGFANRNFMQLIHDDSLTFKEDIQKAQVSGQGDSLHEHIANLAGSPAIKKGILQTVKVVDELVKVMGRHKPENIVIEMARENQTTQKGQKNSRERMKRIEEGIKELGSQILKEHPVENTQLQNEKLYLYYLQNGRDMYVDQELDINRLSDYDVDHIVPQSFLKDDSIDNKVLTRSDKARGKSDNVPSEEVVKKMKNYWRQLLNAKLITQRKFDNLTKAERGGLSELDKAGFIKRQLVETRQITKHVAQILDSRMNTKYDENDKLIREVKVITLKSKLVSDFRKDFQFYKVREINNYHHAHDAYLNAVVGTALIKKYPKLESEFVYGDYKVYDVRKMIAKSEQEIGKATAKYFFYSNIMNFFKTEITLANGEIRKRPLIETNGETGEIVWDKGRDFATVRKVLSMPQVNIVKKTEVQTGGFSKESILPKRNSDKLIARKKDWDPKKYGGFDSPTVAYSVLVVAKVEKGKSKKLKSVKELLGITIMERSSFEKNPIDFLEAKGYKEVKKDLIIKLPKYSLFELENGRKRMLASAGELQKGNELALPSKYVNFLYLASHYEKLKGSPEDNEQKQLFVEQHKHYLDEIIEQISEFSKRVILADANLDKVLSAYNKHRDKPIREQAENIIHLFTLTNLGAPAAFKYFDTTIDRKRYTSTKEVLDATLIHQSITGLYETRIDLSQLGGDGGPAPGGGGSSGGGRDIMKDIKVRLMTDSPDDSQDLMIGAIESNLFADQISWKSDQPVWLNQWPLKQEKLQALQQLVTEQLQLGHLEESNSPWNTPVFVIKKKSGKWRLLQDLRAVNATMHDMGALQPGLPSPVAVPKGWEIIIIDLQDCFFNIKLHPEDCKRFAFSVPSPNFKRPYQRFQWKVLPQGMKNSPTLCQKFVDKAILTVRDKYQDSYIVHYMDDILLAHPSRSIVDEILTSMIQALNKHGLVVSTEKIQKYDNLKYLGTHIQGDSVSYQKLQIRTDKLRTLNDFQKLLGNINWIRPFLKLTTGELKPLFEILNGDSNPISTRKLTPEACKALQLMNERLSTARVKRLDLSQPWSLCILKTEYTPTACLWQDGVVEWIHLPHISPKVITPYDIFCTQLIIKGRHRSKELFSKDPDYIVVPYTKVQFDLLLQEKEDWPISLLGFLGEVHFHLPKDPLLTFTLQTAIIFPHMTSTTPLEKGIVIFTDGSANGRSVTYIQGREPIIKENTQNTAQQAEIVAVITAFEEVSQPFNLYTDSKYVTGLFPEIETATLSPRTKIYTELKHLQRLIHKRQEKFYIGHIRGHTGLPGPLAQGNAYADSLTRILTAGKRTADGSEFEKRTADGSEFESPKKKAKVE

SEQ ID NO: 3234 - protein, 2022 aa, synthetic construct
MPAAKRVKLDGGDKKYSIGLDIGTNSVGWAVITDEYKVPSKKFKVLGNTDRHSIKKNLIGALLFDSGETAEATRLKRTARRRYTRRKNRICYLQEIFSNEMAKVDDSFFHRLEESFLVEEDKKHERHPIFGNIVDEVAYHEKYPTIYHLRKKLVDSTDKADLRLIYLALAHMIKFRGHFLIEGDLNPDNSDVDKLFIQLVQTYNQLFEENPINASGVDAKAILSARLSKSRRLENLIAQLPGEKKNGLFGNLIALSLGLTPNFKSNFDLAEDAKLQLSKDTYDDDLDNLLAQIGDQYADLFLAAKNLSDAILLSDILRVNTEITKAPLSASMIKRYDEHHQDLTLLKALVRQQLPEKYKEIFFDQSKNGYAGYIDGGASQEEFYKFIKPILEKMDGTEELLVKLNREDLLRKQRTFDNGSIPHQIHLGELHAILRRQEDFYPFLKDNREKIEKILTFRIPYYVGPLARGNSRFAWMTRKSEETITPWNFEEVVDKGASAQSFIERMTNFDKNLPNEKVLPKHSLLYEYFTVYNELTKVKYVTEGMRKPAFLSGEQKKAIVDLLFKTNRKVTVKQLKEDYFKKIECFDSVEISGVEDRFNASLGTYHDLLKIIKDKDFLDNEENEDILEDIVLTLTLFEDREMIEERLKTYAHLFDDKVMKQLKRRRYTGWGRLSRKLINGIRDKQSGKTILDFLKSDGFANRNFMQLIHDDSLTFKEDIQKAQVSGQGDSLHEHIANLAGSPAIKKGILQTVKVVDELVKVMGRHKPENIVIEMARENQTTQKGQKNSRERMKRIEEGIKELGSQILKEHPVENTQLQNEKLYLYYLQNGRDMYVDQELDINRLSDYDVDHIVPQSFLKDDSIDNKVLTRSDKARGKSDNVPSEEVVKKMKNYWRQLLNAKLITQRKFDNLTKAERGGLSELDKAGFIKRQLVETRQITKHVAQILDSRMNTKYDENDKLIREVKVITLKSKLVSDFRKDFQFYKVREINNYHHAHDAYLNAVVGTALIKKYPKLESEFVYGDYKVYDVRKMIAKSEQEIGKATAKYFFYSNIMNFFKTEITLANGEIRKRPLIETNGETGEIVWDKGRDFATVRKVLSMPQVNIVKKTEVQTGGFSKESILPKRNSDKLIARKKDWDPKKYGGFDSPTVAYSVLVVAKVEKGKSKKLKSVKELLGITIMERSSFEKNPIDFLEAKGYKEVKKDLIIKLPKYSLFELENGRKRMLASAGELQKGNELALPSKYVNFLYLASHYEKLKGSPEDNEQKQLFVEQHKHYLDEIIEQISEFSKRVILADANLDKVLSAYNKHRDKPIREQAENIIHLFTLTNLGAPAAFKYFDTTIDRKRYTSTKEVLDATLIHQSITGLYETRIDLSQLGGDGGPAPGGSGGGGGGRDIMKDIKVRLMTDSPDDSQDLMIGAIESNLFADQISWKSDQPVWLNQWPLKQEKLQALQQLVTEQLQLGHLEESNSPWNTPVFVIKKKSGKWRLLQDLRAVNATMHDMGALQPGLPSPVAVPKGWEIIIIDLQDCFFNIKLHPEDCKRFAFSVPSPNFKRPYQRFQWKVLPQGMKNSPTLCQKFVDKAILTVRDKYQDSYIVHYMDDILLAHPSRSIVDEILTSMIQALNKHGLVVSTEKIQKYDNLKYLGTHIQGDSVSYQKLQIRTDKLRTLNDFQKLLGNINWIRPFLKLTTGELKPLFEILNGDSNPISTRKLTPEACKALQLMNERLSTARVKRLDLSQPWSLCILKTEYTPTACLWQDGVVEWIHLPHISPKVITPYDIFCTQLIIKGRHRSKELFSKDPDYIVVPYTKVQFDLLLQEKEDWPISLLGFLGEVHFHLPKDPLLTFTLQTAIIFPHMTSTTPLEKGIVIFTDGSANGRSVTYIQGREPIIKENTQNTAQQAEIVAVITAFEEVSQPFNLYTDSKYVTGLFPEIETATLSPRTKIYTELKHLQRLIHKRQEKFYIGHIRGHTGLPGPLAQGNAYADSLTRILTAGKRTADGSEFEKRTADGSEFESPKKKAKVE

SEQ ID NO: 3235 - protein, 2024 aa, synthetic construct
MPAAKRVKLDGGDKKYSIGLDIGTNSVGWAVITDEYKVPSKKFKVLGNTDRHSIKKNLIGALLFDSGETAEATRLKRTARRRYTRRKNRICYLQEIFSNEMAKVDDSFFHRLEESFLVEEDKKHERHPIFGNIVDEVAYHEKYPTIYHLRKKLVDSTDKADLRLIYLALAHMIKFRGHFLIEGDLNPDNSDVDKLFIQLVQTYNQLFEENPINASGVDAKAILSARLSKSRRLENLIAQLPGEKKNGLFGNLIALSLGLTPNFKSNFDLAEDAKLQLSKDTYDDDLDNLLAQIGDQYADLFLAAKNLSDAILLSDILRVNTEITKAPLSASMIKRYDEHHQDLTLLKALVRQQLPEKYKEIFFDQSKNGYAGYIDGGASQEEFYKFIKPILEKMDGTEELLVKLNREDLLRKQRTFDNGSIPHQIHLGELHAILRRQEDFYPFLKDNREKIEKILTFRIPYYVGPLARGNSRFAWMTRKSEETITPWNFEEVVDKGASAQSFIERMTNFDKNLPNEKVLPKHSLLYEYFTVYNELTKVKYVTEGMRKPAFLSGEQKKAIVDLLFKTNRKVTVKQLKEDYFKKIECFDSVEISGVEDRFNASLGTYHDLLKIIKDKDFLDNEENEDILEDIVLTLTLFEDREMIEERLKTYAHLFDDKVMKQLKRRRYTGWGRLSRKLINGIRDKQSGKTILDFLKSDGFANRNFMQLIHDDSLTFKEDIQKAQVSGQGDSLHEHIANLAGSPAIKKGILQTVKVVDELVKVMGRHKPENIVIEMARENQTTQKGQKNSRERMKRIEEGIKELGSQILKEHPVENTQLQNEKLYLYYLQNGRDMYVDQELDINRLSDYDVDHIVPQSFLKDDSIDNKVLTRSDKARGKSDNVPSEEVVKKMKNYWRQLLNAKLITQRKFDNLTKAERGGLSELDKAGFIKRQLVETRQITKHVAQILDSRMNTKYDENDKLIREVKVITLKSKLVSDFRKDFQFYKVREINNYHHAHDAYLNAVVGTALIKKYPKLESEFVYGDYKVYDVRKMIAKSEQEIGKATAKYFFYSNIMNFFKTEITLANGEIRKRPLIETNGETGEIVWDKGRDFATVRKVLSMPQVNIVKKTEVQTGGFSKESILPKRNSDKLIARKKDWDPKKYGGFDSPTVAYSVLVVAKVEKGKSKKLKSVKELLGITIMERSSFEKNPIDFLEAKGYKEVKKDLIIKLPKYSLFELENGRKRMLASAGELQKGNELALPSKYVNFLYLASHYEKLKGSPEDNEQKQLFVEQHKHYLDEIIEQISEFSKRVILADANLDKVLSAYNKHRDKPIREQAENIIHLFTLTNLGAPAAFKYFDTTIDRKRYTSTKEVLDATLIHQSITGLYETRIDLSQLGGDGGGGSEAAAKGGGGGGRDIMKDIKVRLMTDSPDDSQDLMIGAIESNLFADQISWKSDQPVWLNQWPLKQEKLQALQQLVTEQLQLGHLEESNSPWNTPVFVIKKKSGKWRLLQDLRAVNATMHDMGALQPGLPSPVAVPKGWEIIIIDLQDCFFNIKLHPEDCKRFAFSVPSPNFKRPYQRFQWKVLPQGMKNSPTLCQKFVDKAILTVRDKYQDSYIVHYMDDILLAHPSRSIVDEILTSMIQALNKHGLVVSTEKIQKYDNLKYLGTHIQGDSVSYQKLQIRTDKLRTLNDFQKLLGNINWIRPFLKLTTGELKPLFEILNGDSNPISTRKLTPEACKALQLMNERLSTARVKRLDLSQPWSLCILKTEYTPTACLWQDGVVEWIHLPHISPKVITPYDIFCTQLIIKGRHRSKELFSKDPDYIVVPYTKVQFDLLLQEKEDWPISLLGFLGEVHFHLPKDPLLTFTLQTAIIFPHMTSTTPLEKGIVIFTDGSANGRSVTYIQGREPIIKENTQNTAQQAEIVAVITAFEEVSQPFNLYTDSKYVTGLFPEIETATLSPRTKIYTELKHLQRLIHKRQEKFYIGHIRGHTGLPGPLAQGNAYADSLTRILTAGKRTADGSEFEKRTADGSEFESPKKKAKVE

SEQ ID NO: 3236 - protein, 2024 aa, synthetic construct
MPAAKRVKLDGGDKKYSIGLDIGTNSVGWAVITDEYKVPSKKFKVLGNTDRHSIKKNLIGALLFDSGETAEATRLKRTARRRYTRRKNRICYLQEIFSNEMAKVDDSFFHRLEESFLVEEDKKHERHPIFGNIVDEVAYHEKYPTIYHLRKKLVDSTDKADLRLIYLALAHMIKFRGHFLIEGDLNPDNSDVDKLFIQLVQTYNQLFEENPINASGVDAKAILSARLSKSRRLENLIAQLPGEKKNGLFGNLIALSLGLTPNFKSNFDLAEDAKLQLSKDTYDDDLDNLLAQIGDQYADLFLAAKNLSDAILLSDILRVNTEITKAPLSASMIKRYDEHHQDLTLLKALVRQQLPEKYKEIFFDQSKNGYAGYIDGGASQEEFYKFIKPILEKMDGTEELLVKLNREDLLRKQRTFDNGSIPHQIHLGELHAILRRQEDFYPFLKDNREKIEKILTFRIPYYVGPLARGNSRFAWMTRKSEETITPWNFEEVVDKGASAQSFIERMTNFDKNLPNEKVLPKHSLLYEYFTVYNELTKVKYVTEGMRKPAFLSGEQKKAIVDLLFKTNRKVTVKQLKEDYFKKIECFDSVEISGVEDRFNASLGTYHDLLKIIKDKDFLDNEENEDILEDIVLTLTLFEDREMIEERLKTYAHLFDDKVMKQLKRRRYTGWGRLSRKLINGIRDKQSGKTILDFLKSDGFANRNFMQLIHDDSLTFKEDIQKAQVSGQGDSLHEHIANLAGSPAIKKGILQTVKVVDELVKVMGRHKPENIVIEMARENQTTQKGQKNSRERMKRIEEGIKELGSQILKEHPVENTQLQNEKLYLYYLQNGRDMYVDQELDINRLSDYDVDHIVPQSFLKDDSIDNKVLTRSDKARGKSDNVPSEEVVKKMKNYWRQLLNAKLITQRKFDNLTKAERGGLSELDKAGFIKRQLVETRQITKHVAQILDSRMNTKYDENDKLIREVKVITLKSKLVSDFRKDFQFYKVREINNYHHAHDAYLNAVVGTALIKKYPKLESEFVYGDYKVYDVRKMIAKSEQEIGKATAKYFFYSNIMNFFKTEITLANGEIRKRPLIETNGETGEIVWDKGRDFATVRKVLSMPQVNIVKKTEVQTGGFSKESILPKRNSDKLIARKKDWDPKKYGGFDSPTVAYSVLVVAKVEKGKSKKLKSVKELLGITIMERSSFEKNPIDFLEAKGYKEVKKDLIIKLPKYSLFELENGRKRMLASAGELQKGNELALPSKYVNFLYLASHYEKLKGSPEDNEQKQLFVEQHKHYLDEIIEQISEFSKRVILADANLDKVLSAYNKHRDKPIREQAENIIHLFTLTNLGAPAAFKYFDTTIDRKRYTSTKEVLDATLIHQSITGLYETRIDLSQLGGDGGPAPEAAAKGSSGGGRDIMKDIKVRLMTDSPDDSQDLMIGAIESNLFADQISWKSDQPVWLNQWPLKQEKLQALQQLVTEQLQLGHLEESNSPWNTPVFVIKKKSGKWRLLQDLRAVNATMHDMGALQPGLPSPVAVPKGWEIIIIDLQDCFFNIKLHPEDCKRFAFSVPSPNFKRPYQRFQWKVLPQGMKNSPTLCQKFVDKAILTVRDKYQDSYIVHYMDDILLAHPSRSIVDEILTSMIQALNKHGLVVSTEKIQKYDNLKYLGTHIQGDSVSYQKLQIRTDKLRTLNDFQKLLGNINWIRPFLKLTTGELKPLFEILNGDSNPISTRKLTPEACKALQLMNERLSTARVKRLDLSQPWSLCILKTEYTPTACLWQDGVVEWIHLPHISPKVITPYDIFCTQLIIKGRHRSKELFSKDPDYIVVPYTKVQFDLLLQEKEDWPISLLGFLGEVHFHLPKDPLLTFTLQTAIIFPHMTSTTPLEKGIVIFTDGSANGRSVTYIQGREPIIKENTQNTAQQAEIVAVITAFEEVSQPFNLYTDSKYVTGLFPEIETATLSPRTKIYTELKHLQRLIHKRQEKFYIGHIRGHTGLPGPLAQGNAYADSLTRILTAGKRTADGSEFEKRTADGSEFESPKKKAKVE

SEQ ID NO: 3237 - protein, 2024 aa, synthetic construct
MPAAKRVKLDGGDKKYSIGLDIGTNSVGWAVITDEYKVPSKKFKVLGNTDRHSIKKNLIGALLFDSGETAEATRLKRTARRRYTRRKNRICYLQEIFSNEMAKVDDSFFHRLEESFLVEEDKKHERHPIFGNIVDEVAYHEKYPTIYHLRKKLVDSTDKADLRLIYLALAHMIKFRGHFLIEGDLNPDNSDVDKLFIQLVQTYNQLFEENPINASGVDAKAILSARLSKSRRLENLIAQLPGEKKNGLFGNLIALSLGLTPNFKSNFDLAEDAKLQLSKDTYDDDLDNLLAQIGDQYADLFLAAKNLSDAILLSDILRVNTEITKAPLSASMIKRYDEHHQDLTLLKALVRQQLPEKYKEIFFDQSKNGYAGYIDGGASQEEFYKFIKPILEKMDGTEELLVKLNREDLLRKQRTFDNGSIPHQIHLGELHAILRRQEDFYPFLKDNREKIEKILTFRIPYYVGPLARGNSRFAWMTRKSEETITPWNFEEVVDKGASAQSFIERMTNFDKNLPNEKVLPKHSLLYEYFTVYNELTKVKYVTEGMRKPAFLSGEQKKAIVDLLFKTNRKVTVKQLKEDYFKKIECFDSVEISGVEDRFNASLGTYHDLLKIIKDKDFLDNEENEDILEDIVLTLTLFEDREMIEERLKTYAHLFDDKVMKQLKRRRYTGWGRLSRKLINGIRDKQSGKTILDFLKSDGFANRNFMQLIHDDSLTFKEDIQKAQVSGQGDSLHEHIANLAGSPAIKKGILQTVKVVDELVKVMGRHKPENIVIEMARENQTTQKGQKNSRERMKRIEEGIKELGSQILKEHPVENTQLQNEKLYLYYLQNGRDMYVDQELDINRLSDYDVDHIVPQSFLKDDSIDNKVLTRSDKARGKSDNVPSEEVVKKMKNYWRQLLNAKLITQRKFDNLTKAERGGLSELDKAGFIKRQLVETRQITKHVAQILDSRMNTKYDENDKLIREVKVITLKSKLVSDFRKDFQFYKVREINNYHHAHDAYLNAVVGTALIKKYPKLESEFVYGDYKVYDVRKMIAKSEQEIGKATAKYFFYSNIMNFFKTEITLANGEIRKRPLIETNGETGEIVWDKGRDFATVRKVLSMPQVNIVKKTEVQTGGFSKESILPKRNSDKLIARKKDWDPKKYGGFDSPTVAYSVLVVAKVEKGKSKKLKSVKELLGITIMERSSFEKNPIDFLEAKGYKEVKKDLIIKLPKYSLFELENGRKRMLASAGELQKGNELALPSKYVNFLYLASHYEKLKGSPEDNEQKQLFVEQHKHYLDEIIEQISEFSKRVILADANLDKVLSAYNKHRDKPIREQAENIIHLFTLTNLGAPAAFKYFDTTIDRKRYTSTKEVLDATLIHQSITGLYETRIDLSQLGGDGGGGSEAAAKPAPGGGRDIMKDIKVRLMTDSPDDSQDLMIGAIESNLFADQISWKSDQPVWLNQWPLKQEKLQALQQLVTEQLQLGHLEESNSPWNTPVFVIKKKSGKWRLLQDLRAVNATMHDMGALQPGLPSPVAVPKGWEIIIIDLQDCFFNIKLHPEDCKRFAFSVPSPNFKRPYQRFQWKVLPQGMKNSPTLCQKFVDKAILTVRDKYQDSYIVHYMDDILLAHPSRSIVDEILTSMIQALNKHGLVVSTEKIQKYDNLKYLGTHIQGDSVSYQKLQIRTDKLRTLNDFQKLLGNINWIRPFLKLTTGELKPLFEILNGDSNPISTRKLTPEACKALQLMNERLSTARVKRLDLSQPWSLCILKTEYTPTACLWQDGVVEWIHLPHISPKVITPYDIFCTQLIIKGRHRSKELFSKDPDYIVVPYTKVQFDLLLQEKEDWPISLLGFLGEVHFHLPKDPLLTFTLQTAIIFPHMTSTTPLEKGIVIFTDGSANGRSVTYIQGREPIIKENTQNTAQQAEIVAVITAFEEVSQPFNLYTDSKYVTGLFPEIETATLSPRTKIYTELKHLQRLIHKRQEKFYIGHIRGHTGLPGPLAQGNAYADSLTRILTAGKRTADGSEFEKRTADGSEFESPKKKAKVE

SEQ ID NO: 3238 - protein, 2046 aa, synthetic construct
MPAAKRVKLDGGDKKYSIGLDIGTNSVGWAVITDEYKVPSKKFKVLGNTDRHSIKKNLIGALLFDSGETAEATRLKRTARRRYTRRKNRICYLQEIFSNEMAKVDDSFFHRLEESFLVEEDKKHERHPIFGNIVDEVAYHEKYPTIYHLRKKLVDSTDKADLRLIYLALAHMIKFRGHFLIEGDLNPDNSDVDKLFIQLVQTYNQLFEENPINASGVDAKAILSARLSKSRRLENLIAQLPGEKKNGLFGNLIALSLGLTPNFKSNFDLAEDAKLQLSKDTYDDDLDNLLAQIGDQYADLFLAAKNLSDAILLSDILRVNTEITKAPLSASMIKRYDEHHQDLTLLKALVRQQLPEKYKEIFFDQSKNGYAGYIDGGASQEEFYKFIKPILEKMDGTEELLVKLNREDLLRKQRTFDNGSIPHQIHLGELHAILRRQEDFYPFLKDNREKIEKILTFRIPYYVGPLARGNSRFAWMTRKSEETITPWNFEEVVDKGASAQSFIERMTNFDKNLPNEKVLPKHSLLYEYFTVYNELTKVKYVTEGMRKPAFLSGEQKKAIVDLLFKTNRKVTVKQLKEDYFKKIECFDSVEISGVEDRFNASLGTYHDLLKIIKDKDFLDNEENEDILEDIVLTLTLFEDREMIEERLKTYAHLFDDKVMKQLKRRRYTGWGRLSRKLINGIRDKQSGKTILDFLKSDGFANRNFMQLIHDDSLTFKEDIQKAQVSGQGDSLHEHIANLAGSPAIKKGILQTVKVVDELVKVMGRHKPENIVIEMARENQTTQKGQKNSRERMKRIEEGIKELGSQILKEHPVENTQLQNEKLYLYYLQNGRDMYVDQELDINRLSDYDVDHIVPQSFLKDDSIDNKVLTRSDKARGKSDNVPSEEVVKKMKNYWRQLLNAKLITQRKFDNLTKAERGGLSELDKAGFIKRQLVETRQITKHVAQILDSRMNTKYDENDKLIREVKVITLKSKLVSDFRKDFQFYKVREINNYHHAHDAYLNAVVGTALIKKYPKLESEFVYGDYKVYDVRKMIAKSEQEIGKATAKYFFYSNIMNFFKTEITLANGEIRKRPLIETNGETGEIVWDKGRDFATVRKVLSMPQVNIVKKTEVQTGGFSKESILPKRNSDKLIARKKDWDPKKYGGFDSPTVAYSVLVVAKVEKGKSKKLKSVKELLGITIMERSSFEKNPIDFLEAKGYKEVKKDLIIKLPKYSLFELENGRKRMLASAGELQKGNELALPSKYVNFLYLASHYEKLKGSPEDNEQKQLFVEQHKHYLDEIIEQISEFSKRVILADANLDKVLSAYNKHRDKPIREQAENIIHLFTLTNLGAPAAFKYFDTTIDRKRYTSTKEVLDATLIHQSITGLYETRIDLSQLGGDGGSGGSSGGSSGSETPGTSESATPESSGGSSGGSSGGGRDIMKDIKVRLMTDSPDDSQDLMIGAIESNLFADQISWKSDQPVWLNQWPLKQEKLQALQQLVTEQLQLGHLEESNSPWNTPVFVIKKKSGKWRLLQDLRAVNATMHDMGALQPGLPSPVAVPKGWEIIIIDLQDCFFNIKLHPEDCKRFAFSVPSPNFKRPYQRFQWKVLPQGMKNSPTLCQKFVDKAILTVRDKYQDSYIVHYMDDILLAHPSRSIVDEILTSMIQALNKHGLVVSTEKIQKYDNLKYLGTHIQGDSVSYQKLQIRTDKLRTLNDFQKLLGNINWIRPFLKLTTGELKPLFEILNGDSNPISTRKLTPEACKALQLMNERLSTARVKRLDLSQPWSLCILKTEYTPTACLWQDGVVEWIHLPHISPKVITPYDIFCTQLIIKGRHRSKELFSKDPDYIVVPYTKVQFDLLLQEKEDWPISLLGFLGEVHFHLPKDPLLTFTLQTAIIFPHMTSTTPLEKGIVIFTDGSANGRSVTYIQGREPIIKENTQNTAQQAEIVAVITAFEEVSQPFNLYTDSKYVTGLFPEIETATLSPRTKIYTELKHLQRLIHKRQEKFYIGHIRGHTGLPGPLAQGNAYADSLTRILTAGKRTADGSEFEKRTADGSEFESPKKKAKVE

SEQ ID NO: 3239 - protein, 2025 aa, synthetic construct
MPAAKRVKLDGGDKKYSIGLDIGTNSVGWAVITDEYKVPSKKFKVLGNTDRHSIKKNLIGALLFDSGETAEATRLKRTARRRYTRRKNRICYLQEIFSNEMAKVDDSFFHRLEESFLVEEDKKHERHPIFGNIVDEVAYHEKYPTIYHLRKKLVDSTDKADLRLIYLALAHMIKFRGHFLIEGDLNPDNSDVDKLFIQLVQTYNQLFEENPINASGVDAKAILSARLSKSRRLENLIAQLPGEKKNGLFGNLIALSLGLTPNFKSNFDLAEDAKLQLSKDTYDDDLDNLLAQIGDQYADLFLAAKNLSDAILLSDILRVNTEITKAPLSASMIKRYDEHHQDLTLLKALVRQQLPEKYKEIFFDQSKNGYAGYIDGGASQEEFYKFIKPILEKMDGTEELLVKLNREDLLRKQRTFDNGSIPHQIHLGELHAILRRQEDFYPFLKDNREKIEKILTFRIPYYVGPLARGNSRFAWMTRKSEETITPWNFEEVVDKGASAQSFIERMTNFDKNLPNEKVLPKHSLLYEYFTVYNELTKVKYVTEGMRKPAFLSGEQKKAIVDLLFKTNRKVTVKQLKEDYFKKIECFDSVEISGVEDRFNASLGTYHDLLKIIKDKDFLDNEENEDILEDIVLTLTLFEDREMIEERLKTYAHLFDDKVMKQLKRRRYTGWGRLSRKLINGIRDKQSGKTILDFLKSDGFANRNFMQLIHDDSLTFKEDIQKAQVSGQGDSLHEHIANLAGSPAIKKGILQTVKVVDELVKVMGRHKPENIVIEMARENQTTQKGQKNSRERMKRIEEGIKELGSQILKEHPVENTQLQNEKLYLYYLQNGRDMYVDQELDINRLSDYDVDHIVPQSFLKDDSIDNKVLTRSDKARGKSDNVPSEEVVKKMKNYWRQLLNAKLITQRKFDNLTKAERGGLSELDKAGFIKRQLVETRQITKHVAQILDSRMNTKYDENDKLIREVKVITLKSKLVSDFRKDFQFYKVREINNYHHAHDAYLNAVVGTALIKKYPKLESEFVYGDYKVYDVRKMIAKSEQEIGKATAKYFFYSNIMNFFKTEITLANGEIRKRPLIETNGETGEIVWDKGRDFATVRKVLSMPQVNIVKKTEVQTGGFSKESILPKRNSDKLIARKKDWDPKKYGGFDSPTVAYSVLVVAKVEKGKSKKLKSVKELLGITIMERSSFEKNPIDFLEAKGYKEVKKDLIIKLPKYSLFELENGRKRMLASAGELQKGNELALPSKYVNFLYLASHYEKLKGSPEDNEQKQLFVEQHKHYLDEIIEQISEFSKRVILADANLDKVLSAYNKHRDKPIREQAENIIHLFTLTNLGAPAAFKYFDTTIDRKRYTSTKEVLDATLIHQSITGLYETRIDLSQLGGDGGGSSGSSGSSGSSGGGRDIMKDIKVRLMTDSPDDSQDLMIGAIESNLFADQISWKSDQPVWLNQWPLKQEKLQALQQLVTEQLQLGHLEESNSPWNTPVFVIKKKSGKWRLLQDLRAVNATMHDMGALQPGLPSPVAVPKGWEIIIIDLQDCFFNIKLHPEDCKRFAFSVPSPNFKRPYQRFQWKVLPQGMKNSPTLCQKFVDKAILTVRDKYQDSYIVHYMDDILLAHPSRSIVDEILTSMIQALNKHGLVVSTEKIQKYDNLKYLGTHIQGDSVSYQKLQIRTDKLRTLNDFQKLLGNINWIRPFLKLTTGELKPLFEILNGDSNPISTRKLTPEACKALQLMNERLSTARVKRLDLSQPWSLCILKTEYTPTACLWQDGVVEWIHLPHISPKVITPYDIFCTQLIIKGRHRSKELFSKDPDYIVVPYTKVQFDLLLQEKEDWPISLLGFLGEVHFHLPKDPLLTFTLQTAIIFPHMTSTTPLEKGIVIFTDGSANGRSVTYIQGREPIIKENTQNTAQQAEIVAVITAFEEVSQPFNLYTDSKYVTGLFPEIETATLSPRTKIYTELKHLQRLIHKRQEKFYIGHIRGHTGLPGPLAQGNAYADSLTRILTAGKRTADGSEFEKRTADGSEFESPKKKAKVE

SEQ ID NO: 3240 - protein, 2022 aa, synthetic construct
MPAAKRVKLDGGDKKYSIGLDIGTNSVGWAVITDEYKVPSKKFKVLGNTDRHSIKKNLIGALLFDSGETAEATRLKRTARRRYTRRKNRICYLQEIFSNEMAKVDDSFFHRLEESFLVEEDKKHERHPIFGNIVDEVAYHEKYPTIYHLRKKLVDSTDKADLRLIYLALAHMIKFRGHFLIEGDLNPDNSDVDKLFIQLVQTYNQLFEENPINASGVDAKAILSARLSKSRRLENLIAQLPGEKKNGLFGNLIALSLGLTPNFKSNFDLAEDAKLQLSKDTYDDDLDNLLAQIGDQYADLFLAAKNLSDAILLSDILRVNTEITKAPLSASMIKRYDEHHQDLTLLKALVRQQLPEKYKEIFFDQSKNGYAGYIDGGASQEEFYKFIKPILEKMDGTEELLVKLNREDLLRKQRTFDNGSIPHQIHLGELHAILRRQEDFYPFLKDNREKIEKILTFRIPYYVGPLARGNSRFAWMTRKSEETITPWNFEEVVDKGASAQSFIERMTNFDKNLPNEKVLPKHSLLYEYFTVYNELTKVKYVTEGMRKPAFLSGEQKKAIVDLLFKTNRKVTVKQLKEDYFKKIECFDSVEISGVEDRFNASLGTYHDLLKIIKDKDFLDNEENEDILEDIVLTLTLFEDREMIEERLKTYAHLFDDKVMKQLKRRRYTGWGRLSRKLINGIRDKQSGKTILDFLKSDGFANRNFMQLIHDDSLTFKEDIQKAQVSGQGDSLHEHIANLAGSPAIKKGILQTVKVVDELVKVMGRHKPENIVIEMARENQTTQKGQKNSRERMKRIEEGIKELGSQILKEHPVENTQLQNEKLYLYYLQNGRDMYVDQELDINRLSDYDVDHIVPQSFLKDDSIDNKVLTRSDKARGKSDNVPSEEVVKKMKNYWRQLLNAKLITQRKFDNLTKAERGGLSELDKAGFIKRQLVETRQITKHVAQILDSRMNTKYDENDKLIREVKVITLKSKLVSDFRKDFQFYKVREINNYHHAHDAYLNAVVGTALIKKYPKLESEFVYGDYKVYDVRKMIAKSEQEIGKATAKYFFYSNIMNFFKTEITLANGEIRKRPLIETNGETGEIVWDKGRDFATVRKVLSMPQVNIVKKTEVQTGGFSKESILPKRNSDKLIARKKDWDPKKYGGFDSPTVAYSVLVVAKVEKGKSKKLKSVKELLGITIMERSSFEKNPIDFLEAKGYKEVKKDLIIKLPKYSLFELENGRKRMLASAGELQKGNELALPSKYVNFLYLASHYEKLKGSPEDNEQKQLFVEQHKHYLDEIIEQISEFSKRVILADANLDKVLSAYNKHRDKPIREQAENIIHLFTLTNLGAPAAFKYFDTTIDRKRYTSTKEVLDATLIHQSITGLYETRIDLSQLGGDGGGGGGGSGSSGGGRDIMKDIKVRLMTDSPDDSQDLMIGAIESNLFADQISWKSDQPVWLNQWPLKQEKLQALQQLVTEQLQLGHLEESNSPWNTPVFVIKKKSGKWRLLQDLRAVNATMHDMGALQPGLPSPVAVPKGWEIIIIDLQDCFFNIKLHPEDCKRFAFSVPSPNFKRPYQRFQWKVLPQGMKNSPTLCQKFVDKAILTVRDKYQDSYIVHYMDDILLAHPSRSIVDEILTSMIQALNKHGLVVSTEKIQKYDNLKYLGTHIQGDSVSYQKLQIRTDKLRTLNDFQKLLGNINWIRPFLKLTTGELKPLFEILNGDSNPISTRKLTPEACKALQLMNERLSTARVKRLDLSQPWSLCILKTEYTPTACLWQDGVVEWIHLPHISPKVITPYDIFCTQLIIKGRHRSKELFSKDPDYIVVPYTKVQFDLLLQEKEDWPISLLGFLGEVHFHLPKDPLLTFTLQTAIIFPHMTSTTPLEKGIVIFTDGSANGRSVTYIQGREPIIKENTQNTAQQAEIVAVITAFEEVSQPFNLYTDSKYVTGLFPEIETATLSPRTKIYTELKHLQRLIHKRQEKFYIGHIRGHTGLPGPLAQGNAYADSLTRILTAGKRTADGSEFEKRTADGSEFESPKKKAKVE

SEQ ID NO: 3241 - protein, 2022 aa, synthetic construct
MPAAKRVKLDGGDKKYSIGLDIGTNSVGWAVITDEYKVPSKKFKVLGNTDRHSIKKNLIGALLFDSGETAEATRLKRTARRRYTRRKNRICYLQEIFSNEMAKVDDSFFHRLEESFLVEEDKKHERHPIFGNIVDEVAYHEKYPTIYHLRKKLVDSTDKADLRLIYLALAHMIKFRGHFLIEGDLNPDNSDVDKLFIQLVQTYNQLFEENPINASGVDAKAILSARLSKSRRLENLIAQLPGEKKNGLFGNLIALSLGLTPNFKSNFDLAEDAKLQLSKDTYDDDLDNLLAQIGDQYADLFLAAKNLSDAILLSDILRVNTEITKAPLSASMIKRYDEHHQDLTLLKALVRQQLPEKYKEIFFDQSKNGYAGYIDGGASQEEFYKFIKPILEKMDGTEELLVKLNREDLLRKQRTFDNGSIPHQIHLGELHAILRRQEDFYPFLKDNREKIEKILTFRIPYYVGPLARGNSRFAWMTRKSEETITPWNFEEVVDKGASAQSFIERMTNFDKNLPNEKVLPKHSLLYEYFTVYNELTKVKYVTEGMRKPAFLSGEQKKAIVDLLFKTNRKVTVKQLKEDYFKKIECFDSVEISGVEDRFNASLGTYHDLLKIIKDKDFLDNEENEDILEDIVLTLTLFEDREMIEERLKTYAHLFDDKVMKQLKRRRYTGWGRLSRKLINGIRDKQSGKTILDFLKSDGFANRNFMQLIHDDSLTFKEDIQKAQVSGQGDSLHEHIANLAGSPAIKKGILQTVKVVDELVKVMGRHKPENIVIEMARENQTTQKGQKNSRERMKRIEEGIKELGSQILKEHPVENTQLQNEKLYLYYLQNGRDMYVDQELDINRLSDYDVDHIVPQSFLKDDSIDNKVLTRSDKARGKSDNVPSEEVVKKMKNYWRQLLNAKLITQRKFDNLTKAERGGLSELDKAGFIKRQLVETRQITKHVAQILDSRMNTKYDENDKLIREVKVITLKSKLVSDFRKDFQFYKVREINNYHHAHDAYLNAVVGTALIKKYPKLESEFVYGDYKVYDVRKMIAKSEQEIGKATAKYFFYSNIMNFFKTEITLANGEIRKRPLIETNGETGEIVWDKGRDFATVRKVLSMPQVNIVKKTEVQTGGFSKESILPKRNSDKLIARKKDWDPKKYGGFDSPTVAYSVLVVAKVEKGKSKKLKSVKELLGITIMERSSFEKNPIDFLEAKGYKEVKKDLIIKLPKYSLFELENGRKRMLASAGELQKGNELALPSKYVNFLYLASHYEKLKGSPEDNEQKQLFVEQHKHYLDEIIEQISEFSKRVILADANLDKVLSAYNKHRDKPIREQAENIIHLFTLTNLGAPAAFKYFDTTIDRKRYTSTKEVLDATLIHQSITGLYETRIDLSQLGGDGGGGGGSSGGSGGGRDIMKDIKVRLMTDSPDDSQDLMIGAIESNLFADQISWKSDQPVWLNQWPLKQEKLQALQQLVTEQLQLGHLEESNSPWNTPVFVIKKKSGKWRLLQDLRAVNATMHDMGALQPGLPSPVAVPKGWEIIIIDLQDCFFNIKLHPEDCKRFAFSVPSPNFKRPYQRFQWKVLPQGMKNSPTLCQKFVDKAILTVRDKYQDSYIVHYMDDILLAHPSRSIVDEILTSMIQALNKHGLVVSTEKIQKYDNLKYLGTHIQGDSVSYQKLQIRTDKLRTLNDFQKLLGNINWIRPFLKLTTGELKPLFEILNGDSNPISTRKLTPEACKALQLMNERLSTARVKRLDLSQPWSLCILKTEYTPTACLWQDGVVEWIHLPHISPKVITPYDIFCTQLIIKGRHRSKELFSKDPDYIVVPYTKVQFDLLLQEKEDWPISLLGFLGEVHFHLPKDPLLTFTLQTAIIFPHMTSTTPLEKGIVIFTDGSANGRSVTYIQGREPIIKENTQNTAQQAEIVAVITAFEEVSQPFNLYTDSKYVTGLFPEIETATLSPRTKIYTELKHLQRLIHKRQEKFYIGHIRGHTGLPGPLAQGNAYADSLTRILTAGKRTADGSEFEKRTADGSEFESPKKKAKVE

SEQ ID NO: 3242 - protein, 2019 aa, synthetic construct
MPAAKRVKLDGGDKKYSIGLDIGTNSVGWAVITDEYKVPSKKFKVLGNTDRHSIKKNLIGALLFDSGETAEATRLKRTARRRYTRRKNRICYLQEIFSNEMAKVDDSFFHRLEESFLVEEDKKHERHPIFGNIVDEVAYHEKYPTIYHLRKKLVDSTDKADLRLIYLALAHMIKFRGHFLIEGDLNPDNSDVDKLFIQLVQTYNQLFEENPINASGVDAKAILSARLSKSRRLENLIAQLPGEKKNGLFGNLIALSLGLTPNFKSNFDLAEDAKLQLSKDTYDDDLDNLLAQIGDQYADLFLAAKNLSDAILLSDILRVNTEITKAPLSASMIKRYDEHHQDLTLLKALVRQQLPEKYKEIFFDQSKNGYAGYIDGGASQEEFYKFIKPILEKMDGTEELLVKLNREDLLRKQRTFDNGSIPHQIHLGELHAILRRQEDFYPFLKDNREKIEKILTFRIPYYVGPLARGNSRFAWMTRKSEETITPWNFEEVVDKGASAQSFIERMTNFDKNLPNEKVLPKHSLLYEYFTVYNELTKVKYVTEGMRKPAFLSGEQKKAIVDLLFKTNRKVTVKQLKEDYFKKIECFDSVEISGVEDRFNASLGTYHDLLKIIKDKDFLDNEENEDILEDIVLTLTLFEDREMIEERLKTYAHLFDDKVMKQLKRRRYTGWGRLSRKLINGIRDKQSGKTILDFLKSDGFANRNFMQLIHDDSLTFKEDIQKAQVSGQGDSLHEHIANLAGSPAIKKGILQTVKVVDELVKVMGRHKPENIVIEMARENQTTQKGQKNSRERMKRIEEGIKELGSQILKEHPVENTQLQNEKLYLYYLQNGRDMYVDQELDINRLSDYDVDHIVPQSFLKDDSIDNKVLTRSDKARGKSDNVPSEEVVKKMKNYWRQLLNAKLITQRKFDNLTKAERGGLSELDKAGFIKRQLVETRQITKHVAQILDSRMNTKYDENDKLIREVKVITLKSKLVSDFRKDFQFYKVREINNYHHAHDAYLNAVVGTALIKKYPKLESEFVYGDYKVYDVRKMIAKSEQEIGKATAKYFFYSNIMNFFKTEITLANGEIRKRPLIETNGETGEIVWDKGRDFATVRKVLSMPQVNIVKKTEVQTGGFSKESILPKRNSDKLIARKKDWDPKKYGGFDSPTVAYSVLVVAKVEKGKSKKLKSVKELLGITIMERSSFEKNPIDFLEAKGYKEVKKDLIIKLPKYSLFELENGRKRMLASAGELQKGNELALPSKYVNFLYLASHYEKLKGSPEDNEQKQLFVEQHKHYLDEIIEQISEFSKRVILADANLDKVLSAYNKHRDKPIREQAENIIHLFTLTNLGAPAAFKYFDTTIDRKRYTSTKEVLDATLIHQSITGLYETRIDLSQLGGDGGGGSGSSGGGRDIMKDIKVRLMTDSPDDSQDLMIGAIESNLFADQISWKSDQPVWLNQWPLKQEKLQALQQLVTEQLQLGHLEESNSPWNTPVFVIKKKSGKWRLLQDLRAVNATMHDMGALQPGLPSPVAVPKGWEIIIIDLQDCFFNIKLHPEDCKRFAFSVPSPNFKRPYQRFQWKVLPQGMKNSPTLCQKFVDKAILTVRDKYQDSYIVHYMDDILLAHPSRSIVDEILTSMIQALNKHGLVVSTEKIQKYDNLKYLGTHIQGDSVSYQKLQIRTDKLRTLNDFQKLLGNINWIRPFLKLTTGELKPLFEILNPDSNPISTRKLTPEACKALQLMNERLSTARVKRLDLSQPWSLCILKTEYTPTACLWQDGVVEWIHLPHISPKVITPYDIFCTQLIIKGRHRSKELFSKDPDYIVVPYTKVQFDLLLQEKEDWPISLLGFLGEVHFHLPKDPLLTFTLQTAIIFPHMTSTTPLEKGIVIFTDGSANGRSVTYIQGREPIIKENTQNTAQQAEIVAVITAFEEVSQPFNLYTDSKYVTGLFPEIETATLSPRTKIYTELKHLQRLIHKRQEKFYIGHIRGHTGLPGPLAQGNAYADSLTRILTAGKRTADGSEFEKRTADGSEFESPKKKAKVE

SEQ ID NO: 3243 - protein, 2022 aa, synthetic construct
MPAAKRVKLDGGDKKYSIGLDIGTNSVGWAVITDEYKVPSKKFKVLGNTDRHSIKKNLIGALLFDSGETAEATRLKRTARRRYTRRKNRICYLQEIFSNEMAKVDDSFFHRLEESFLVEEDKKHERHPIFGNIVDEVAYHEKYPTIYHLRKKLVDSTDKADLRLIYLALAHMIKFRGHFLIEGDLNPDNSDVDKLFIQLVQTYNQLFEENPINASGVDAKAILSARLSKSRRLENLIAQLPGEKKNGLFGNLIALSLGLTPNFKSNFDLAEDAKLQLSKDTYDDDLDNLLAQIGDQYADLFLAAKNLSDAILLSDILRVNTEITKAPLSASMIKRYDEHHQDLTLLKALVRQQLPEKYKEIFFDQSKNGYAGYIDGGASQEEFYKFIKPILEKMDGTEELLVKLNREDLLRKQRTFDNGSIPHQIHLGELHAILRRQEDFYPFLKDNREKIEKILTFRIPYYVGPLARGNSRFAWMTRKSEETITPWNFEEVVDKGASAQSFIERMTNFDKNLPNEKVLPKHSLLYEYFTVYNELTKVKYVTEGMRKPAFLSGEQKKAIVDLLFKTNRKVTVKQLKEDYFKKIECFDSVEISGVEDRFNASLGTYHDLLKIIKDKDFLDNEENEDILEDIVLTLTLFEDREMIEERLKTYAHLFDDKVMKQLKRRRYTGWGRLSRKLINGIRDKQSGKTILDFLKSDGFANRNFMQLIHDDSLTFKEDIQKAQVSGQGDSLHEHIANLAGSPAIKKGILQTVKVVDELVKVMGRHKPENIVIEMARENQTTQKGQKNSRERMKRIEEGIKELGSQILKEHPVENTQLQNEKLYLYYLQNGRDMYVDQELDINRLSDYDVDHIVPQSFLKDDSIDNKVLTRSDKARGKSDNVPSEEVVKKMKNYWRQLLNAKLITQRKFDNLTKAERGGLSELDKAGFIKRQLVETRQITKHVAQILDSRMNTKYDENDKLIREVKVITLKSKLVSDFRKDFQFYKVREINNYHHAHDAYLNAVVGTALIKKYPKLESEFVYGDYKVYDVRKMIAKSEQEIGKATAKYFFYSNIMNFFKTEITLANGEIRKRPLIETNGETGEIVWDKGRDFATVRKVLSMPQVNIVKKTEVQTGGFSKESILPKRNSDKLIARKKDWDPKKYGGFDSPTVAYSVLVVAKVEKGKSKKLKSVKELLGITIMERSSFEKNPIDFLEAKGYKEVKKDLIIKLPKYSLFELENGRKRMLASAGELQKGNELALPSKYVNFLYLASHYEKLKGSPEDNEQKQLFVEQHKHYLDEIIEQISEFSKRVILADANLDKVLSAYNKHRDKPIREQAENIIHLFTLTNLGAPAAFKYFDTTIDRKRYTSTKEVLDATLIHQSITGLYETRIDLSQLGGDGGGGGGGSGSSGGGRDIMKDIKVRLMTDSPDDSQDLMIGAIESNLFADQISWKSDQPVWLNQWPLKQEKLQALQQLVTEQLQLGHLEESNSPWNTPVFVIKKKSGKWRLLQDLRAVNATMHDMGALQPGLPSPVAVPKGWEIIIIDLQDCFFNIKLHPEDCKRFAFSVPSPNFKRPYQRFQWKVLPQGMKNSPTLCQKFVDKAILTVRDKYQDSYIVHYMDDILLAHPSRSIVDEILTSMIQALNKHGLVVSTEKIQKYDNLKYLGTHIQGDSVSYQKLQIRTDKLRTLNDFQKLLGNINWIRPFLKLTTGELKPLFEILNPDSNPISTRKLTPEACKALQLMNERLSTARVKRLDLSQPWSLCILKTEYTPTACLWQDGVVEWIHLPHISPKVITPYDIFCTQLIIKGRHRSKELFSKDPDYIVVPYTKVQFDLLLQEKEDWPISLLGFLGEVHFHLPKDPLLTFTLQTAIIFPHMTSTTPLEKGIVIFTDGSANGRSVTYIQGREPIIKENTQNTAQQAEIVAVITAFEEVSQPFNLYTDSKYVTGLFPEIETATLSPRTKIYTELKHLQRLIHKRQEKFYIGHIRGHTGLPGPLAQGNAYADSLTRILTAGKRTADGSEFEKRTADGSEFESPKKKAKVE

SEQ ID NO: 3244 - protein, 2024 aa, synthetic construct
MPAAKRVKLDGGDKKYSIGLDIGTNSVGWAVITDEYKVPSKKFKVLGNTDRHSIKKNLIGALLFDSGETAEATRLKRTARRRYTRRKNRICYLQEIFSNEMAKVDDSFFHRLEESFLVEEDKKHERHPIFGNIVDEVAYHEKYPTIYHLRKKLVDSTDKADLRLIYLALAHMIKFRGHFLIEGDLNPDNSDVDKLFIQLVQTYNQLFEENPINASGVDAKAILSARLSKSRRLENLIAQLPGEKKNGLFGNLIALSLGLTPNFKSNFDLAEDAKLQLSKDTYDDDLDNLLAQIGDQYADLFLAAKNLSDAILLSDILRVNTEITKAPLSASMIKRYDEHHQDLTLLKALVRQQLPEKYKEIFFDQSKNGYAGYIDGGASQEEFYKFIKPILEKMDGTEELLVKLNREDLLRKQRTFDNGSIPHQIHLGELHAILRRQEDFYPFLKDNREKIEKILTFRIPYYVGPLARGNSRFAWMTRKSEETITPWNFEEVVDKGASAQSFIERMTNFDKNLPNEKVLPKHSLLYEYFTVYNELTKVKYVTEGMRKPAFLSGEQKKAIVDLLFKTNRKVTVKQLKEDYFKKIECFDSVEISGVEDRFNASLGTYHDLLKIIKDKDFLDNEENEDILEDIVLTLTLFEDREMIEERLKTYAHLFDDKVMKQLKRRRYTGWGRLSRKLINGIRDKQSGKTILDFLKSDGFANRNFMQLIHDDSLTFKEDIQKAQVSGQGDSLHEHIANLAGSPAIKKGILQTVKVVDELVKVMGRHKPENIVIEMARENQTTQKGQKNSRERMKRIEEGIKELGSQILKEHPVENTQLQNEKLYLYYLQNGRDMYVDQELDINRLSDYDVDHIVPQSFLKDDSIDNKVLTRSDKARGKSDNVPSEEVVKKMKNYWRQLLNAKLITQRKFDNLTKAERGGLSELDKAGFIKRQLVETRQITKHVAQILDSRMNTKYDENDKLIREVKVITLKSKLVSDFRKDFQFYKVREINNYHHAHDAYLNAVVGTALIKKYPKLESEFVYGDYKVYDVRKMIAKSEQEIGKATAKYFFYSNIMNFFKTEITLANGEIRKRPLIETNGETGEIVWDKGRDFATVRKVLSMPQVNIVKKTEVQTGGFSKESILPKRNSDKLIARKKDWDPKKYGGFDSPTVAYSVLVVAKVEKGKSKKLKSVKELLGITIMERSSFEKNPIDFLEAKGYKEVKKDLIIKLPKYSLFELENGRKRMLASAGELQKGNELALPSKYVNFLYLASHYEKLKGSPEDNEQKQLFVEQHKHYLDEIIEQISEFSKRVILADANLDKVLSAYNKHRDKPIREQAENIIHLFTLTNLGAPAAFKYFDTTIDRKRYTSTKEVLDATLIHQSITGLYETRIDLSQLGGDGGGSSEAAAKGGSGGGRDIMKDIKVRLMTDSPDDSQDLMIGAIESNLFADQISWKSDQPVWLNQWPLKQEKLQALQQLVTEQLQLGHLEESNSPWNTPVFVIKKKSGKWRLLQDLRAVNATMHDMGALQPGLPSPVAPPKGWEIIIIDLQDCFFNIKLHPEDCKRFAFSVPSPNFKRPYQRFQWKVLPQGMKNSPTLCQKFVDKAILTVRDKYQDSYIVHYMDDILLAHPSRSIVDEILTSMIQALNKHGLVVSTEKIQKYDNLKYLGTHIQGDSVSYQKLQIRTDKLRTLNDFQKLLGNINWIRPFLKLTTGELKPLFEILNPDSNPISTRKLTPEACKALQLMNERLSTARVKRLDLSQPWSLCILKTEYTPTACLWQDGVVEWIHLPHISPKVITPYDIFCTQLIIKGRHRSKELFSKDPDYIVVPYTKVQFDLLLQEKEDWPISLLGFLGEVHFHLPKDPLLTFTLQTAIIFPHMTSTTPLEKGIVIFTDGSANGRSVTYIQGREPIIKENTQNTAQQAEIVAVITAFEEVSQPFNLYTDSKYVTGLFPEIETATLSPRTKIYTELKHLQRLIHKRQEKFYIGHIRGHTGLPGPLAQGNAYADSLTRILTAGKRTADGSEFEKRTADGSEFESPKKKAKVE

SEQ ID NO: 3245 - protein, 2125 aa, synthetic construct
MPAAKRVKLDGGDKKYSIGLDIGTNSVGWAVITDEYKVPSKKFKVLGNTDRHSIKKNLIGALLFDSGETAEATRLKRTARRRYTRRKNRICYLQEIFSNEMAKVDDSFFHRLEESFLVEEDKKHERHPIFGNIVDEVAYHEKYPTIYHLRKKLVDSTDKADLRLIYLALAHMIKFRGHFLIEGDLNPDNSDVDKLFIQLVQTYNQLFEENPINASGVDAKAILSARLSKSRRLENLIAQLPGEKKNGLFGNLIALSLGLTPNFKSNFDLAEDAKLQLSKDTYDDDLDNLLAQIGDQYADLFLAAKNLSDAILLSDILRVNTEITKAPLSASMIKRYDEHHQDLTLLKALVRQQLPEKYKEIFFDQSKNGYAGYIDGGASQEEFYKFIKPILEKMDGTEELLVKLNREDLLRKQRTFDNGSIPHQIHLGELHAILRRQEDFYPFLKDNREKIEKILTFRIPYYVGPLARGNSRFAWMTRKSEETITPWNFEEVVDKGASAQSFIERMTNFDKNLPNEKVLPKHSLLYEYFTVYNELTKVKYVTEGMRKPAFLSGEQKKAIVDLLFKTNRKVTVKQLKEDYFKKIECFDSVEISGVEDRFNASLGTYHDLLKIIKDKDFLDNEENEDILEDIVLTLTLFEDREMIEERLKTYAHLFDDKVMKQLKRRRYTGWGRLSRKLINGIRDKQSGKTILDFLKSDGFANRNFMQLIHDDSLTFKEDIQKAQVSGQGDSLHEHIANLAGSPAIKKGILQTVKVVDELVKVMGRHKPENIVIEMARENQTTQKGQKNSRERMKRIEEGIKELGSQILKEHPVENTQLQNEKLYLYYLQNGRDMYVDQELDINRLSDYDVDHIVPQSFLKDDSIDNKVLTRSDKARGKSDNVPSEEVVKKMKNYWRQLLNAKLITQRKFDNLTKAERGGLSELDKAGFIKRQLVETRQITKHVAQILDSRMNTKYDENDKLIREVKVITLKSKLVSDFRKDFQFYKVREINNYHHAHDAYLNAVVGTALIKKYPKLESEFVYGDYKVYDVRKMIAKSEQEIGKATAKYFFYSNIMNFFKTEITLANGEIRKRPLIETNGETGEIVWDKGRDFATVRKVLSMPQVNIVKKTEVQTGGFSKESILPKRNSDKLIARKKDWDPKKYGGFDSPTVAYSVLVVAKVEKGKSKKLKSVKELLGITIMERSSFEKNPIDFLEAKGYKEVKKDLIIKLPKYSLFELENGRKRMLASAGELQKGNELALPSKYVNFLYLASHYEKLKGSPEDNEQKQLFVEQHKHYLDEIIEQISEFSKRVILADANLDKVLSAYNKHRDKPIREQAENIIHLFTLTNLGAPAAFKYFDTTIDRKRYTSTKEVLDATLIHQSITGLYETRIDLSQLGGDGGEAAAKEAAAKEAAAKEAAAKGGWVQEISDSRPMLHIYLNGRRFLGLLNTGADKTCIAGRDWPANWPIHQTESSLQGLGMACGVARSSQPLRWQHEDKSGIIHPFVIPTLPFTLWGRDIMKDIKVRLMTDSPDDSQDLMIGAIESNLFADQISWKSDQPVWLNQWPLKQEKLQALQQLVTEQLQLGHLEESNSPWNTPVFVIKKKSGKWRLLQDLRAVNATMHDMGALQPGLPSPVAVPKGWEIIIIDLQDCFFNIKLHPEDCKRFAFSVPSPNFKRPYQRFQWKVLPQGMKNSPTLCQKFVDKAILTVRDKYQDSYIVHYMDDILLAHPSRSIVDEILTSMIQALNKHGLVVSTEKIQKYDNLKYLGTHIQGDSVSYQKLQIRTDKLRTLNDFQKLLGNINWIRPFLKLTTGELKPLFEILNPDSNPISTRKLTPEACKALQLMNERLSTARVKRLDLSQPWSLCILKTEYTPTACLWQDGVVEWIHLPHISPKVITPYDIFCTQLIIKGRHRSKELFSKDPDYIVVPYTKVQFDLLLQEKEDWPISLLGFLGEVHFHLPKDPLLTFTLQTAIIFPHMTSTTPLEKGIVIFTDGSANGRSVTYIQGREPIIKENTQNTAQQAEIVAVITAFEEVSQPFNLYTDSKYVTGLFPEIETATLSPRTKIYTELKHLQRLIHKRQEKFYIGHIRGHTGLPGPLAQGNAYADSLTRILTAGKRTADGSEFEKRTADGSEFESPKKKAKVE

SEQ ID NO: 3246 - protein, 2116 aa, synthetic construct
MPAAKRVKLDGGDKKYSIGLDIGTNSVGWAVITDEYKVPSKKFKVLGNTDRHSIKKNLIGALLFDSGETAEATRLKRTARRRYTRRKNRICYLQEIFSNEMAKVDDSFFHRLEESFLVEEDKKHERHPIFGNIVDEVAYHEKYPTIYHLRKKLVDSTDKADLRLIYLALAHMIKFRGHFLIEGDLNPDNSDVDKLFIQLVQTYNQLFEENPINASGVDAKAILSARLSKSRRLENLIAQLPGEKKNGLFGNLIALSLGLTPNFKSNFDLAEDAKLQLSKDTYDDDLDNLLAQIGDQYADLFLAAKNLSDAILLSDILRVNTEITKAPLSASMIKRYDEHHQDLTLLKALVRQQLPEKYKEIFFDQSKNGYAGYIDGGASQEEFYKFIKPILEKMDGTEELLVKLNREDLLRKQRTFDNGSIPHQIHLGELHAILRRQEDFYPFLKDNREKIEKILTFRIPYYVGPLARGNSRFAWMTRKSEETITPWNFEEVVDKGASAQSFIERMTNFDKNLPNEKVLPKHSLLYEYFTVYNELTKVKYVTEGMRKPAFLSGEQKKAIVDLLFKTNRKVTVKQLKEDYFKKIECFDSVEISGVEDRFNASLGTYHDLLKIIKDKDFLDNEENEDILEDIVLTLTLFEDREMIEERLKTYAHLFDDKVMKQLKRRRYTGWGRLSRKLINGIRDKQSGKTILDFLKSDGFANRNFMQLIHDDSLTFKEDIQKAQVSGQGDSLHEHIANLAGSPAIKKGILQTVKVVDELVKVMGRHKPENIVIEMARENQTTQKGQKNSRERMKRIEEGIKELGSQILKEHPVENTQLQNEKLYLYYLQNGRDMYVDQELDINRLSDYDVDHIVPQSFLKDDSIDNKVLTRSDKARGKSDNVPSEEVVKKMKNYWRQLLNAKLITQRKFDNLTKAERGGLSELDKAGFIKRQLVETRQITKHVAQILDSRMNTKYDENDKLIREVKVITLKSKLVSDFRKDFQFYKVREINNYHHAHDAYLNAVVGTALIKKYPKLESEFVYGDYKVYDVRKMIAKSEQEIGKATAKYFFYSNIMNFFKTEITLANGEIRKRPLIETNGETGEIVWDKGRDFATVRKVLSMPQVNIVKKTEVQTGGFSKESILPKRNSDKLIARKKDWDPKKYGGFDSPTVAYSVLVVAKVEKGKSKKLKSVKELLGITIMERSSFEKNPIDFLEAKGYKEVKKDLIIKLPKYSLFELENGRKRMLASAGELQKGNELALPSKYVNFLYLASHYEKLKGSPEDNEQKQLFVEQHKHYLDEIIEQISEFSKRVILADANLDKVLSAYNKHRDKPIREQAENIIHLFTLTNLGAPAAFKYFDTTIDRKRYTSTKEVLDATLIHQSITGLYETRIDLSQLGGDGGGSSGGSEAAAKGGWVQEISDSRPMLHIYLNGRRFLGLLNTGADKTCIAGRDWPANWPIHQTESSLQGLGMACGVARSSQPLRWQHEDKSGIIHPFVIPTLPFTLWGRDIMKDIKVRLMTDSPDDSQDLMIGAIESNLFADQISWKSDQPVWLNQWPLKQEKLQALQQLVTEQLQLGHLEESNSPWNTPVFVIKKKSGKWRLLQDLRAVNATMHDMGALQPGLPSPVAVPKGWEIIIIDLQDCFFNIKLHPEDCKRFAFSVPSPNFKRPYQRFQWKVLPQGMKNSPTLCQKFVDKAILTVRDKYQDSYIVHYMDDILLAHPSRSIVDEILTSMIQALNKHGLVVSTEKIQKYDNLKYLGTHIQGDSVSYQKLQIRTDKLRTLNDFQKLLGNINWIRPFLKLTTGELKPLFEILNPDSNPISTRKLTPEACKALQLMNERLSTARVKRLDLSQPWSLCILKTEYTPTACLWQDGVVEWIHLPHISPKVITPYDIFCTQLIIKGRHRSKELFSKDPDYIVVPYTKVQFDLLLQEKEDWPISLLGFLGEVHFHLPKDPLLTFTLQTAIIFPHMTSTTPLEKGIVIFTDGSANGRSVTYIQGREPIIKENTQNTAQQAEIVAVITAFEEVSQPFNLYTDSKYVTGLFPEIETATLSPRTKIYTELKHLQRLIHKRQEKFYIGHIRGHTGLPGPLAQGNAYADSLTRILTAGKRTADGSEFEKRTADGSEFESPKKKAKVE

SEQ ID NO: 3247 - protein, 2114 aa, synthetic construct
MPAAKRVKLDGGDKKYSIGLDIGTNSVGWAVITDEYKVPSKKFKVLGNTDRHSIKKNLIGALLFDSGETAEATRLKRTARRRYTRRKNRICYLQEIFSNEMAKVDDSFFHRLEESFLVEEDKKHERHPIFGNIVDEVAYHEKYPTIYHLRKKLVDSTDKADLRLIYLALAHMIKFRGHFLIEGDLNPDNSDVDKLFIQLVQTYNQLFEENPINASGVDAKAILSARLSKSRRLENLIAQLPGEKKNGLFGNLIALSLGLTPNFKSNFDLAEDAKLQLSKDTYDDDLDNLLAQIGDQYADLFLAAKNLSDAILLSDILRVNTEITKAPLSASMIKRYDEHHQDLTLLKALVRQQLPEKYKEIFFDQSKNGYAGYIDGGASQEEFYKFIKPILEKMDGTEELLVKLNREDLLRKQRTFDNGSIPHQIHLGELHAILRRQEDFYPFLKDNREKIEKILTFRIPYYVGPLARGNSRFAWMTRKSEETITPWNFEEVVDKGASAQSFIERMTNFDKNLPNEKVLPKHSLLYEYFTVYNELTKVKYVTEGMRKPAFLSGEQKKAIVDLLFKTNRKVTVKQLKEDYFKKIECFDSVEISGVEDRFNASLGTYHDLLKIIKDKDFLDNEENEDILEDIVLTLTLFEDREMIEERLKTYAHLFDDKVMKQLKRRRYTGWGRLSRKLINGIRDKQSGKTILDFLKSDGFANRNFMQLIHDDSLTFKEDIQKAQVSGQGDSLHEHIANLAGSPAIKKGILQTVKVVDELVKVMGRHKPENIVIEMARENQTTQKGQKNSRERMKRIEEGIKELGSQILKEHPVENTQLQNEKLYLYYLQNGRDMYVDQELDINRLSDYDVDHIVPQSFLKDDSIDNKVLTRSDKARGKSDNVPSEEVVKKMKNYWRQLLNAKLITQRKFDNLTKAERGGLSELDKAGFIKRQLVETRQITKHVAQILDSRMNTKYDENDKLIREVKVITLKSKLVSDFRKDFQFYKVREINNYHHAHDAYLNAVVGTALIKKYPKLESEFVYGDYKVYDVRKMIAKSEQEIGKATAKYFFYSNIMNFFKTEITLANGEIRKRPLIETNGETGEIVWDKGRDFATVRKVLSMPQVNIVKKTEVQTGGFSKESILPKRNSDKLIARKKDWDPKKYGGFDSPTVAYSVLVVAKVEKGKSKKLKSVKELLGITIMERSSFEKNPIDFLEAKGYKEVKKDLIIKLPKYSLFELENGRKRMLASAGELQKGNELALPSKYVNFLYLASHYEKLKGSPEDNEQKQLFVEQHKHYLDEIIEQISEFSKRVILADANLDKVLSAYNKHRDKPIREQAENIIHLFTLTNLGAPAAFKYFDTTIDRKRYTSTKEVLDATLIHQSITGLYETRIDLSQLGGDGGGGGGGSGSSGGWVQEISDSRPMLHIYLNGRRFLGLLNTGADKTCIAGRDWPANWPIHQTESSLQGLGMACGVARSSQPLRWQHEDKSGIIHPFVIPTLPFTLWGRDIMKDIKVRLMTDSPDDSQDLMIGAIESNLFADQISWKSDQPVWLNQWPLKQEKLQALQQLVTEQLQLGHLEESNSPWNTPVFVIKKKSGKWRLLQDLRAVNATMHDMGALQPGLPSPVAVPKGWEIIIIDLQDCFFNIKLHPEDCKRFAFSVPSPNFKRPYQRFQWKVLPQGMKNSPTLCQKFVDKAILTVRDKYQDSYIVHYMDDILLAHPSRSIVDEILTSMIQALNKHGLVVSTEKIQKYDNLKYLGTHIQGDSVSYQKLQIRTDKLRTLNDFQKLLGNINWIRPFLKLTTGELKPLFEILNPDSNPISTRKLTPEACKALQLMNERLSTARVKRLDLSQPWSLCILKTEYTPTACLWQDGVVEWIHLPHISPKVITPYDIFCTQLIIKGRHRSKELFSKDPDYIVVPYTKVQFDLLLQEKEDWPISLLGFLGEVHFHLPKDPLLTFTLQTAIIFPHMTSTTPLEKGIVIFTDGSANGRSVTYIQGREPIIKENTQNTAQQAEIVAVITAFEEVSQPFNLYTDSKYVTGLFPEIETATLSPRTKIYTELKHLQRLIHKRQEKFYIGHIRGHTGLPGPLAQGNAYADSLTRILTAGKRTADGSEFEKRTADGSEFESPKKKAKVE

SEQ ID NO: 3248 - protein, 2116 aa, synthetic construct
MPAAKRVKLDGGDKKYSIGLDIGTNSVGWAVITDEYKVPSKKFKVLGNTDRHSIKKNLIGALLFDSGETAEATRLKRTARRRYTRRKNRICYLQEIFSNEMAKVDDSFFHRLEESFLVEEDKKHERHPIFGNIVDEVAYHEKYPTIYHLRKKLVDSTDKADLRLIYLALAHMIKFRGHFLIEGDLNPDNSDVDKLFIQLVQTYNQLFEENPINASGVDAKAILSARLSKSRRLENLIAQLPGEKKNGLFGNLIALSLGLTPNFKSNFDLAEDAKLQLSKDTYDDDLDNLLAQIGDQYADLFLAAKNLSDAILLSDILRVNTEITKAPLSASMIKRYDEHHQDLTLLKALVRQQLPEKYKEIFFDQSKNGYAGYIDGGASQEEFYKFIKPILEKMDGTEELLVKLNREDLLRKQRTFDNGSIPHQIHLGELHAILRRQEDFYPFLKDNREKIEKILTFRIPYYVGPLARGNSRFAWMTRKSEETITPWNFEEVVDKGASAQSFIERMTNFDKNLPNEKVLPKHSLLYEYFTVYNELTKVKYVTEGMRKPAFLSGEQKKAIVDLLFKTNRKVTVKQLKEDYFKKIECFDSVEISGVEDRFNASLGTYHDLLKIIKDKDFLDNEENEDILEDIVLTLTLFEDREMIEERLKTYAHLFDDKVMKQLKRRRYTGWGRLSRKLINGIRDKQSGKTILDFLKSDGFANRNFMQLIHDDSLTFKEDIQKAQVSGQGDSLHEHIANLAGSPAIKKGILQTVKVVDELVKVMGRHKPENIVIEMARENQTTQKGQKNSRERMKRIEEGIKELGSQILKEHPVENTQLQNEKLYLYYLQNGRDMYVDQELDINRLSDYDVDHIVPQSFLKDDSIDNKVLTRSDKARGKSDNVPSEEVVKKMKNYWRQLLNAKLITQRKFDNLTKAERGGLSELDKAGFIKRQLVETRQITKHVAQILDSRMNTKYDENDKLIREVKVITLKSKLVSDFRKDFQFYKVREINNYHHAHDAYLNAVVGTALIKKYPKLESEFVYGDYKVYDVRKMIAKSEQEIGKATAKYFFYSNIMNFFKTEITLANGEIRKRPLIETNGETGEIVWDKGRDFATVRKVLSMPQVNIVKKTEVQTGGFSKESILPKRNSDKLIARKKDWDPKKYGGFDSPTVAYSVLVVAKVEKGKSKKLKSVKELLGITIMERSSFEKNPIDFLEAKGYKEVKKDLIIKLPKYSLFELENGRKRMLASAGELQKGNELALPSKYVNFLYLASHYEKLKGSPEDNEQKQLFVEQHKHYLDEIIEQISEFSKRVILADANLDKVLSAYNKHRDKPIREQAENIIHLFTLTNLGAPAAFKYFDTTIDRKRYTSTKEVLDATLIHQSITGLYETRIDLSQLGGDGGGGGEAAAKGSSGGWVQEISDSRPMLHIYLNGRRFLGLLNTGADKTCIAGRDWPANWPIHQTESSLQGLGMACGVARSSQPLRWQHEDKSGIIHPFVIPTLPFTLWGRDIMKDIKVRLMTDSPDDSQDLMIGAIESNLFADQISWKSDQPVWLNQWPLKQEKLQALQQLVTEQLQLGHLEESNSPWNTPVFVIKKKSGKWRLLQDLRAVNATMHDMGALQPGLPSPVAPPKGWEIIIIDLQDCFFNIKLHPEDCKRFAFSVPSPNFKRPYQRFQWKVLPQGMKNSPTLCQKFVDKAILTVRDKYQDSYIVHYMDDILLAHPSRSIVDEILTSMIQALNKHGLVVSTEKIQKYDNLKYLGTHIQGDSVSYQKLQIRTDKLRTLNDFQKLLGNINWIRPFLKLTTGELKPLFEILNPDSNPISTRKLTPEACKALQLMNERLSTARVKRLDLSQPWSLCILKTEYTPTACLWQDGVVEWIHLPHISPKVITPYDIFCTQLIIKGRHRSKELFSKDPDYIVVPYTKVQFDLLLQEKEDWPISLLGFLGEVHFHLPKDPLLTFTLQTAIIFPHMTSTTPLEKGIVIFTDGSANGRSVTYIQGREPIIKENTQNTAQQAEIVAVITAFEEVSQPFNLYTDSKYVTGLFPEIETATLSPRTKIYTELKHLQRLIHKRQEKFYIGHIRGHTGLPGPLAQGNAYADSLTRILTAGKRTADGSEFEKRTADGSEFESPKKKAKVE

SEQ ID NO: 3249 - protein, 2116 aa, synthetic construct
MPAAKRVKLDGGDKKYSIGLDIGTNSVGWAVITDEYKVPSKKFKVLGNTDRHSIKKNLIGALLFDSGETAEATRLKRTARRRYTRRKNRICYLQEIFSNEMAKVDDSFFHRLEESFLVEEDKKHERHPIFGNIVDEVAYHEKYPTIYHLRKKLVDSTDKADLRLIYLALAHMIKFRGHFLIEGDLNPDNSDVDKLFIQLVQTYNQLFEENPINASGVDAKAILSARLSKSRRLENLIAQLPGEKKNGLFGNLIALSLGLTPNFKSNFDLAEDAKLQLSKDTYDDDLDNLLAQIGDQYADLFLAAKNLSDAILLSDILRVNTEITKAPLSASMIKRYDEHHQDLTLLKALVRQQLPEKYKEIFFDQSKNGYAGYIDGGASQEEFYKFIKPILEKMDGTEELLVKLNREDLLRKQRTFDNGSIPHQIHLGELHAILRRQEDFYPFLKDNREKIEKILTFRIPYYVGPLARGNSRFAWMTRKSEETITPWNFEEVVDKGASAQSFIERMTNFDKNLPNEKVLPKHSLLYEYFTVYNELTKVKYVTEGMRKPAFLSGEQKKAIVDLLFKTNRKVTVKQLKEDYFKKIECFDSVEISGVEDRFNASLGTYHDLLKIIKDKDFLDNEENEDILEDIVLTLTLFEDREMIEERLKTYAHLFDDKVMKQLKRRRYTGWGRLSRKLINGIRDKQSGKTILDFLKSDGFANRNFMQLIHDDSLTFKEDIQKAQVSGQGDSLHEHIANLAGSPAIKKGILQTVKVVDELVKVMGRHKPENIVIEMARENQTTQKGQKNSRERMKRIEEGIKELGSQILKEHPVENTQLQNEKLYLYYLQNGRDMYVDQELDINRLSDYDVDHIVPQSFLKDDSIDNKVLTRSDKARGKSDNVPSEEVVKKMKNYWRQLLNAKLITQRKFDNLTKAERGGLSELDKAGFIKRQLVETRQITKHVAQILDSRMNTKYDENDKLIREVKVITLKSKLVSDFRKDFQFYKVREINNYHHAHDAYLNAVVGTALIKKYPKLESEFVYGDYKVYDVRKMIAKSEQEIGKATAKYFFYSNIMNFFKTEITLANGEIRKRPLIETNGETGEIVWDKGRDFATVRKVLSMPQVNIVKKTEVQTGGFSKESILPKRNSDKLIARKKDWDPKKYGGFDSPTVAYSVLVVAKVEKGKSKKLKSVKELLGITIMERSSFEKNPIDFLEAKGYKEVKKDLIIKLPKYSLFELENGRKRMLASAGELQKGNELALPSKYVNFLYLASHYEKLKGSPEDNEQKQLFVEQHKHYLDEIIEQISEFSKRVILADANLDKVLSAYNKHRDKPIREQAENIIHLFTLTNLGAPAAFKYFDTTIDRKRYTSTKEVLDATLIHQSITGLYETRIDLSQLGGDGGEAAAKGGGGSSGGWVQEISDSRPMLHIYLNGRRFLGLLNTGADKTCIAGRDWPANWPIHQTESSLQGLGMACGVARSSQPLRWQHEDKSGIIHPFVIPTLPFTLWGRDIMKDIKVRLMTDSPDDSQDLMIGAIESNLFADQISWKSDQPVWLNQWPLKQEKLQALQQLVTEQLQLGHLEESNSPWNTPVFVIKKKSGKWRLLQDLRAVNATMHDMGALQPGLPSPVAPPKGWEIIIIDLQDCFFNIKLHPEDCKRFAFSVPSPNFKRPYQRFQWKVLPQGMKNSPTLCQKFVDKAILTVRDKYQDSYIVHYMDDILLAHPSRSIVDEILTSMIQALNKHGLVVSTEKIQKYDNLKYLGTHIQGDSVSYQKLQIRTDKLRTLNDFQKLLGNINWIRPFLKLTTGELKPLFEILNPDSNPISTRKLTPEACKALQLMNERLSTARVKRLDLSQPWSLCILKTEYTPTACLWQDGVVEWIHLPHISPKVITPYDIFCTQLIIKGRHRSKELFSKDPDYIVVPYTKVQFDLLLQEKEDWPISLLGFLGEVHFHLPKDPLLTFTLQTAIIFPHMTSTTPLEKGIVIFTDGSANGRSVTYIQGREPIIKENTQNTAQQAEIVAVITAFEEVSQPFNLYTDSKYVTGLFPEIETATLSPRTKIYTELKHLQRLIHKRQEKFYIGHIRGHTGLPGPLAQGNAYADSLTRILTAGKRTADGSEFEKRTADGSEFESPKKKAKVE

SEQ ID NO: 3250 - protein, 2116 aa, synthetic construct
MPAAKRVKLDGGDKKYSIGLDIGTNSVGWAVITDEYKVPSKKFKVLGNTDRHSIKKNLIGALLFDSGETAEATRLKRTARRRYTRRKNRICYLQEIFSNEMAKVDDSFFHRLEESFLVEEDKKHERHPIFGNIVDEVAYHEKYPTIYHLRKKLVDSTDKADLRLIYLALAHMIKFRGHFLIEGDLNPDNSDVDKLFIQLVQTYNQLFEENPINASGVDAKAILSARLSKSRRLENLIAQLPGEKKNGLFGNLIALSLGLTPNFKSNFDLAEDAKLQLSKDTYDDDLDNLLAQIGDQYADLFLAAKNLSDAILLSDILRVNTEITKAPLSASMIKRYDEHHQDLTLLKALVRQQLPEKYKEIFFDQSKNGYAGYIDGGASQEEFYKFIKPILEKMDGTEELLVKLNREDLLRKQRTFDNGSIPHQIHLGELHAILRRQEDFYPFLKDNREKIEKILTFRIPYYVGPLARGNSRFAWMTRKSEETITPWNFEEVVDKGASAQSFIERMTNFDKNLPNEKVLPKHSLLYEYFTVYNELTKVKYVTEGMRKPAFLSGEQKKAIVDLLFKTNRKVTVKQLKEDYFKKIECFDSVEISGVEDRFNASLGTYHDLLKIIKDKDFLDNEENEDILEDIVLTLTLFEDREMIEERLKTYAHLFDDKVMKQLKRRRYTGWGRLSRKLINGIRDKQSGKTILDFLKSDGFANRNFMQLIHDDSLTFKEDIQKAQVSGQGDSLHEHIANLAGSPAIKKGILQTVKVVDELVKVMGRHKPENIVIEMARENQTTQKGQKNSRERMKRIEEGIKELGSQILKEHPVENTQLQNEKLYLYYLQNGRDMYVDQELDINRLSDYDVDHIVPQSFLKDDSIDNKVLTRSDKARGKSDNVPSEEVVKKMKNYWRQLLNAKLITQRKFDNLTKAERGGLSELDKAGFIKRQLVETRQITKHVAQILDSRMNTKYDENDKLIREVKVITLKSKLVSDFRKDFQFYKVREINNYHHAHDAYLNAVVGTALIKKYPKLESEFVYGDYKVYDVRKMIAKSEQEIGKATAKYFFYSNIMNFFKTEITLANGEIRKRPLIETNGETGEIVWDKGRDFATVRKVLSMPQVNIVKKTEVQTGGFSKESILPKRNSDKLIARKKDWDPKKYGGFDSPTVAYSVLVVAKVEKGKSKKLKSVKELLGITIMERSSFEKNPIDFLEAKGYKEVKKDLIIKLPKYSLFELENGRKRMLASAGELQKGNELALPSKYVNFLYLASHYEKLKGSPEDNEQKQLFVEQHKHYLDEIIEQISEFSKRVILADANLDKVLSAYNKHRDKPIREQAENIIHLFTLTNLGAPAAFKYFDTTIDRKRYTSTKEVLDATLIHQSITGLYETRIDLSQLGGDGGEAAAKGSSGGSGGVQEISDSRPMLHIYLNGRRFLGLLDTGADKTCIAGRDWPANWPIHQTESSLQGLGMACGVARSSQPLRWQHEDKSGIIHPFVIPTLPFTLWGRDIMKDIKVRLMTDSPDDSQDLMIGAIESNLFADQISWKSDQPVWLNQWPLKQEKLQALQQLVTEQLQLGHLEESNSPWNTPVFVIKKKSGKWRLLQDLRAVNATMHDMGALQPGLPSPPAVPKGWEIIIIDLQDCFFNIKLHPEDCKRFAFSVPSPNFKRPYQRFQWKVLPQGMKNSPTLCQKFVDKAILTVRDKYQDSYIVHYMDDILLAHPSRSIVDEILTSMIQALNKHGLVVSTEKIQKYDNLKYLGTHIQGDSVSYQKLQIRTDKLRTLNDFQKLLGNINWIRPFLKLTTGELKPLFEILNPDSNPISTRKLTPEACKALQLMNERLSTARVKRLDLSQPWSLCILKTEYTPTACLWQDGVVEWIHLPHISPKVITPYDIFCTQLIIKGRHRSKELFSKDPDYIVVPYTKVQFDLLLQEKEDWPISLLGFLGEVHFHLPKDPLLTFTLQTAIIFPHMTSTTPLEKGIVIFTDGSANGRSVTYIQGREPIIKENTQNTAQQAEIVAVITAFEEVSQPFNLYTDSKYVTGLFPEIETATLSPRTKIYTELKHLQRLIHKRQEKFYIGHIRGHTGLPGPLAQGNAYADSLTRILTAAGKRTADGSEFEKRTADGSEFESPKKKAKVE

SEQ ID NO: 3251 - protein, 2116 aa, synthetic construct
MPAAKRVKLDGGDKKYSIGLDIGTNSVGWAVITDEYKVPSKKFKVLGNTDRHSIKKNLIGALLFDSGETAEATRLKRTARRRYTRRKNRICYLQEIFSNEMAKVDDSFFHRLEESFLVEEDKKHERHPIFGNIVDEVAYHEKYPTIYHLRKKLVDSTDKADLRLIYLALAHMIKFRGHFLIEGDLNPDNSDVDKLFIQLVQTYNQLFEENPINASGVDAKAILSARLSKSRRLENLIAQLPGEKKNGLFGNLIALSLGLTPNFKSNFDLAEDAKLQLSKDTYDDDLDNLLAQIGDQYADLFLAAKNLSDAILLSDILRVNTEITKAPLSASMIKRYDEHHQDLTLLKALVRQQLPEKYKEIFFDQSKNGYAGYIDGGASQEEFYKFIKPILEKMDGTEELLVKLNREDLLRKQRTFDNGSIPHQIHLGELHAILRRQEDFYPFLKDNREKIEKILTFRIPYYVGPLARGNSRFAWMTRKSEETITPWNFEEVVDKGASAQSFIERMTNFDKNLPNEKVLPKHSLLYEYFTVYNELTKVKYVTEGMRKPAFLSGEQKKAIVDLLFKTNRKVTVKQLKEDYFKKIECFDSVEISGVEDRFNASLGTYHDLLKIIKDKDFLDNEENEDILEDIVLTLTLFEDREMIEERLKTYAHLFDDKVMKQLKRRRYTGWGRLSRKLINGIRDKQSGKTILDFLKSDGFANRNFMQLIHDDSLTFKEDIQKAQVSGQGDSLHEHIANLAGSPAIKKGILQTVKVVDELVKVMGRHKPENIVIEMARENQTTQKGQKNSRERMKRIEEGIKELGSQILKEHPVENTQLQNEKLYLYYLQNGRDMYVDQELDINRLSDYDVDHIVPQSFLKDDSIDNKVLTRSDKARGKSDNVPSEEVVKKMKNYWRQLLNAKLITQRKFDNLTKAERGGLSELDKAGFIKRQLVETRQITKHVAQILDSRMNTKYDENDKLIREVKVITLKSKLVSDFRKDFQFYKVREINNYHHAHDAYLNAVVGTALIKKYPKLESEFVYGDYKVYDVRKMIAKSEQEIGKATAKYFFYSNIMNFFKTEITLANGEIRKRPLIETNGETGEIVWDKGRDFATVRKVLSMPQVNIVKKTEVQTGGFSKESILPKRNSDKLIARKKDWDPKKYGGFDSPTVAYSVLVVAKVEKGKSKKLKSVKELLGITIMERSSFEKNPIDFLEAKGYKEVKKDLIIKLPKYSLFELENGRKRMLASAGELQKGNELALPSKYVNFLYLASHYEKLKGSPEDNEQKQLFVEQHKHYLDEIIEQISEFSKRVILADANLDKVLSAYNKHRDKPIREQAENIIHLFTLTNLGAPAAFKYFDTTIDRKRYTSTKEVLDATLIHQSITGLYETRIDLSQLGGDGGPAPEAAAKGGSGGVQEISDSRPMLHIYLNGRRFLGLLDTGADKTCIAGRDWPANWPIHQTESSLQGLGMACGVARSSQPLRWQHEDKSGIIHPFVIPTLPFTLWGRDIMKDIKVRLMTDSPDDSQDLMIGAIESNLFADQISWKSDQPVWLNQWPLKQEKLQALQQLVTEQLQLGHLEESNSPWNTPVFVIKKKSGKWRLLQDLRAVNATMHDMGALQPGLPSPPAVPKGWEIIIIDLQDCFFNIKLHPEDCKRFAFSVPSPNFKRPYQRFQWKVLPQGMKNSPTLCQKFVDKAILTVRDKYQDSYIVHYMDDILLAHPSRSIVDEILTSMIQALNKHGLVVSTEKIQKYDNLKYLGTHIQGDSVSYQKLQIRTDKLRTLNDFQKLLGNINWIRPFLKLTTGELKPLFEILNPDSNPISTRKLTPEACKALQLMNERLSTARVKRLDLSQPWSLCILKTEYTPTACLWQDGVVEWIHLPHISPKVITPYDIFCTQLIIKGRHRSKELFSKDPDYIVVPYTKVQFDLLLQEKEDWPISLLGFLGEVHFHLPKDPLLTFTLQTAIIFPHMTSTTPLEKGIVIFTDGSANGRSVTYIQGREPIIKENTQNTAQQAEIVAVITAFEEVSQPFNLYTDSKYVTGLFPEIETATLSPRTKIYTELKHLQRLIHKRQEKFYIGHIRGHTGLPGPLAQGNAYADSLTRILTAAGKRTADGSEFEKRTADGSEFESPKKKAKVE

SEQ ID NO: 3252 - protein, 2116 aa, synthetic construct
MPAAKRVKLDGGDKKYSIGLDIGTNSVGWAVITDEYKVPSKKFKVLGNTDRHSIKKNLIGALLFDSGETAEATRLKRTARRRYTRRKNRICYLQEIFSNEMAKVDDSFFHRLEESFLVEEDKKHERHPIFGNIVDEVAYHEKYPTIYHLRKKLVDSTDKADLRLIYLALAHMIKFRGHFLIEGDLNPDNSDVDKLFIQLVQTYNQLFEENPINASGVDAKAILSARLSKSRRLENLIAQLPGEKKNGLFGNLIALSLGLTPNFKSNFDLAEDAKLQLSKDTYDDDLDNLLAQIGDQYADLFLAAKNLSDAILLSDILRVNTEITKAPLSASMIKRYDEHHQDLTLLKALVRQQLPEKYKEIFFDQSKNGYAGYIDGGASQEEFYKFIKPILEKMDGTEELLVKLNREDLLRKQRTFDNGSIPHQIHLGELHAILRRQEDFYPFLKDNREKIEKILTFRIPYYVGPLARGNSRFAWMTRKSEETITPWNFEEVVDKGASAQSFIERMTNFDKNLPNEKVLPKHSLLYEYFTVYNELTKVKYVTEGMRKPAFLSGEQKKAIVDLLFKTNRKVTVKQLKEDYFKKIECFDSVEISGVEDRFNASLGTYHDLLKIIKDKDFLDNEENEDILEDIVLTLTLFEDREMIEERLKTYAHLFDDKVMKQLKRRRYTGWGRLSRKLINGIRDKQSGKTILDFLKSDGFANRNFMQLIHDDSLTFKEDIQKAQVSGQGDSLHEHIANLAGSPAIKKGILQTVKVVDELVKVMGRHKPENIVIEMARENQTTQKGQKNSRERMKRIEEGIKELGSQILKEHPVENTQLQNEKLYLYYLQNGRDMYVDQELDINRLSDYDVDHIVPQSFLKDDSIDNKVLTRSDKARGKSDNVPSEEVVKKMKNYWRQLLNAKLITQRKFDNLTKAERGGLSELDKAGFIKRQLVETRQITKHVAQILDSRMNTKYDENDKLIREVKVITLKSKLVSDFRKDFQFYKVREINNYHHAHDAYLNAVVGTALIKKYPKLESEFVYGDYKVYDVRKMIAKSEQEIGKATAKYFFYSNIMNFFKTEITLANGEIRKRPLIETNGETGEIVWDKGRDFATVRKVLSMPQVNIVKKTEVQTGGFSKESILPKRNSDKLIARKKDWDPKKYGGFDSPTVAYSVLVVAKVEKGKSKKLKSVKELLGITIMERSSFEKNPIDFLEAKGYKEVKKDLIIKLPKYSLFELENGRKRMLASAGELQKGNELALPSKYVNFLYLASHYEKLKGSPEDNEQKQLFVEQHKHYLDEIIEQISEFSKRVILADANLDKVLSAYNKHRDKPIREQAENIIHLFTLTNLGAPAAFKYFDTTIDRKRYTSTKEVLDATLIHQSITGLYETRIDLSQLGGDGGGGGGSSEAAAKGGVQEISDSRPMLHIYLNGRRFLGLLDTGADKTCIAGRDWPANWPIHQTESSLQGLGMACGVARSSQPLRWQHEDKSGIIHPFVIPTLPFTLWGRDIMKDIKVRLMTDSPDDSQDLMIGAIESNLFADQISWKSDQPVWLNQWPLKQEKLQALQQLVTEQLQLGHLEESNSPWNTPVFVIKKKSGKWRLLQDLRAVNATMHDMGALQPGLPSPVAVPKGWEIIIIDLQDCFFNIKLHPEDCKRFAFSVPSPNFKRPYQRFQWKVLPQGMKNSPTLCQKFVDKAILTVRDKYQDSYIVHYMDDILLAHPSRSIVDEILTSMIQALNKHGLVVSTEKIQKYDNLKYLGTHIQGDSVSYQKLQIRTDKLRTLNDFQKLLGNINWIRPFLKLTTGELKPLFEILNPDSNPISTRKLTPEACKALQLMNERLSTARVKRLDLSQPWSLCILKTEYTPTACLWQDGVVEWIHLPHISPKVITPYDIFCTQLIIKGRHRSKELFSKDPDYIVVPYTKVQFDLLLQEKEDWPISLLGFLGEVHFHLPKDPLLTFTLQTAIIFPHMTSTTPLEKGIVIFTDGSANGRSVTYIQGREPIIKENTQNTAQQAEIVAVITAFEEVSQPFNLYTDSKYVTGLFPEIETATLSPRTKIYTELKHLQRLIHKRQEKFYIGHIRGHTGLPGPLAQGNAYADSLTRILTAAGKRTADGSEFEKRTADGSEFESPKKKAKVE

SEQ ID NO: 3253 - protein, 2114 aa, synthetic construct
MPAAKRVKLDGGDKKYSIGLDIGTNSVGWAVITDEYKVPSKKFKVLGNTDRHSIKKNLIGALLFDSGETAEATRLKRTARRRYTRRKNRICYLQEIFSNEMAKVDDSFFHRLEESFLVEEDKKHERHPIFGNIVDEVAYHEKYPTIYHLRKKLVDSTDKADLRLIYLALAHMIKFRGHFLIEGDLNPDNSDVDKLFIQLVQTYNQLFEENPINASGVDAKAILSARLSKSRRLENLIAQLPGEKKNGLFGNLIALSLGLTPNFKSNFDLAEDAKLQLSKDTYDDDLDNLLAQIGDQYADLFLAAKNLSDAILLSDILRVNTEITKAPLSASMIKRYDEHHQDLTLLKALVRQQLPEKYKEIFFDQSKNGYAGYIDGGASQEEFYKFIKPILEKMDGTEELLVKLNREDLLRKQRTFDNGSIPHQIHLGELHAILRRQEDFYPFLKDNREKIEKILTFRIPYYVGPLARGNSRFAWMTRKSEETITPWNFEEVVDKGASAQSFIERMTNFDKNLPNEKVLPKHSLLYEYFTVYNELTKVKYVTEGMRKPAFLSGEQKKAIVDLLFKTNRKVTVKQLKEDYFKKIECFDSVEISGVEDRFNASLGTYHDLLKIIKDKDFLDNEENEDILEDIVLTLTLFEDREMIEERLKTYAHLFDDKVMKQLKRRRYTGWGRLSRKLINGIRDKQSGKTILDFLKSDGFANRNFMQLIHDDSLTFKEDIQKAQVSGQGDSLHEHIANLAGSPAIKKGILQTVKVVDELVKVMGRHKPENIVIEMARENQTTQKGQKNSRERMKRIEEGIKELGSQILKEHPVENTQLQNEKLYLYYLQNGRDMYVDQELDINRLSDYDVDHIVPQSFLKDDSIDNKVLTRSDKARGKSDNVPSEEVVKKMKNYWRQLLNAKLITQRKFDNLTKAERGGLSELDKAGFIKRQLVETRQITKHVAQILDSRMNTKYDENDKLIREVKVITLKSKLVSDFRKDFQFYKVREINNYHHAHDAYLNAVVGTALIKKYPKLESEFVYGDYKVYDVRKMIAKSEQEIGKATAKYFFYSNIMNFFKTEITLANGEIRKRPLIETNGETGEIVWDKGRDFATVRKVLSMPQVNIVKKTEVQTGGFSKESILPKRNSDKLIARKKDWDPKKYGGFDSPTVAYSVLVVAKVEKGKSKKLKSVKELLGITIMERSSFEKNPIDFLEAKGYKEVKKDLIIKLPKYSLFELENGRKRMLASAGELQKGNELALPSKYVNFLYLASHYEKLKGSPEDNEQKQLFVEQHKHYLDEIIEQISEFSKRVILADANLDKVLSAYNKHRDKPIREQAENIIHLFTLTNLGAPAAFKYFDTTIDRKRYTSTKEVLDATLIHQSITGLYETRIDLSQLGGDGGGGGGGSGSSGGVQEISDSRPMLHIYLNGRRFLGLLDTGADKTCIAGRDWPANWPIHQTESSLQGLGMACGVARSSQPLRWQHEDKSGIIHPFVIPTLPFTLWGRDIMKDIKVRLMTDSPDDSQDLMIGAIESNLFADQISWKSDQPVWLNQWPLKQEKLQALQQLVTEQLQLGHLEESNSPWNTPVFVIKKKSGKWRLLQDLRAVNATMHDMGALQPGLPSPVAVPKGWEIIIIDLQDCFFNIKLHPEDCKRFAFSVPSPNFKRPYQRFQWKVLPQGMKNSPTLCQKFVDKAILTVRDKYQDSYIVHYMDDILLAHPSRSIVDEILTSMIQALNKHGLVVSTEKIQKYDNLKYLGTHIQGDSVSYQKLQIRTDKLRTLNDFQKLLGNINWIRPFLKLTTGELKPLFEILNPDSNPISTRKLTPEACKALQLMNERLSTARVKRLDLSQPWSLCILKTEYTPTACLWQDGVVEWIHLPHISPKVITPYDIFCTQLIIKGRHRSKELFSKDPDYIVVPYTKVQFDLLLQEKEDWPISLLGFLGEVHFHLPKDPLLTFTLQTAIIFPHMTSTTPLEKGIVIFTDGSANGRSVTYIQGREPIIKENTQNTAQQAEIVAVITAFEEVSQPFNLYTDSKYVTGLFPEIETATLSPRTKIYTELKHLQRLIHKRQEKFYIGHIRGHTGLPGPLAQGNAYADSLTRILTAAGKRTADGSEFEKRTADGSEFESPKKKAKVE

SEQ ID NO: 3254 - protein, 2125 aa, synthetic construct
MPAAKRVKLDGGDKKYSIGLDIGTNSVGWAVITDEYKVPSKKFKVLGNTDRHSIKKNLIGALLFDSGETAEATRLKRTARRRYTRRKNRICYLQEIFSNEMAKVDDSFFHRLEESFLVEEDKKHERHPIFGNIVDEVAYHEKYPTIYHLRKKLVDSTDKADLRLIYLALAHMIKFRGHFLIEGDLNPDNSDVDKLFIQLVQTYNQLFEENPINASGVDAKAILSARLSKSRRLENLIAQLPGEKKNGLFGNLIALSLGLTPNFKSNFDLAEDAKLQLSKDTYDDDLDNLLAQIGDQYADLFLAAKNLSDAILLSDILRVNTEITKAPLSASMIKRYDEHHQDLTLLKALVRQQLPEKYKEIFFDQSKNGYAGYIDGGASQEEFYKFIKPILEKMDGTEELLVKLNREDLLRKQRTFDNGSIPHQIHLGELHAILRRQEDFYPFLKDNREKIEKILTFRIPYYVGPLARGNSRFAWMTRKSEETITPWNFEEVVDKGASAQSFIERMTNFDKNLPNEKVLPKHSLLYEYFTVYNELTKVKYVTEGMRKPAFLSGEQKKAIVDLLFKTNRKVTVKQLKEDYFKKIECFDSVEISGVEDRFNASLGTYHDLLKIIKDKDFLDNEENEDILEDIVLTLTLFEDREMIEERLKTYAHLFDDKVMKQLKRRRYTGWGRLSRKLINGIRDKQSGKTILDFLKSDGFANRNFMQLIHDDSLTFKEDIQKAQVSGQGDSLHEHIANLAGSPAIKKGILQTVKVVDELVKVMGRHKPENIVIEMARENQTTQKGQKNSRERMKRIEEGIKELGSQILKEHPVENTQLQNEKLYLYYLQNGRDMYVDQELDINRLSDYDVDHIVPQSFLKDDSIDNKVLTRSDKARGKSDNVPSEEVVKKMKNYWRQLLNAKLITQRKFDNLTKAERGGLSELDKAGFIKRQLVETRQITKHVAQILDSRMNTKYDENDKLIREVKVITLKSKLVSDFRKDFQFYKVREINNYHHAHDAYLNAVVGTALIKKYPKLESEFVYGDYKVYDVRKMIAKSEQEIGKATAKYFFYSNIMNFFKTEITLANGEIRKRPLIETNGETGEIVWDKGRDFATVRKVLSMPQVNIVKKTEVQTGGFSKESILPKRNSDKLIARKKDWDPKKYGGFDSPTVAYSVLVVAKVEKGKSKKLKSVKELLGITIMERSSFEKNPIDFLEAKGYKEVKKDLIIKLPKYSLFELENGRKRMLASAGELQKGNELALPSKYVNFLYLASHYEKLKGSPEDNEQKQLFVEQHKHYLDEIIEQISEFSKRVILADANLDKVLSAYNKHRDKPIREQAENIIHLFTLTNLGAPAAFKYFDTTIDRKRYTSTKEVLDATLIHQSITGLYETRIDLSQLGGDGGGGGGSGGGGSGGGGSGGGGSGGVQEISDSRPMLHIYLNGRRFLGLLDTGADKTCIAGRDWPANWPIHQTESSLQGLGMACGVARSSQPLRWQHEDKSGIIHPFVIPTLPFTLWGRDIMKDIKVRLMTDSPDDSQDLMIGAIESNLFADQISWKSDQPVWLNQWPLKQEKLQALQQLVTEQLQLGHLEESNSPWNTPVFVIKKKSGKWRLLQDLRAVNATMHDMGALQPGLPSPVAVPKGWEIIIIDLQDCFFNIKLHPEDCKRFAFSVPSPNFKRPYQRFQWKVLPQGMKNSPTLCQKFVDKAILTVRDKYQDSYIVHYMDDILLAHPSRSIVDEILTSMIQALNKHGLVVSTEKIQKYDNLKYLGTHIQGDSVSYQKLQIRTDKLRTLNDFQKLLGNINWIRPFLKLTTGELKPLFEILNPDSNPISTRKLTPEACKALQLMNERLSTARVKRLDLSQPWSLCILKTEYTPTACLWQDGVVEWIHLPHISPKVITPYDIFCTQLIIKGRHRSKELFSKDPDYIVVPYTKVQFDLLLQEKEDWPISLLGFLGEVHFHLPKDPLLTFTLQTAIIFPHMTSTTPLEKGIVIFTDGSANGRSVTYIQGREPIIKENTQNTAQQAEIVAVITAFEEVSQPFNLYTDSKYVTGLFPEIETATLSPRTKIYTELKHLQRLIHKRQEKFYIGHIRGHTGLPGPLAQGNAYADSLTRILTAAGKRTADGSEFEKRTADGSEFESPKKKAKVE

SEQ ID NO: 3255 - protein, 2116 aa, synthetic construct
MPAAKRVKLDGGDKKYSIGLDIGTNSVGWAVITDEYKVPSKKFKVLGNTDRHSIKKNLIGALLFDSGETAEATRLKRTARRRYTRRKNRICYLQEIFSNEMAKVDDSFFHRLEESFLVEEDKKHERHPIFGNIVDEVAYHEKYPTIYHLRKKLVDSTDKADLRLIYLALAHMIKFRGHFLIEGDLNPDNSDVDKLFIQLVQTYNQLFEENPINASGVDAKAILSARLSKSRRLENLIAQLPGEKKNGLFGNLIALSLGLTPNFKSNFDLAEDAKLQLSKDTYDDDLDNLLAQIGDQYADLFLAAKNLSDAILLSDILRVNTEITKAPLSASMIKRYDEHHQDLTLLKALVRQQLPEKYKEIFFDQSKNGYAGYIDGGASQEEFYKFIKPILEKMDGTEELLVKLNREDLLRKQRTFDNGSIPHQIHLGELHAILRRQEDFYPFLKDNREKIEKILTFRIPYYVGPLARGNSRFAWMTRKSEETITPWNFEEVVDKGASAQSFIERMTNFDKNLPNEKVLPKHSLLYEYFTVYNELTKVKYVTEGMRKPAFLSGEQKKAIVDLLFKTNRKVTVKQLKEDYFKKIECFDSVEISGVEDRFNASLGTYHDLLKIIKDKDFLDNEENEDILEDIVLTLTLFEDREMIEERLKTYAHLFDDKVMKQLKRRRYTGWGRLSRKLINGIRDKQSGKTILDFLKSDGFANRNFMQLIHDDSLTFKEDIQKAQVSGQGDSLHEHIANLAGSPAIKKGILQTVKVVDELVKVMGRHKPENIVIEMARENQTTQKGQKNSRERMKRIEEGIKELGSQILKEHPVENTQLQNEKLYLYYLQNGRDMYVDQELDINRLSDYDVDHIVPQSFLKDDSIDNKVLTRSDKARGKSDNVPSEEVVKKMKNYWRQLLNAKLITQRKFDNLTKAERGGLSELDKAGFIKRQLVETRQITKHVAQILDSRMNTKYDENDKLIREVKVITLKSKLVSDFRKDFQFYKVREINNYHHAHDAYLNAVVGTALIKKYPKLESEFVYGDYKVYDVRKMIAKSEQEIGKATAKYFFYSNIMNFFKTEITLANGEIRKRPLIETNGETGEIVWDKGRDFATVRKVLSMPQVNIVKKTEVQTGGFSKESILPKRNSDKLIARKKDWDPKKYGGFDSPTVAYSVLVVAKVEKGKSKKLKSVKELLGITIMERSSFEKNPIDFLEAKGYKEVKKDLIIKLPKYSLFELENGRKRMLASAGELQKGNELALPSKYVNFLYLASHYEKLKGSPEDNEQKQLFVEQHKHYLDEIIEQISEFSKRVILADANLDKVLSAYNKHRDKPIREQAENIIHLFTLTNLGAPAAFKYFDTTIDRKRYTSTKEVLDATLIHQSITGLYETRIDLSQLGGDGGPAPEAAAKGGGGGVQEISDSRPMLHIYLNGRRFLGLLDTGADKTCIAGRDWPANWPIHQTESSLQGLGMACGVARSSQPLRWQHEDKSGIIHPFVIPTLPFTLWGRDIMKDIKVRLMTDSPDDSQDLMIGAIESNLFADQISWKSDQPVWLNQWPLKQEKLQALQQLVTEQLQLGHLEESNSPWNTPVFVIKKKSGKWRLLQDLRAVNATMHDMGALQPGLPSPVAVPKGWEIIIIDLQDCFFNIKLHPEDCKRFAFSVPSPNFKRPYQRFQWKVLPQGMKNSPTLCQKFVDKAILTVRDKYQDSYIVHYMDDILLAHPSRSIVDEILTSMIQALNKHGLVVSTEKIQKYDNLKYLGTHIQGDSVSYQKLQIRTDKLRTLNDFQKLLGNINWIRPFLKLTTGELKPLFEILNPDSNPISTRKLTPEACKALQLMNERLSTARVKRLDLSQPWSLCILKTEYTPTACLWQDGVVEWIHLPHISPKVITPYDIFCTQLIIKGRHRSKELFSKDPDYIVVPYTKVQFDLLLQEKEDWPISLLGFLGEVHFHLPKDPLLTFTLQTAIIFPHMTSTTPLEKGIVIFTDGSANGRSVTYIQGREPIIKENTQNTAQQAEIVAVITAFEEVSQPFNLYTDSKYVTGLFPEIETATLSPRTKIYTELKHLQRLIHKRQEKFYIGHIRGHTGLPGPLAQGNAYADSLTRILTAAGKRTADGSEFEKRTADGSEFESPKKKAKVE

SEQ ID NO: 3256 - protein, 2112 aa, synthetic construct
MPAAKRVKLDGGDKKYSIGLDIGTNSVGWAVITDEYKVPSKKFKVLGNTDRHSIKKNLIGALLFDSGETAEATRLKRTARRRYTRRKNRICYLQEIFSNEMAKVDDSFFHRLEESFLVEEDKKHERHPIFGNIVDEVAYHEKYPTIYHLRKKLVDSTDKADLRLIYLALAHMIKFRGHFLIEGDLNPDNSDVDKLFIQLVQTYNQLFEENPINASGVDAKAILSARLSKSRRLENLIAQLPGEKKNGLFGNLIALSLGLTPNFKSNFDLAEDAKLQLSKDTYDDDLDNLLAQIGDQYADLFLAAKNLSDAILLSDILRVNTEITKAPLSASMIKRYDEHHQDLTLLKALVRQQLPEKYKEIFFDQSKNGYAGYIDGGASQEEFYKFIKPILEKMDGTEELLVKLNREDLLRKQRTFDNGSIPHQIHLGELHAILRRQEDFYPFLKDNREKIEKILTFRIPYYVGPLARGNSRFAWMTRKSEETITPWNFEEVVDKGASAQSFIERMTNFDKNLPNEKVLPKHSLLYEYFTVYNELTKVKYVTEGMRKPAFLSGEQKKAIVDLLFKTNRKVTVKQLKEDYFKKIECFDSVEISGVEDRFNASLGTYHDLLKIIKDKDFLDNEENEDILEDIVLTLTLFEDREMIEERLKTYAHLFDDKVMKQLKRRRYTGWGRLSRKLINGIRDKQSGKTILDFLKSDGFANRNFMQLIHDDSLTFKEDIQKAQVSGQGDSLHEHIANLAGSPAIKKGILQTVKVVDELVKVMGRHKPENIVIEMARENQTTQKGQKNSRERMKRIEEGIKELGSQILKEHPVENTQLQNEKLYLYYLQNGRDMYVDQELDINRLSDYDVDHIVPQSFLKDDSIDNKVLTRSDKARGKSDNVPSEEVVKKMKNYWRQLLNAKLITQRKFDNLTKAERGGLSELDKAGFIKRQLVETRQITKHVAQILDSRMNTKYDENDKLIREVKVITLKSKLVSDFRKDFQFYKVREINNYHHAHDAYLNAVVGTALIKKYPKLESEFVYGDYKVYDVRKMIAKSEQEIGKATAKYFFYSNIMNFFKTEITLANGEIRKRPLIETNGETGEIVWDKGRDFATVRKVLSMPQVNIVKKTEVQTGGFSKESILPKRNSDKLIARKKDWDPKKYGGFDSPTVAYSVLVVAKVEKGKSKKLKSVKELLGITIMERSSFEKNPIDFLEAKGYKEVKKDLIIKLPKYSLFELENGRKRMLASAGELQKGNELALPSKYVNFLYLASHYEKLKGSPEDNEQKQLFVEQHKHYLDEIIEQISEFSKRVILADANLDKVLSAYNKHRDKPIREQAENIIHLFTLTNLGAPAAFKYFDTTIDRKRYTSTKEVLDATLIHQSITGLYETRIDLSQLGGDGGPAPAPAPGGVQEISDSRPMLHIYLNGRRFLGLLDTGADKTCIAGRDWPANWPIHQTESSLQGLGMACGVARSSQPLRWQHEDKSGIIHPFVIPTLPFTLWGRDIMKDIKVRLMTDSPDDSQDLMIGAIESNLFADQISWKSDQPVWLNQWPLKQEKLQALQQLVTEQLQLGHLEESNSPWNTPVFVIKKKSGKWRLLQDLRAVNATMHDMGALQPGLPSPVAVPKGWEIIIIDLQDCFFNIKLHPEDCKRFAFSVPSPNFKRPYQRFQWKVLPQGMKNSPTLCQKFVDKAILTVRDKYQDSYIVHYMDDILLAHPSRSIVDEILTSMIQALNKHGLVVSTEKIQKYDNLKYLGTHIQGDSVSYQKLQIRTDKLRTLNDFQKLLGNINWIRPFLKLTTGELKPLFEILNPDSNPISTRKLTPEACKALQLMNERLSTARVKRLDLSQPWSLCILKTEYTPTACLWQDGVVEWIHLPHISPKVITPYDIFCTQLIIKGRHRSKELFSKDPDYIVVPYTKVQFDLLLQEKEDWPISLLGFLGEVHFHLPKDPLLTFTLQTAIIFPHMTSTTPLEKGIVIFTDGSANGRSVTYIQGREPIIKENTQNTAQQAEIVAVITAFEEVSQPFNLYTDSKYVTGLFPEIETATLSPRTKIYTELKHLQRLIHKRQEKFYIGHIRGHTGLPGPLAQGNAYADSLTRILTAAGKRTADGSEFEKRTADGSEFESPKKKAKVE

SEQ ID NO: 3257 - protein, 2116 aa, synthetic construct
MPAAKRVKLDGGDKKYSIGLDIGTNSVGWAVITDEYKVPSKKFKVLGNTDRHSIKKNLIGALLFDSGETAEATRLKRTARRRYTRRKNRICYLQEIFSNEMAKVDDSFFHRLEESFLVEEDKKHERHPIFGNIVDEVAYHEKYPTIYHLRKKLVDSTDKADLRLIYLALAHMIKFRGHFLIEGDLNPDNSDVDKLFIQLVQTYNQLFEENPINASGVDAKAILSARLSKSRRLENLIAQLPGEKKNGLFGNLIALSLGLTPNFKSNFDLAEDAKLQLSKDTYDDDLDNLLAQIGDQYADLFLAAKNLSDAILLSDILRVNTEITKAPLSASMIKRYDEHHQDLTLLKALVRQQLPEKYKEIFFDQSKNGYAGYIDGGASQEEFYKFIKPILEKMDGTEELLVKLNREDLLRKQRTFDNGSIPHQIHLGELHAILRRQEDFYPFLKDNREKIEKILTFRIPYYVGPLARGNSRFAWMTRKSEETITPWNFEEVVDKGASAQSFIERMTNFDKNLPNEKVLPKHSLLYEYFTVYNELTKVKYVTEGMRKPAFLSGEQKKAIVDLLFKTNRKVTVKQLKEDYFKKIECFDSVEISGVEDRFNASLGTYHDLLKIIKDKDFLDNEENEDILEDIVLTLTLFEDREMIEERLKTYAHLFDDKVMKQLKRRRYTGWGRLSRKLINGIRDKQSGKTILDFLKSDGFANRNFMQLIHDDSLTFKEDIQKAQVSGQGDSLHEHIANLAGSPAIKKGILQTVKVVDELVKVMGRHKPENIVIEMARENQTTQKGQKNSRERMKRIEEGIKELGSQILKEHPVENTQLQNEKLYLYYLQNGRDMYVDQELDINRLSDYDVDHIVPQSFLKDDSIDNKVLTRSDKARGKSDNVPSEEVVKKMKNYWRQLLNAKLITQRKFDNLTKAERGGLSELDKAGFIKRQLVETRQITKHVAQILDSRMNTKYDENDKLIREVKVITLKSKLVSDFRKDFQFYKVREINNYHHAHDAYLNAVVGTALIKKYPKLESEFVYGDYKVYDVRKMIAKSEQEIGKATAKYFFYSNIMNFFKTEITLANGEIRKRPLIETNGETGEIVWDKGRDFATVRKVLSMPQVNIVKKTEVQTGGFSKESILPKRNSDKLIARKKDWDPKKYGGFDSPTVAYSVLVVAKVEKGKSKKLKSVKELLGITIMERSSFEKNPIDFLEAKGYKEVKKDLIIKLPKYSLFELENGRKRMLASAGELQKGNELALPSKYVNFLYLASHYEKLKGSPEDNEQKQLFVEQHKHYLDEIIEQISEFSKRVILADANLDKVLSAYNKHRDKPIREQAENIIHLFTLTNLGAPAAFKYFDTTIDRKRYTSTKEVLDATLIHQSITGLYETRIDLSQLGGDGGEAAAKPAPGGGGGVQEISDSRPMLHIYLNGRRFLGLLDTGADKTCIAGRDWPANWPIHQTESSLQGLGMACGVARSSQPLRWQHEDKSGIIHPFVIPTLPFTLWGRDIMKDIKVRLMTDSPDDSQDLMIGAIESNLFADQISWKSDQPVWLNQWPLKQEKLQALQQLVTEQLQLGHLEESNSPWNTPVFVIKKKSGKWRLLQDLRAVNATMHDMGALQPGLPSPVAVPKGWEIIIIDLQDCFFNIKLHPEDCKRFAFSVPSPNFKRPYQRFQWKVLPQGMKNSPTLCQKFVDKAILTVRDKYQDSYIVHYMDDILLAHPSRSIVDEILTSMIQALNKHGLVVSTEKIQKYDNLKYLGTHIQGDSVSYQKLQIRTDKLRTLNDFQKLLGNINWIRPFLKLTTGELKPLFEILNPDSNPISTRKLTPEACKALQLMNERLSTARVKRLDLSQPWSLCILKTEYTPTACLWQDGVVEWIHLPHISPKVITPYDIFCTQLIIKGRHRSKELFSKDPDYIVVPYTKVQFDLLLQEKEDWPISLLGFLGEVHFHLPKDPLLTFTLQTAIIFPHMTSTTPLEKGIVIFTDGSANGRSVTYIQGREPIIKENTQNTAQQAEIVAVITAFEEVSQPFNLYTDSKYVTGLFPEIETATLSPRTKIYTELKHLQRLIHKRQEKFYIGHIRGHTGLPGPLAQGNAYADSLTRILTAAGKRTADGSEFEKRTADGSEFESPKKKAKVE

SEQ ID NO: 3258 - protein, 2116 aa, synthetic construct
MPAAKRVKLDGGDKKYSIGLDIGTNSVGWAVITDEYKVPSKKFKVLGNTDRHSIKKNLIGALLFDSGETAEATRLKRTARRRYTRRKNRICYLQEIFSNEMAKVDDSFFHRLEESFLVEEDKKHERHPIFGNIVDEVAYHEKYPTIYHLRKKLVDSTDKADLRLIYLALAHMIKFRGHFLIEGDLNPDNSDVDKLFIQLVQTYNQLFEENPINASGVDAKAILSARLSKSRRLENLIAQLPGEKKNGLFGNLIALSLGLTPNFKSNFDLAEDAKLQLSKDTYDDDLDNLLAQIGDQYADLFLAAKNLSDAILLSDILRVNTEITKAPLSASMIKRYDEHHQDLTLLKALVRQQLPEKYKEIFFDQSKNGYAGYIDGGASQEEFYKFIKPILEKMDGTEELLVKLNREDLLRKQRTFDNGSIPHQIHLGELHAILRRQEDFYPFLKDNREKIEKILTFRIPYYVGPLARGNSRFAWMTRKSEETITPWNFEEVVDKGASAQSFIERMTNFDKNLPNEKVLPKHSLLYEYFTVYNELTKVKYVTEGMRKPAFLSGEQKKAIVDLLFKTNRKVTVKQLKEDYFKKIECFDSVEISGVEDRFNASLGTYHDLLKIIKDKDFLDNEENEDILEDIVLTLTLFEDREMIEERLKTYAHLFDDKVMKQLKRRRYTGWGRLSRKLINGIRDKQSGKTILDFLKSDGFANRNFMQLIHDDSLTFKEDIQKAQVSGQGDSLHEHIANLAGSPAIKKGILQTVKVVDELVKVMGRHKPENIVIEMARENQTTQKGQKNSRERMKRIEEGIKELGSQILKEHPVENTQLQNEKLYLYYLQNGRDMYVDQELDINRLSDYDVDHIVPQSFLKDDSIDNKVLTRSDKARGKSDNVPSEEVVKKMKNYWRQLLNAKLITQRKFDNLTKAERGGLSELDKAGFIKRQLVETRQITKHVAQILDSRMNTKYDENDKLIREVKVITLKSKLVSDFRKDFQFYKVREINNYHHAHDAYLNAVVGTALIKKYPKLESEFVYGDYKVYDVRKMIAKSEQEIGKATAKYFFYSNIMNFFKTEITLANGEIRKRPLIETNGETGEIVWDKGRDFATVRKVLSMPQVNIVKKTEVQTGGFSKESILPKRNSDKLIARKKDWDPKKYGGFDSPTVAYSVLVVAKVEKGKSKKLKSVKELLGITIMERSSFEKNPIDFLEAKGYKEVKKDLIIKLPKYSLFELENGRKRMLASAGELQKGNELALPSKYVNFLYLASHYEKLKGSPEDNEQKQLFVEQHKHYLDEIIEQISEFSKRVILADANLDKVLSAYNKHRDKPIREQAENIIHLFTLTNLGAPAAFKYFDTTIDRKRYTSTKEVLDATLIHQSITGLYETRIDLSQLGGDGGPAPGGSEAAAKGGVQEISDSRPMLHIYLNGRRFLGLLDTGADKTCIAGRDWPANWPIHQTESSLQGLGMACGVARSSQPLRWQHEDKSGIIHPFVIPTLPFTLWGRDIMKDIKVRLMTDSPDDSQDLMIGAIESNLFADQISWKSDQPVWLNQWPLKQEKLQALQQLVTEQLQLGHLEESNSPWNTPVFVIKKKSGKWRLLQDLRAVNATMHDMGALQPGLPSPVAVPKGWEIIIIDLQDCFFNIKLHPEDCKRFAFSVPSPNFKRPYQRFQWKVLPQGMKNSPTLCQKFVDKAILTVRDKYQDSYIVHYMDDILLAHPSRSIVDEILTSMIQALNKHGLVVSTEKIQKYDNLKYLGTHIQGDSVSYQKLQIRTDKLRTLNDFQKLLGNINWIRPFLKLTTGELKPLFEILNPDSNPISTRKLTPEACKALQLMNERLSTARVKRLDLSQPWSLCILKTEYTPTACLWQDGVVEWIHLPHISPKVITPYDIFCTQLIIKGRHRSKELFSKDPDYIVVPYTKVQFDLLLQEKEDWPISLLGFLGEVHFHLPKDPLLTFTLQTAIIFPHMTSTTPLEKGIVIFTDGSANGRSVTYIQGREPIIKENTQNTAQQAEIVAVITAFEEVSQPFNLYTDSKYVTGLFPEIETATLSPRTKIYTELKHLQRLIHKRQEKFYIGHIRGHTGLPGPLAQGNAYADSLTRILTAAGKRTADGSEFEKRTADGSEFESPKKKAKVE

SEQ ID NO: 3259 - protein, 2123 aa, synthetic construct
MPAAKRVKLDGGDKKYSIGLDIGTNSVGWAVITDEYKVPSKKFKVLGNTDRHSIKKNLIGALLFDSGETAEATRLKRTARRRYTRRKNRICYLQEIFSNEMAKVDDSFFHRLEESFLVEEDKKHERHPIFGNIVDEVAYHEKYPTIYHLRKKLVDSTDKADLRLIYLALAHMIKFRGHFLIEGDLNPDNSDVDKLFIQLVQTYNQLFEENPINASGVDAKAILSARLSKSRRLENLIAQLPGEKKNGLFGNLIALSLGLTPNFKSNFDLAEDAKLQLSKDTYDDDLDNLLAQIGDQYADLFLAAKNLSDAILLSDILRVNTEITKAPLSASMIKRYDEHHQDLTLLKALVRQQLPEKYKEIFFDQSKNGYAGYIDGGASQEEFYKFIKPILEKMDGTEELLVKLNREDLLRKQRTFDNGSIPHQIHLGELHAILRRQEDFYPFLKDNREKIEKILTFRIPYYVGPLARGNSRFAWMTRKSEETITPWNFEEVVDKGASAQSFIERMTNFDKNLPNEKVLPKHSLLYEYFTVYNELTKVKYVTEGMRKPAFLSGEQKKAIVDLLFKTNRKVTVKQLKEDYFKKIECFDSVEISGVEDRFNASLGTYHDLLKIIKDKDFLDNEENEDILEDIVLTLTLFEDREMIEERLKTYAHLFDDKVMKQLKRRRYTGWGRLSRKLINGIRDKQSGKTILDFLKSDGFANRNFMQLIHDDSLTFKEDIQKAQVSGQGDSLHEHIANLAGSPAIKKGILQTVKVVDELVKVMGRHKPENIVIEMARENQTTQKGQKNSRERMKRIEEGIKELGSQILKEHPVENTQLQNEKLYLYYLQNGRDMYVDQELDINRLSDYDVDHIVPQSFLKDDSIDNKVLTRSDKARGKSDNVPSEEVVKKMKNYWRQLLNAKLITQRKFDNLTKAERGGLSELDKAGFIKRQLVETRQITKHVAQILDSRMNTKYDENDKLIREVKVITLKSKLVSDFRKDFQFYKVREINNYHHAHDAYLNAVVGTALIKKYPKLESEFVYGDYKVYDVRKMIAKSEQEIGKATAKYFFYSNIMNFFKTEITLANGEIRKRPLIETNGETGEIVWDKGRDFATVRKVLSMPQVNIVKKTEVQTGGFSKESILPKRNSDKLIARKKDWDPKKYGGFDSPTVAYSVLVVAKVEKGKSKKLKSVKELLGITIMERSSFEKNPIDFLEAKGYKEVKKDLIIKLPKYSLFELENGRKRMLASAGELQKGNELALPSKYVNFLYLASHYEKLKGSPEDNEQKQLFVEQHKHYLDEIIEQISEFSKRVILADANLDKVLSAYNKHRDKPIREQAENIIHLFTLTNLGAPAAFKYFDTTIDRKRYTSTKEVLDATLIHQSITGLYETRIDLSQLGGDGGGSSGSSGSSGSSGSSGSSGGVQEISDSRPMLHIYLNGRRFLGLLDTGADKTCIAGRDWPANWPIHQTESSLQGLGMACGVARSSQPLRWQHEDKSGIIHPFVIPTLPFTLWGRDIMKDIKVRLMTDSPDDSQDLMIGAIESNLFADQISWKSDQPVWLNQWPLKQEKLQALQQLVTEQLQLGHLEESNSPWNTPVFVIKKKSGKWRLLQDLRAVNATMHDMGALQPGLPSPVAVPKGWEIIIIDLQDCFFNIKLHPEDCKRFAFSVPSPNFKRPYQRFQWKVLPQGMKNSPTLCQKFVDKAILTVRDKYQDSYIVHYMDDILLAHPSRSIVDEILTSMIQALNKHGLVVSTEKIQKYDNLKYLGTHIQGDSVSYQKLQIRTDKLRTLNDFQKLLGNINWIRPFLKLTTGELKPLFEILNPDSNPISTRKLTPEACKALQLMNERLSTARVKRLDLSQPWSLCILKTEYTPTACLWQDGVVEWIHLPHISPKVITPYDIFCTQLIIKGRHRSKELFSKDPDYIVVPYTKVQFDLLLQEKEDWPISLLGFLGEVHFHLPKDPLLTFTLQTAIIFPHMTSTTPLEKGIVIFTDGSANGRSVTYIQGREPIIKENTQNTAQQAEIVAVITAFEEVSQPFNLYTDSKYVTGLFPEIETATLSPRTKIYTELKHLQRLIHKRQEKFYIGHIRGHTGLPGPLAQGNAYADSLTRILTAAGKRTADGSEFEKRTADGSEFESPKKKAKVE

SEQ ID NO: 3260 - protein, 2125 aa, synthetic construct; identical to SEQ ID NO: 3157

SEQ ID NO: 3261 - protein, 2116 aa, synthetic construct
MPAAKRVKLDGGDKKYSIGLDIGTNSVGWAVITDEYKVPSKKFKVLGNTDRHSIKKNLIGALLFDSGETAEATRLKRTARRRYTRRKNRICYLQEIFSNEMAKVDDSFFHRLEESFLVEEDKKHERHPIFGNIVDEVAYHEKYPTIYHLRKKLVDSTDKADLRLIYLALAHMIKFRGHFLIEGDLNPDNSDVDKLFIQLVQTYNQLFEENPINASGVDAKAILSARLSKSRRLENLIAQLPGEKKNGLFGNLIALSLGLTPNFKSNFDLAEDAKLQLSKDTYDDDLDNLLAQIGDQYADLFLAAKNLSDAILLSDILRVNTEITKAPLSASMIKRYDEHHQDLTLLKALVRQQLPEKYKEIFFDQSKNGYAGYIDGGASQEEFYKFIKPILEKMDGTEELLVKLNREDLLRKQRTFDNGSIPHQIHLGELHAILRRQEDFYPFLKDNREKIEKILTFRIPYYVGPLARGNSRFAWMTRKSEETITPWNFEEVVDKGASAQSFIERMTNFDKNLPNEKVLPKHSLLYEYFTVYNELTKVKYVTEGMRKPAFLSGEQKKAIVDLLFKTNRKVTVKQLKEDYFKKIECFDSVEISGVEDRFNASLGTYHDLLKIIKDKDFLDNEENEDILEDIVLTLTLFEDREMIEERLKTYAHLFDDKVMKQLKRRRYTGWGRLSRKLINGIRDKQSGKTILDFLKSDGFANRNFMQLIHDDSLTFKEDIQKAQVSGQGDSLHEHIANLAGSPAIKKGILQTVKVVDELVKVMGRHKPENIVIEMARENQTTQKGQKNSRERMKRIEEGIKELGSQILKEHPVENTQLQNEKLYLYYLQNGRDMYVDQELDINRLSDYDVDHIVPQSFLKDDSIDNKVLTRSDKARGKSDNVPSEEVVKKMKNYWRQLLNAKLITQRKFDNLTKAERGGLSELDKAGFIKRQLVETRQITKHVAQILDSRMNTKYDENDKLIREVKVITLKSKLVSDFRKDFQFYKVREINNYHHAHDAYLNAVVGTALIKKYPKLESEFVYGDYKVYDVRKMIAKSEQEIGKATAKYFFYSNIMNFFKTEITLANGEIRKRPLIETNGETGEIVWDKGRDFATVRKVLSMPQVNIVKKTEVQTGGFSKESILPKRNSDKLIARKKDWDPKKYGGFDSPTVAYSVLVVAKVEKGKSKKLKSVKELLGITIMERSSFEKNPIDFLEAKGYKEVKKDLIIKLPKYSLFELENGRKRMLASAGELQKGNELALPSKYVNFLYLASHYEKLKGSPEDNEQKQLFVEQHKHYLDEIIEQISEFSKRVILADANLDKVLSAYNKHRDKPIREQAENIIHLFTLTNLGAPAAFKYFDTTIDRKRYTSTKEVLDATLIHQSITGLYETRIDLSQLGGDGGGGSGSSEAAAKGGVQEISDSRPMLHIYLNGRRFLGLLDTGADKTCIAGRDWPANWPIHQTESSLQGLGMACGVARSSQPLRWQHEDKSGIIHPFVIPTLPFTLWGRDIMKDIKVRLMTDSPDDSQDLMIGAIESNLFADQISWKSDQPVWLNQWPLKQEKLQALQQLVTEQLQLGHLEESNSPWNTPVFVIKKKSGKWRLLQDLRAVNATMHDMGALQPGLPSPVAVPKGWEIIIIDLQDCFFNIKLHPEDCKRFAFSVPSPNFKRPYQRFQWKVLPQGMKNSPTLCQKFVDKAILTVRDKYQDSYIVHYMDDILLAHPSRSIVDEILTSMIQALNKHGLVVSTEKIQKYDNLKYLGTHIQGDSVSYQKLQIRTDKLRTLNDFQKLLGNINWIRPFLKLTTGELKPLFEILNGDSNPISTRKLTPEACKALQLMNERLSTARVKRLDLSQPWSLCILKTEYTPTACLWQDGVVEWIHLPHISPKVITPYDIFCTQLIIKGRHRSKELFSKDPDYIVVPYTKVQFDLLLQEKEDWPISLLGFLGEVHFHLPKDPLLTFTLQTAIIFPHMTSTTPLEKGIVIFTDGSANGRSVTYIQGREPIIKENTQNTAQQAEIVAVITAFEEVSQPFNLYTDSKYVTGLFPEIETATLSPRTKIYTELKHLQRLIHKRQEKFYIGHIRGHTGLPGPLAQGNAYADSLTRILTAAGKRTADGSEFEKRTADGSEFESPKKKAKVE

SEQ ID NO: 3262 - protein, 2114 aa, synthetic construct
MPAAKRVKLDGGDKKYSIGLDIGTNSVGWAVITDEYKVPSKKFKVLGNTDRHSIKKNLIGALLFDSGETAEATRLKRTARRRYTRRKNRICYLQEIFSNEMAKVDDSFFHRLEESFLVEEDKKHERHPIFGNIVDEVAYHEKYPTIYHLRKKLVDSTDKADLRLIYLALAHMIKFRGHFLIEGDLNPDNSDVDKLFIQLVQTYNQLFEENPINASGVDAKAILSARLSKSRRLENLIAQLPGEKKNGLFGNLIALSLGLTPNFKSNFDLAEDAKLQLSKDTYDDDLDNLLAQIGDQYADLFLAAKNLSDAILLSDILRVNTEITKAPLSASMIKRYDEHHQDLTLLKALVRQQLPEKYKEIFFDQSKNGYAGYIDGGASQEEFYKFIKPILEKMDGTEELLVKLNREDLLRKQRTFDNGSIPHQIHLGELHAILRRQEDFYPFLKDNREKIEKILTFRIPYYVGPLARGNSRFAWMTRKSEETITPWNFEEVVDKGASAQSFIERMTNFDKNLPNEKVLPKHSLLYEYFTVYNELTKVKYVTEGMRKPAFLSGEQKKAIVDLLFKTNRKVTVKQLKEDYFKKIECFDSVEISGVEDRFNASLGTYHDLLKIIKDKDFLDNEENEDILEDIVLTLTLFEDREMIEERLKTYAHLFDDKVMKQLKRRRYTGWGRLSRKLINGIRDKQSGKTILDFLKSDGFANRNFMQLIHDDSLTFKEDIQKAQVSGQGDSLHEHIANLAGSPAIKKGILQTVKVVDELVKVMGRHKPENIVIEMARENQTTQKGQKNSRERMKRIEEGIKELGSQILKEHPVENTQLQNEKLYLYYLQNGRDMYVDQELDINRLSDYDVDHIVPQSFLKDDSIDNKVLTRSDKARGKSDNVPSEEVVKKMKNYWRQLLNAKLITQRKFDNLTKAERGGLSELDKAGFIKRQLVETRQITKHVAQILDSRMNTKYDENDKLIREVKVITLKSKLVSDFRKDFQFYKVREINNYHHAHDAYLNAVVGTALIKKYPKLESEFVYGDYKVYDVRKMIAKSEQEIGKATAKYFFYSNIMNFFKTEITLANGEIRKRPLIETNGETGEIVWDKGRDFATVRKVLSMPQVNIVKKTEVQTGGFSKESILPKRNSDKLIARKKDWDPKKYGGFDSPTVAYSVLVVAKVEKGKSKKLKSVKELLGITIMERSSFEKNPIDFLEAKGYKEVKKDLIIKLPKYSLFELENGRKRMLASAGELQKGNELALPSKYVNFLYLASHYEKLKGSPEDNEQKQLFVEQHKHYLDEIIEQISEFSKRVILADANLDKVLSAYNKHRDKPIREQAENIIHLFTLTNLGAPAAFKYFDTTIDRKRYTSTKEVLDATLIHQSITGLYETRIDLSQLGGDGGPAPAPAPAPGGVQEISDSRPMLHIYLNGRRFLGLLDTGADKTCIAGRDWPANWPIHQTESSLQGLGMACGVARSSQPLRWQHEDKSGIIHPFVIPTLPFTLWGRDIMKDIKVRLMTDSPDDSQDLMIGAIESNLFADQISWKSDQPVWLNQWPLKQEKLQALQQLVTEQLQLGHLEESNSPWNTPVFVIKKKSGKWRLLQDLRAVNATMHDMGALQPGLPSPVAVPKGWEIIIIDLQDCFFNIKLHPEDCKRFAFSVPSPNFKRPYQRFQWKVLPQGMKNSPTLCQKFVDKAILTVRDKYQDSYIVHYMDDILLAHPSRSIVDEILTSMIQALNKHGLVVSTEKIQKYDNLKYLGTHIQGDSVSYQKLQIRTDKLRTLNDFQKLLGNINWIRPFLKLTTGELKPLFEILNGDSNPISTRKLTPEACKALQLMNERLSTARVKRLDLSQPWSLCILKTEYTPTACLWQDGVVEWIHLPHISPKVITPYDIFCTQLIIKGRHRSKELFSKDPDYIVVPYTKVQFDLLLQEKEDWPISLLGFLGEVHFHLPKDPLLTFTLQTAIIFPHMTSTTPLEKGIVIFTDGSANGRSVTYIQGREPIIKENTQNTAQQAEIVAVITAFEEVSQPFNLYTDSKYVTGLFPEIETATLSPRTKIYTELKHLQRLIHKRQEKFYIGHIRGHTGLPGPLAQGNAYADSLTRILTAAGKRTADGSEFEKRTADGSEFESPKKKAKVE

SEQ ID NO: 3263 - protein, 2116 aa, synthetic construct; identical to SEQ ID NO: 3146

SEQ ID NO: 3264 - protein, 2114 aa, synthetic construct
MPAAKRVKLDGGDKKYSIGLDIGTNSVGWAVITDEYKVPSKKFKVLGNTDRHSIKKNLIGALLFDSGETAEATRLKRTARRRYTRRKNRICYLQEIFSNEMAKVDDSFFHRLEESFLVEEDKKHERHPIFGNIVDEVAYHEKYPTIYHLRKKLVDSTDKADLRLIYLALAHMIKFRGHFLIEGDLNPDNSDVDKLFIQLVQTYNQLFEENPINASGVDAKAILSARLSKSRRLENLIAQLPGEKKNGLFGNLIALSLGLTPNFKSNFDLAEDAKLQLSKDTYDDDLDNLLAQIGDQYADLFLAAKNLSDAILLSDILRVNTEITKAPLSASMIKRYDEHHQDLTLLKALVRQQLPEKYKEIFFDQSKNGYAGYIDGGASQEEFYKFIKPILEKMDGTEELLVKLNREDLLRKQRTFDNGSIPHQIHLGELHAILRRQEDFYPFLKDNREKIEKILTFRIPYYVGPLARGNSRFAWMTRKSEETITPWNFEEVVDKGASAQSFIERMTNFDKNLPNEKVLPKHSLLYEYFTVYNELTKVKYVTEGMRKPAFLSGEQKKAIVDLLFKTNRKVTVKQLKEDYFKKIECFDSVEISGVEDRFNASLGTYHDLLKIIKDKDFLDNEENEDILEDIVLTLTLFEDREMIEERLKTYAHLFDDKVMKQLKRRRYTGWGRLSRKLINGIRDKQSGKTILDFLKSDGFANRNFMQLIHDDSLTFKEDIQKAQVSGQGDSLHEHIANLAGSPAIKKGILQTVKVVDELVKVMGRHKPENIVIEMARENQTTQKGQKNSRERMKRIEEGIKELGSQILKEHPVENTQLQNEKLYLYYLQNGRDMYVDQELDINRLSDYDVDHIVPQSFLKDDSIDNKVLTRSDKARGKSDNVPSEEVVKKMKNYWRQLLNAKLITQRKFDNLTKAERGGLSELDKAGFIKRQLVETRQITKHVAQILDSRMNTKYDENDKLIREVKVITLKSKLVSDFRKDFQFYKVREINNYHHAHDAYLNAVVGTALIKKYPKLESEFVYGDYKVYDVRKMIAKSEQEIGKATAKYFFYSNIMNFFKTEITLANGEIRKRPLIETNGETGEIVWDKGRDFATVRKVLSMPQVNIVKKTEVQTGGFSKESILPKRNSDKLIARKKDWDPKKYGGFDSPTVAYSVLVVAKVEKGKSKKLKSVKELLGITIMERSSFEKNPIDFLEAKGYKEVKKDLIIKLPKYSLFELENGRKRMLASAGELQKGNELALPSKYVNFLYLASHYEKLKGSPEDNEQKQLFVEQHKHYLDEIIEQISEFSKRVILADANLDKVLSAYNKHRDKPIREQAENIIHLFTLTNLGAPAAFKYFDTTIDRKRYTSTKEVLDATLIHQSITGLYETRIDLSQLGGDGGGSSPAPGGGGGVQEISDSRPMLHIYLNGRRFLGLLDTGADKTCIAGRDWPANWPIHQTESSLQGLGMACGVARSSQPLRWQHEDKSGIIHPFVIPTLPFTLWGRDIMKDIKVRLMTDSPDDSQDLMIGAIESNLFADQISWKSDQPVWLNQWPLKQEKLQALQQLVTEQLQLGHLEESNSPWNTPVFVIKKKSGKWRLLQDLRAVNATMHDMGALQPGLPSPVAVPKGWEIIIIDLQDCFFNIKLHPEDCKRFAFSVPSPNFKRPYQRFQWKVLPQGMKNSPTLCQKFVDKAILTVRDKYQDSYIVHYMDDILLAHPSRSIVDEILTSMIQALNKHGLVVSTEKIQKYDNLKYLGTHIQGDSVSYQKLQIRTDKLRTLNDFQKLLGNINWIRPFLKLTTGELKPLFEILNGDSNPISTRKLTPEACKALQLMNERLSTARVKRLDLSQPWSLCILKTEYTPTACLWQDGVVEWIHLPHISPKVITPYDIFCTQLIIKGRHRSKELFSKDPDYIVVPYTKVQFDLLLQEKEDWPISLLGFLGEVHFHLPKDPLLTFTLQTAIIFPHMTSTTPLEKGIVIFTDGSANGRSVTYIQGREPIIKENTQNTAQQAEIVAVITAFEEVSQPFNLYTDSKYVTGLFPEIETATLSPRTKIYTELKHLQRLIHKRQEKFYIGHIRGHTGLPGPLAQGNAYADSLTRILTAAGKRTADGSEFEKRTADGSEFESPKKKAKVE

SEQ ID NO: 3265 - protein, 2116 aa, synthetic construct
MPAAKRVKLDGGDKKYSIGLDIGTNSVGWAVITDEYKVPSKKFKVLGNTDRHSIKKNLIGALLFDSGETAEATRLKRTARRRYTRRKNRICYLQEIFSNEMAKVDDSFFHRLEESFLVEEDKKHERHPIFGNIVDEVAYHEKYPTIYHLRKKLVDSTDKADLRLIYLALAHMIKFRGHFLIEGDLNPDNSDVDKLFIQLVQTYNQLFEENPINASGVDAKAILSARLSKSRRLENLIAQLPGEKKNGLFGNLIALSLGLTPNFKSNFDLAEDAKLQLSKDTYDDDLDNLLAQIGDQYADLFLAAKNLSDAILLSDILRVNTEITKAPLSASMIKRYDEHHQDLTLLKALVRQQLPEKYKEIFFDQSKNGYAGYIDGGASQEEFYKFIKPILEKMDGTEELLVKLNREDLLRKQRTFDNGSIPHQIHLGELHAILRRQEDFYPFLKDNREKIEKILTFRIPYYVGPLARGNSRFAWMTRKSEETITPWNFEEVVDKGASAQSFIERMTNFDKNLPNEKVLPKHSLLYEYFTVYNELTKVKYVTEGMRKPAFLSGEQKKAIVDLLFKTNRKVTVKQLKEDYFKKIECFDSVEISGVEDRFNASLGTYHDLLKIIKDKDFLDNEENEDILEDIVLTLTLFEDREMIEERLKTYAHLFDDKVMKQLKRRRYTGWGRLSRKLINGIRDKQSGKTILDFLKSDGFANRNFMQLIHDDSLTFKEDIQKAQVSGQGDSLHEHIANLAGSPAIKKGILQTVKVVDELVKVMGRHKPENIVIEMARENQTTQKGQKNSRERMKRIEEGIKELGSQILKEHPVENTQLQNEKLYLYYLQNGRDMYVDQELDINRLSDYDVDHIVPQSFLKDDSIDNKVLTRSDKARGKSDNVPSEEVVKKMKNYWRQLLNAKLITQRKFDNLTKAERGGLSELDKAGFIKRQLVETRQITKHVAQILDSRMNTKYDENDKLIREVKVITLKSKLVSDFRKDFQFYKVREINNYHHAHDAYLNAVVGTALIKKYPKLESEFVYGDYKVYDVRKMIAKSEQEIGKATAKYFFYSNIMNFFKTEITLANGEIRKRPLIETNGETGEIVWDKGRDFATVRKVLSMPQVNIVKKTEVQTGGFSKESILPKRNSDKLIARKKDWDPKKYGGFDSPTVAYSVLVVAKVEKGKSKKLKSVKELLGITIMERSSFEKNPIDFLEAKGYKEVKKDLIIKLPKYSLFELENGRKRMLASAGELQKGNELALPSKYVNFLYLASHYEKLKGSPEDNEQKQLFVEQHKHYLDEIIEQISEFSKRVILADANLDKVLSAYNKHRDKPIREQAENIIHLFTLTNLGAPAAFKYFDTTIDRKRYTSTKEVLDATLIHQSITGLYETRIDLSQLGGDGGGSSEAAAKPAPGGVQEISDSRPMLHIYLNGRRFLGLLDTGADKTCIAGRDWPANWPIHQTESSLQGLGMACGVARSSQPLRWQHEDKSGIIHPFVIPTLPFTLWGRDIMKDIKVRLMTDSPDDSQDLMIGAIESNLFADQISWKSDQPVWLNQWPLKQEKLQALQQLVTEQLQLGHLEESNSPWNTPVFVIKKKSGKWRLLQDLRAVNATMHDMGALQPGLPSPVAVPKGWEIIIIDLQDCFFNIKLHPEDCKRFAFSVPSPNFKRPYQRFQWKVLPQGMKNSPTLCQKFVDKAILTVRDKYQDSYIVHYMDDILLAHPSRSIVDEILTSMIQALNKHGLVVSTEKIQKYDNLKYLGTHIQGDSVSYQKLQIRTDKLRTLNDFQKLLGNINWIRPFLKLTTGELKPLFEILNGDSNPISTRKLTPEACKALQLMNERLSTARVKRLDLSQPWSLCILKTEYTPTACLWQDGVVEWIHLPHISPKVITPYDIFCTQLIIKGRHRSKELFSKDPDYIVVPYTKVQFDLLLQEKEDWPISLLGFLGEVHFHLPKDPLLTFTLQTAIIFPHMTSTTPLEKGIVIFTDGSANGRSVTYIQGREPIIKENTQNTAQQAEIVAVITAFEEVSQPFNLYTDSKYVTGLFPEIETATLSPRTKIYTELKHLQRLIHKRQEKFYIGHIRGHTGLPGPLAQGNAYADSLTRILTAAGKRTADGSEFEKRTADGSEFESPKKKAKVE

SEQ ID NO: 3266 - protein, 2120 aa, synthetic construct
MPAAKRVKLDGGDKKYSIGLDIGTNSVGWAVITDEYKVPSKKFKVLGNTDRHSIKKNLIGALLFDSGETAEATRLKRTARRRYTRRKNRICYLQEIFSNEMAKVDDSFFHRLEESFLVEEDKKHERHPIFGNIVDEVAYHEKYPTIYHLRKKLVDSTDKADLRLIYLALAHMIKFRGHFLIEGDLNPDNSDVDKLFIQLVQTYNQLFEENPINASGVDAKAILSARLSKSRRLENLIAQLPGEKKNGLFGNLIALSLGLTPNFKSNFDLAEDAKLQLSKDTYDDDLDNLLAQIGDQYADLFLAAKNLSDAILLSDILRVNTEITKAPLSASMIKRYDEHHQDLTLLKALVRQQLPEKYKEIFFDQSKNGYAGYIDGGASQEEFYKFIKPILEKMDGTEELLVKLNREDLLRKQRTFDNGSIPHQIHLGELHAILRRQEDFYPFLKDNREKIEKILTFRIPYYVGPLARGNSRFAWMTRKSEETITPWNFEEVVDKGASAQSFIERMTNFDKNLPNEKVLPKHSLLYEYFTVYNELTKVKYVTEGMRKPAFLSGEQKKAIVDLLFKTNRKVTVKQLKEDYFKKIECFDSVEISGVEDRFNASLGTYHDLLKIIKDKDFLDNEENEDILEDIVLTLTLFEDREMIEERLKTYAHLFDDKVMKQLKRRRYTGWGRLSRKLINGIRDKQSGKTILDFLKSDGFANRNFMQLIHDDSLTFKEDIQKAQVSGQGDSLHEHIANLAGSPAIKKGILQTVKVVDELVKVMGRHKPENIVIEMARENQTTQKGQKNSRERMKRIEEGIKELGSQILKEHPVENTQLQNEKLYLYYLQNGRDMYVDQELDINRLSDYDVDHIVPQSFLKDDSIDNKVLTRSDKARGKSDNVPSEEVVKKMKNYWRQLLNAKLITQRKFDNLTKAERGGLSELDKAGFIKRQLVETRQITKHVAQILDSRMNTKYDENDKLIREVKVITLKSKLVSDFRKDFQFYKVREINNYHHAHDAYLNAVVGTALIKKYPKLESEFVYGDYKVYDVRKMIAKSEQEIGKATAKYFFYSNIMNFFKTEITLANGEIRKRPLIETNGETGEIVWDKGRDFATVRKVLSMPQVNIVKKTEVQTGGFSKESILPKRNSDKLIARKKDWDPKKYGGFDSPTVAYSVLVVAKVEKGKSKKLKSVKELLGITIMERSSFEKNPIDFLEAKGYKEVKKDLIIKLPKYSLFELENGRKRMLASAGELQKGNELALPSKYVNFLYLASHYEKLKGSPEDNEQKQLFVEQHKHYLDEIIEQISEFSKRVILADANLDKVLSAYNKHRDKPIREQAENIIHLFTLTNLGAPAAFKYFDTTIDRKRYTSTKEVLDATLIHQSITGLYETRIDLSQLGGDGGGGSGGSGGSGGSGGSGGWVQEISDSRPMLHIYLNGRRFLGLLNTGADKTCIAGRDWPANWPIHQTESSLQGLGMACGVARSSQPLRWQHEDKSGIIHPFVIPTLPFTLWGRDIMKDIKVRLMTDSPDDSQDLMIGAIESNLFADQISWKSDQPVWLNQWPLKQEKLQALQQLVTEQLQLGHLEESNSPWNTPVFVIKKKSGKWRLLQDLRAVNATMHDMGALQPGLPSPVAVPKGWEIIIIDLQDCFFNIKLHPEDCKRFAFSVPSPNFKRPYQRFQWKVLPQGMKNSPTLCQKFVDKAILTVRDKYQDSYIVHYMDDILLAHPSRSIVDEILTSMIQALNKHGLVVSTEKIQKYDNLKYLGTHIQGDSVSYQKLQIRTDKLRTLNDFQKLLGNINWIRPFLKLTTGELKPLFEILNGDSNPISTRKLTPEACKALQLMNERLSTARVKRLDLSQPWSLCILKTEYTPTACLWQDGVVEWIHLPHISPKVITPYDIFCTQLIIKGRHRSKELFSKDPDYIVVPYTKVQFDLLLQEKEDWPISLLGFLGEVHFHLPKDPLLTFTLQTAIIFPHMTSTTPLEKGIVIFTDGSANGRSVTYIQGREPIIKENTQNTAQQAEIVAVITAFEEVSQPFNLYTDSKYVTGLFPEIETATLSPRTKIYTELKHLQRLIHKRQEKFYIGHIRGHTGLPGPLAQGNAYADSLTRILTAGKRTADGSEFEKRTADGSEFESPKKKAKVE

SEQ ID NO: 3267 - protein, 2151 aa, synthetic construct
MPAAKRVKLDGGDKKYSIGLDIGTNSVGWAVITDEYKVPSKKFKVLGNTDRHSIKKNLIGALLFDSGETAEATRLKRTARRRYTRRKNRICYLQEIFSNEMAKVDDSFFHRLEESFLVEEDKKHERHPIFGNIVDEVAYHEKYPTIYHLRKKLVDSTDKADLRLIYLALAHMIKFRGHFLIEGDLNPDNSDVDKLFIQLVQTYNQLFEENPINASGVDAKAILSARLSKSRRLENLIAQLPGEKKNGLFGNLIALSLGLTPNFKSNFDLAEDAKLQLSKDTYDDDLDNLLAQIGDQYADLFLAAKNLSDAILLSDILRVNTEITKAPLSASMIKRYDEHHQDLTLLKALVRQQLPEKYKEIFFDQSKNGYAGYIDGGASQEEFYKFIKPILEKMDGTEELLVKLNREDLLRKQRTFDNGSIPHQIHLGELHAILRRQEDFYPFLKDNREKIEKILTFRIPYYVGPLARGNSRFAWMTRKSEETITPWNFEEVVDKGASAQSFIERMTNFDKNLPNEKVLPKHSLLYEYFTVYNELTKVKYVTEGMRKPAFLSGEQKKAIVDLLFKTNRKVTVKQLKEDYFKKIECFDSVEISGVEDRFNASLGTYHDLLKIIKDKDFLDNEENEDILEDIVLTLTLFEDREMIEERLKTYAHLFDDKVMKQLKRRRYTGWGRLSRKLINGIRDKQSGKTILDFLKSDGFANRNFMQLIHDDSLTFKEDIQKAQVSGQGDSLHEHIANLAGSPAIKKGILQTVKVVDELVKVMGRHKPENIVIEMARENQTTQKGQKNSRERMKRIEEGIKELGSQILKEHPVENTQLQNEKLYLYYLQNGRDMYVDQELDINRLSDYDVDHIVPQSFLKDDSIDNKVLTRSDKARGKSDNVPSEEVVKKMKNYWRQLLNAKLITQRKFDNLTKAERGGLSELDKAGFIKRQLVETRQITKHVAQILDSRMNTKYDENDKLIREVKVITLKSKLVSDFRKDFQFYKVREINNYHHAHDAYLNAVVGTALIKKYPKLESEFVYGDYKVYDVRKMIAKSEQEIGKATAKYFFYSNIMNFFKTEITLANGEIRKRPLIETNGETGEIVWDKGRDFATVRKVLSMPQVNIVKKTEVQTGGFSKESILPKRNSDKLIARKKDWDPKKYGGFDSPTVAYSVLVVAKVEKGKSKKLKSVKELLGITIMERSSFEKNPIDFLEAKGYKEVKKDLIIKLPKYSLFELENGRKRMLASAGELQKGNELALPSKYVNFLYLASHYEKLKGSPEDNEQKQLFVEQHKHYLDEIIEQISEFSKRVILADANLDKVLSAYNKHRDKPIREQAENIIHLFTLTNLGAPAAFKYFDTTIDRKRYTSTKEVLDATLIHQSITGLYETRIDLSQLGGDGGAEAAAKEAAAKEAAAKEAAAKALEAEAAAKEAAAKEAAAKEAAAKAGGWVQEISDSRPMLHIYLNGRRFLGLLNTGADKTCIAGRDWPANWPIHQTESSLQGLGMACGVARSSQPLRWQHEDKSGIIHPFVIPTLPFTLWGRDIMKDIKVRLMTDSPDDSQDLMIGAIESNLFADQISWKSDQPVWLNQWPLKQEKLQALQQLVTEQLQLGHLEESNSPWNTPVFVIKKKSGKWRLLQDLRAVNATMHDMGALQPGLPSPVAVPKGWEIIIIDLQDCFFNIKLHPEDCKRFAFSVPSPNFKRPYQRFQWKVLPQGMKNSPTLCQKFVDKAILTVRDKYQDSYIVHYMDDILLAHPSRSIVDEILTSMIQALNKHGLVVSTEKIQKYDNLKYLGTHIQGDSVSYQKLQIRTDKLRTLNDFQKLLGNINWIRPFLKLTTGELKPLFEILNGDSNPISTRKLTPEACKALQLMNERLSTARVKRLDLSQPWSLCILKTEYTPTACLWQDGVVEWIHLPHISPKVITPYDIFCTQLIIKGRHRSKELFSKDPDYIVVPYTKVQFDLLLQEKEDWPISLLGFLGEVHFHLPKDPLLTFTLQTAIIFPHMTSTTPLEKGIVIFTDGSANGRSVTYIQGREPIIKENTQNTAQQAEIVAVITAFEEVSQPFNLYTDSKYVTGLFPEIETATLSPRTKIYTELKHLQRLIHKRQEKFYIGHIRGHTGLPGPLAQGNAYADSLTRILTAGKRTADGSEFEKRTADGSEFESPKKKAKVE

SEQ ID NO: 3268 - protein, 2135 aa, synthetic construct; identical to SEQ ID NO: 3172

SEQ ID NO: 3269 - protein, 2114 aa, synthetic construct
MPAAKRVKLDGGDKKYSIGLDIGTNSVGWAVITDEYKVPSKKFKVLGNTDRHSIKKNLIGALLFDSGETAEATRLKRTARRRYTRRKNRICYLQEIFSNEMAKVDDSFFHRLEESFLVEEDKKHERHPIFGNIVDEVAYHEKYPTIYHLRKKLVDSTDKADLRLIYLALAHMIKFRGHFLIEGDLNPDNSDVDKLFIQLVQTYNQLFEENPINASGVDAKAILSARLSKSRRLENLIAQLPGEKKNGLFGNLIALSLGLTPNFKSNFDLAEDAKLQLSKDTYDDDLDNLLAQIGDQYADLFLAAKNLSDAILLSDILRVNTEITKAPLSASMIKRYDEHHQDLTLLKALVRQQLPEKYKEIFFDQSKNGYAGYIDGGASQEEFYKFIKPILEKMDGTEELLVKLNREDLLRKQRTFDNGSIPHQIHLGELHAILRRQEDFYPFLKDNREKIEKILTFRIPYYVGPLARGNSRFAWMTRKSEETITPWNFEEVVDKGASAQSFIERMTNFDKNLPNEKVLPKHSLLYEYFTVYNELTKVKYVTEGMRKPAFLSGEQKKAIVDLLFKTNRKVTVKQLKEDYFKKIECFDSVEISGVEDRFNASLGTYHDLLKIIKDKDFLDNEENEDILEDIVLTLTLFEDREMIEERLKTYAHLFDDKVMKQLKRRRYTGWGRLSRKLINGIRDKQSGKTILDFLKSDGFANRNFMQLIHDDSLTFKEDIQKAQVSGQGDSLHEHIANLAGSPAIKKGILQTVKVVDELVKVMGRHKPENIVIEMARENQTTQKGQKNSRERMKRIEEGIKELGSQILKEHPVENTQLQNEKLYLYYLQNGRDMYVDQELDINRLSDYDVDHIVPQSFLKDDSIDNKVLTRSDKARGKSDNVPSEEVVKKMKNYWRQLLNAKLITQRKFDNLTKAERGGLSELDKAGFIKRQLVETRQITKHVAQILDSRMNTKYDENDKLIREVKVITLKSKLVSDFRKDFQFYKVREINNYHHAHDAYLNAVVGTALIKKYPKLESEFVYGDYKVYDVRKMIAKSEQEIGKATAKYFFYSNIMNFFKTEITLANGEIRKRPLIETNGETGEIVWDKGRDFATVRKVLSMPQVNIVKKTEVQTGGFSKESILPKRNSDKLIARKKDWDPKKYGGFDSPTVAYSVLVVAKVEKGKSKKLKSVKELLGITIMERSSFEKNPIDFLEAKGYKEVKKDLIIKLPKYSLFELENGRKRMLASAGELQKGNELALPSKYVNFLYLASHYEKLKGSPEDNEQKQLFVEQHKHYLDEIIEQISEFSKRVILADANLDKVLSAYNKHRDKPIREQAENIIHLFTLTNLGAPAAFKYFDTTIDRKRYTSTKEVLDATLIHQSITGLYETRIDLSQLGGDGGGGSGGGGSSGGWVQEISDSRPMLHIYLNGRRFLGLLNTGADKTCIAGRDWPANWPIHQTESSLQGLGMACGVARSSQPLRWQHEDKSGIIHPFVIPTLPFTLWGRDIMKDIKVRLMTDSPDDSQDLMIGAIESNLFADQISWKSDQPVWLNQWPLKQEKLQALQQLVTEQLQLGHLEESNSPWNTPVFVIKKKSGKWRLLQDLRAVNATMHDMGALQPGLPSPVAVPKGWEIIIIDLQDCFFNIKLHPEDCKRFAFSVPSPNFKRPYQRFQWKVLPQGMKNSPTLCQKFVDKAILTVRDKYQDSYIVHYMDDILLAHPSRSIVDEILTSMIQALNKHGLVVSTEKIQKYDNLKYLGTHIQGDSVSYQKLQIRTDKLRTLNDFQKLLGNINWIRPFLKLTTGELKPLFEILNGDSNPISTRKLTPEACKALQLMNERLSTARVKRLDLSQPWSLCILKTEYTPTACLWQDGVVEWIHLPHISPKVITPYDIFCTQLIIKGRHRSKELFSKDPDYIVVPYTKVQFDLLLQEKEDWPISLLGFLGEVHFHLPKDPLLTFTLQTAIIFPHMTSTTPLEKGIVIFTDGSANGRSVTYIQGREPIIKENTQNTAQQAEIVAVITAFEEVSQPFNLYTDSKYVTGLFPEIETATLSPRTKIYTELKHLQRLIHKRQEKFYIGHIRGHTGLPGPLAQGNAYADSLTRILTAGKRTADGSEFEKRTADGSEFESPKKKAKVE

SEQ ID NO: 3270 - protein, 2116 aa, synthetic construct; identical to SEQ ID NO: 3181

SEQ ID NO: 3271 - protein, 2116 aa, synthetic construct
MPAAKRVKLDGGDKKYSIGLDIGTNSVGWAVITDEYKVPSKKFKVLGNTDRHSIKKNLIGALLFDSGETAEATRLKRTARRRYTRRKNRICYLQEIFSNEMAKVDDSFFHRLEESFLVEEDKKHERHPIFGNIVDEVAYHEKYPTIYHLRKKLVDSTDKADLRLIYLALAHMIKFRGHFLIEGDLNPDNSDVDKLFIQLVQTYNQLFEENPINASGVDAKAILSARLSKSRRLENLIAQLPGEKKNGLFGNLIALSLGLTPNFKSNFDLAEDAKLQLSKDTYDDDLDNLLAQIGDQYADLFLAAKNLSDAILLSDILRVNTEITKAPLSASMIKRYDEHHQDLTLLKALVRQQLPEKYKEIFFDQSKNGYAGYIDGGASQEEFYKFIKPILEKMDGTEELLVKLNREDLLRKQRTFDNGSIPHQIHLGELHAILRRQEDFYPFLKDNREKIEKILTFRIPYYVGPLARGNSRFAWMTRKSEETITPWNFEEVVDKGASAQSFIERMTNFDKNLPNEKVLPKHSLLYEYFTVYNELTKVKYVTEGMRKPAFLSGEQKKAIVDLLFKTNRKVTVKQLKEDYFKKIECFDSVEISGVEDRFNASLGTYHDLLKIIKDKDFLDNEENEDILEDIVLTLTLFEDREMIEERLKTYAHLFDDKVMKQLKRRRYTGWGRLSRKLINGIRDKQSGKTILDFLKSDGFANRNFMQLIHDDSLTFKEDIQKAQVSGQGDSLHEHIANLAGSPAIKKGILQTVKVVDELVKVMGRHKPENIVIEMARENQTTQKGQKNSRERMKRIEEGIKELGSQILKEHPVENTQLQNEKLYLYYLQNGRDMYVDQELDINRLSDYDVDHIVPQSFLKDDSIDNKVLTRSDKARGKSDNVPSEEVVKKMKNYWRQLLNAKLITQRKFDNLTKAERGGLSELDKAGFIKRQLVETRQITKHVAQILDSRMNTKYDENDKLIREVKVITLKSKLVSDFRKDFQFYKVREINNYHHAHDAYLNAVVGTALIKKYPKLESEFVYGDYKVYDVRKMIAKSEQEIGKATAKYFFYSNIMNFFKTEITLANGEIRKRPLIETNGETGEIVWDKGRDFATVRKVLSMPQVNIVKKTEVQTGGFSKESILPKRNSDKLIARKKDWDPKKYGGFDSPTVAYSVLVVAKVEKGKSKKLKSVKELLGITIMERSSFEKNPIDFLEAKGYKEVKKDLIIKLPKYSLFELENGRKRMLASAGELQKGNELALPSKYVNFLYLASHYEKLKGSPEDNEQKQLFVEQHKHYLDEIIEQISEFSKRVILADANLDKVLSAYNKHRDKPIREQAENIIHLFTLTNLGAPAAFKYFDTTIDRKRYTSTKEVLDATLIHQSITGLYETRIDLSQLGGDGGEAAAKGSSGGGGGWVQEISDSRPMLHIYLNGRRFLGLLNTGADKTCIAGRDWPANWPIHQTESSLQGLGMACGVARSSQPLRWQHEDKSGIIHPFVIPTLPFTLWGRDIMKDIKVRLMTDSPDDSQDLMIGAIESNLFADQISWKSDQPVWLNQWPLKQEKLQALQQLVTEQLQLGHLEESNSPWNTPVFVIKKKSGKWRLLQDLRAVNATMHDMGALQPGLPSPVAVPKGWEIIIIDLQDCFFNIKLHPEDCKRFAFSVPSPNFKRPYQRFQWKVLPQGMKNSPTLCQKFVDKAILTVRDKYQDSYIVHYMDDILLAHPSRSIVDEILTSMIQALNKHGLVVSTEKIQKYDNLKYLGTHIQGDSVSYQKLQIRTDKLRTLNDFQKLLGNINWIRPFLKLTTGELKPLFEILNGDSNPISTRKLTPEACKALQLMNERLSTARVKRLDLSQPWSLCILKTEYTPTACLWQDGVVEWIHLPHISPKVITPYDIFCTQLIIKGRHRSKELFSKDPDYIVVPYTKVQFDLLLQEKEDWPISLLGFLGEVHFHLPKDPLLTFTLQTAIIFPHMTSTTPLEKGIVIFTDGSANGRSVTYIQGREPIIKENTQNTAQQAEIVAVITAFEEVSQPFNLYTDSKYVTGLFPEIETATLSPRTKIYTELKHLQRLIHKRQEKFYIGHIRGHTGLPGPLAQGNAYADSLTRILTAGKRTADGSEFEKRTADGSEFESPKKKAKVE

SEQ ID NO: 3272 - protein, 2114 aa, synthetic construct
MPAAKRVKLDGGDKKYSIGLDIGTNSVGWAVITDEYKVPSKKFKVLGNTDRHSIKKNLIGALLFDSGETAEATRLKRTARRRYTRRKNRICYLQEIFSNEMAKVDDSFFHRLEESFLVEEDKKHERHPIFGNIVDEVAYHEKYPTIYHLRKKLVDSTDKADLRLIYLALAHMIKFRGHFLIEGDLNPDNSDVDKLFIQLVQTYNQLFEENPINASGVDAKAILSARLSKSRRLENLIAQLPGEKKNGLFGNLIALSLGLTPNFKSNFDLAEDAKLQLSKDTYDDDLDNLLAQIGDQYADLFLAAKNLSDAILLSDILRVNTEITKAPLSASMIKRYDEHHQDLTLLKALVRQQLPEKYKEIFFDQSKNGYAGYIDGGASQEEFYKFIKPILEKMDGTEELLVKLNREDLLRKQRTFDNGSIPHQIHLGELHAILRRQEDFYPFLKDNREKIEKILTFRIPYYVGPLARGNSRFAWMTRKSEETITPWNFEEVVDKGASAQSFIERMTNFDKNLPNEKVLPKHSLLYEYFTVYNELTKVKYVTEGMRKPAFLSGEQKKAIVDLLFKTNRKVTVKQLKEDYFKKIECFDSVEISGVEDRFNASLGTYHDLLKIIKDKDFLDNEENEDILEDIVLTLTLFEDREMIEERLKTYAHLFDDKVMKQLKRRRYTGWGRLSRKLINGIRDKQSGKTILDFLKSDGFANRNFMQLIHDDSLTFKEDIQKAQVSGQGDSLHEHIANLAGSPAIKKGILQTVKVVDELVKVMGRHKPENIVIEMARENQTTQKGQKNSRERMKRIEEGIKELGSQILKEHPVENTQLQNEKLYLYYLQNGRDMYVDQELDINRLSDYDVDHIVPQSFLKDDSIDNKVLTRSDKARGKSDNVPSEEVVKKMKNYWRQLLNAKLITQRKFDNLTKAERGGLSELDKAGFIKRQLVETRQITKHVAQILDSRMNTKYDENDKLIREVKVITLKSKLVSDFRKDFQFYKVREINNYHHAHDAYLNAVVGTALIKKYPKLESEFVYGDYKVYDVRKMIAKSEQEIGKATAKYFFYSNIMNFFKTEITLANGEIRKRPLIETNGETGEIVWDKGRDFATVRKVLSMPQVNIVKKTEVQTGGFSKESILPKRNSDKLIARKKDWDPKKYGGFDSPTVAYSVLVVAKVEKGKSKKLKSVKELLGITIMERSSFEKNPIDFLEAKGYKEVKKDLIIKLPKYSLFELENGRKRMLASAGELQKGNELALPSKYVNFLYLASHYEKLKGSPEDNEQKQLFVEQHKHYLDEIIEQISEFSKRVILADANLDKVLSAYNKHRDKPIREQAENIIHLFTLTNLGAPAAFKYFDTTIDRKRYTSTKEVLDATLIHQSITGLYETRIDLSQLGGDGGGGGGGSGSSGGWVQEISDSRPMLHIYLNGRRFLGLLNTGADKTCIAGRDWPANWPIHQTESSLQGLGMACGVARSSQPLRWQHEDKSGIIHPFVIPTLPFTLWGRDIMKDIKVRLMTDSPDDSQDLMIGAIESNLFADQISWKSDQPVWLNQWPLKQEKLQALQQLVTEQLQLGHLEESNSPWNTPVFVIKKKSGKWRLLQDLRAVNATMHDMGALQPGLPSPVAVPKGWEIIIIDLQDCFFNIKLHPEDCKRFAFSVPSPNFKRPYQRFQWKVLPQGMKNSPTLCQKFVDKAILTVRDKYQDSYIVHYMDDILLAHPSRSIVDEILTSMIQALNKHGLVVSTEKIQKYDNLKYLGTHIQGDSVSYQKLQIRTDKLRTLNDFQKLLGNINWIRPFLKLTTGELKPLFEILNGDSNPISTRKLTPEACKALQLMNERLSTARVKRLDLSQPWSLCILKTEYTPTACLWQDGVVEWIHLPHISPKVITPYDIFCTQLIIKGRHRSKELFSKDPDYIVVPYTKVQFDLLLQEKEDWPISLLGFLGEVHFHLPKDPLLTFTLQTAIIFPHMTSTTPLEKGIVIFTDGSANGRSVTYIQGREPIIKENTQNTAQQAEIVAVITAFEEVSQPFNLYTDSKYVTGLFPEIETATLSPRTKIYTELKHLQRLIHKRQEKFYIGHIRGHTGLPGPLAQGNAYADSLTRILTAGKRTADGSEFEKRTADGSEFESPKKKAKVE

SEQ ID NO: 3273 - protein, 2116 aa, synthetic construct
MPAAKRVKLDGGDKKYSIGLDIGTNSVGWAVITDEYKVPSKKFKVLGNTDRHSIKKNLIGALLFDSGETAEATRLKRTARRRYTRRKNRICYLQEIFSNEMAKVDDSFFHRLEESFLVEEDKKHERHPIFGNIVDEVAYHEKYPTIYHLRKKLVDSTDKADLRLIYLALAHMIKFRGHFLIEGDLNPDNSDVDKLFIQLVQTYNQLFEENPINASGVDAKAILSARLSKSRRLENLIAQLPGEKKNGLFGNLIALSLGLTPNFKSNFDLAEDAKLQLSKDTYDDDLDNLLAQIGDQYADLFLAAKNLSDAILLSDILRVNTEITKAPLSASMIKRYDEHHQDLTLLKALVRQQLPEKYKEIFFDQSKNGYAGYIDGGASQEEFYKFIKPILEKMDGTEELLVKLNREDLLRKQRTFDNGSIPHQIHLGELHAILRRQEDFYPFLKDNREKIEKILTFRIPYYVGPLARGNSRFAWMTRKSEETITPWNFEEVVDKGASAQSFIERMTNFDKNLPNEKVLPKHSLLYEYFTVYNELTKVKYVTEGMRKPAFLSGEQKKAIVDLLFKTNRKVTVKQLKEDYFKKIECFDSVEISGVEDRFNASLGTYHDLLKIIKDKDFLDNEENEDILEDIVLTLTLFEDREMIEERLKTYAHLFDDKVMKQLKRRRYTGWGRLSRKLINGIRDKQSGKTILDFLKSDGFANRNFMQLIHDDSLTFKEDIQKAQVSGQGDSLHEHIANLAGSPAIKKGILQTVKVVDELVKVMGRHKPENIVIEMARENQTTQKGQKNSRERMKRIEEGIKELGSQILKEHPVENTQLQNEKLYLYYLQNGRDMYVDQELDINRLSDYDVDHIVPQSFLKDDSIDNKVLTRSDKARGKSDNVPSEEVVKKMKNYWRQLLNAKLITQRKFDNLTKAERGGLSELDKAGFIKRQLVETRQITKHVAQILDSRMNTKYDENDKLIREVKVITLKSKLVSDFRKDFQFYKVREINNYHHAHDAYLNAVVGTALIKKYPKLESEFVYGDYKVYDVRKMIAKSEQEIGKATAKYFFYSNIMNFFKTEITLANGEIRKRPLIETNGETGEIVWDKGRDFATVRKVLSMPQVNIVKKTEVQTGGFSKESILPKRNSDKLIARKKDWDPKKYGGFDSPTVAYSVLVVAKVEKGKSKKLKSVKELLGITIMERSSFEKNPIDFLEAKGYKEVKKDLIIKLPKYSLFELENGRKRMLASAGELQKGNELALPSKYVNFLYLASHYEKLKGSPEDNEQKQLFVEQHKHYLDEIIEQISEFSKRVILADANLDKVLSAYNKHRDKPIREQAENIIHLFTLTNLGAPAAFKYFDTTIDRKRYTSTKEVLDATLIHQSITGLYETRIDLSQLGGDGGEAAAKGGGPAPGGWVQEISDSRPMLHIYLNGRRFLGLLNTGADKTCIAGRDWPANWPIHQTESSLQGLGMACGVARSSQPLRWQHEDKSGIIHPFVIPTLPFTLWGRDIMKDIKVRLMTDSPDDSQDLMIGAIESNLFADQISWKSDQPVWLNQWPLKQEKLQALQQLVTEQLQLGHLEESNSPWNTPVFVIKKKSGKWRLLQDLRAVNATMHDMGALQPGLPSPVAVPKGWEIIIIDLQDCFFNIKLHPEDCKRFAFSVPSPNFKRPYQRFQWKVLPQGMKNSPTLCQKFVDKAILTVRDKYQDSYIVHYMDDILLAHPSRSIVDEILTSMIQALNKHGLVVSTEKIQKYDNLKYLGTHIQGDSVSYQKLQIRTDKLRTLNDFQKLLGNINWIRPFLKLTTGELKPLFEILNGDSNPISTRKLTPEACKALQLMNERLSTARVKRLDLSQPWSLCILKTEYTPTACLWQDGVVEWIHLPHISPKVITPYDIFCTQLIIKGRHRSKELFSKDPDYIVVPYTKVQFDLLLQEKEDWPISLLGFLGEVHFHLPKDPLLTFTLQTAIIFPHMTSTTPLEKGIVIFTDGSANGRSVTYIQGREPIIKENTQNTAQQAEIVAVITAFEEVSQPFNLYTDSKYVTGLFPEIETATLSPRTKIYTELKHLQRLIHKRQEKFYIGHIRGHTGLPGPLAQGNAYADSLTRILTAGKRTADGSEFEKRTADGSEFESPKKKAKVE

SEQ ID NO: 3274 - protein, 2116 aa, synthetic construct
MPAAKRVKLDGGDKKYSIGLDIGTNSVGWAVITDEYKVPSKKFKVLGNTDRHSIKKNLIGALLFDSGETAEATRLKRTARRRYTRRKNRICYLQEIFSNEMAKVDDSFFHRLEESFLVEEDKKHERHPIFGNIVDEVAYHEKYPTIYHLRKKLVDSTDKADLRLIYLALAHMIKFRGHFLIEGDLNPDNSDVDKLFIQLVQTYNQLFEENPINASGVDAKAILSARLSKSRRLENLIAQLPGEKKNGLFGNLIALSLGLTPNFKSNFDLAEDAKLQLSKDTYDDDLDNLLAQIGDQYADLFLAAKNLSDAILLSDILRVNTEITKAPLSASMIKRYDEHHQDLTLLKALVRQQLPEKYKEIFFDQSKNGYAGYIDGGASQEEFYKFIKPILEKMDGTEELLVKLNREDLLRKQRTFDNGSIPHQIHLGELHAILRRQEDFYPFLKDNREKIEKILTFRIPYYVGPLARGNSRFAWMTRKSEETITPWNFEEVVDKGASAQSFIERMTNFDKNLPNEKVLPKHSLLYEYFTVYNELTKVKYVTEGMRKPAFLSGEQKKAIVDLLFKTNRKVTVKQLKEDYFKKIECFDSVEISGVEDRFNASLGTYHDLLKIIKDKDFLDNEENEDILEDIVLTLTLFEDREMIEERLKTYAHLFDDKVMKQLKRRRYTGWGRLSRKLINGIRDKQSGKTILDFLKSDGFANRNFMQLIHDDSLTFKEDIQKAQVSGQGDSLHEHIANLAGSPAIKKGILQTVKVVDELVKVMGRHKPENIVIEMARENQTTQKGQKNSRERMKRIEEGIKELGSQILKEHPVENTQLQNEKLYLYYLQNGRDMYVDQELDINRLSDYDVDHIVPQSFLKDDSIDNKVLTRSDKARGKSDNVPSEEVVKKMKNYWRQLLNAKLITQRKFDNLTKAERGGLSELDKAGFIKRQLVETRQITKHVAQILDSRMNTKYDENDKLIREVKVITLKSKLVSDFRKDFQFYKVREINNYHHAHDAYLNAVVGTALIKKYPKLESEFVYGDYKVYDVRKMIAKSEQEIGKATAKYFFYSNIMNFFKTEITLANGEIRKRPLIETNGETGEIVWDKGRDFATVRKVLSMPQVNIVKKTEVQTGGFSKESILPKRNSDKLIARKKDWDPKKYGGFDSPTVAYSVLVVAKVEKGKSKKLKSVKELLGITIMERSSFEKNPIDFLEAKGYKEVKKDLIIKLPKYSLFELENGRKRMLASAGELQKGNELALPSKYVNFLYLASHYEKLKGSPEDNEQKQLFVEQHKHYLDEIIEQISEFSKRVILADANLDKVLSAYNKHRDKPIREQAENIIHLFTLTNLGAPAAFKYFDTTIDRKRYTSTKEVLDATLIHQSITGLYETRIDLSQLGGDGGPAPEAAAKGGGGGWVQEISDSRPMLHIYLNGRRFLGLLNTGADKTCIAGRDWPANWPIHQTESSLQGLGMACGVARSSQPLRWQHEDKSGIIHPFVIPTLPFTLWGRDIMKDIKVRLMTDSPDDSQDLMIGAIESNLFADQISWKSDQPVWLNQWPLKQEKLQALQQLVTEQLQLGHLEESNSPWNTPVFVIKKKSGKWRLLQDLRAVNATMHDMGALQPGLPSPVAVPKGWEIIIIDLQDCFFNIKLHPEDCKRFAFSVPSPNFKRPYQRFQWKVLPQGMKNSPTLCQKFVDKAILTVRDKYQDSYIVHYMDDILLAHPSRSIVDEILTSMIQALNKHGLVVSTEKIQKYDNLKYLGTHIQGDSVSYQKLQIRTDKLRTLNDFQKLLGNINWIRPFLKLTTGELKPLFEILNGDSNPISTRKLTPEACKALQLMNERLSTARVKRLDLSQPWSLCILKTEYTPTACLWQDGVVEWIHLPHISPKVITPYDIFCTQLIIKGRHRSKELFSKDPDYIVVPYTKVQFDLLLQEKEDWPISLLGFLGEVHFHLPKDPLLTFTLQTAIIFPHMTSTTPLEKGIVIFTDGSANGRSVTYIQGREPIIKENTQNTAQQAEIVAVITAFEEVSQPFNLYTDSKYVTGLFPEIETATLSPRTKIYTELKHLQRLIHKRQEKFYIGHIRGHTGLPGPLAQGNAYADSLTRILTAGKRTADGSEFEKRTADGSEFESPKKKAKVE

SEQ ID NO: 3275 - protein, 2114 aa, synthetic construct
MPAAKRVKLDGGDKKYSIGLDIGTNSVGWAVITDEYKVPSKKFKVLGNTDRHSIKKNLIGALLFDSGETAEATRLKRTARRRYTRRKNRICYLQEIFSNEMAKVDDSFFHRLEESFLVEEDKKHERHPIFGNIVDEVAYHEKYPTIYHLRKKLVDSTDKADLRLIYLALAHMIKFRGHFLIEGDLNPDNSDVDKLFIQLVQTYNQLFEENPINASGVDAKAILSARLSKSRRLENLIAQLPGEKKNGLFGNLIALSLGLTPNFKSNFDLAEDAKLQLSKDTYDDDLDNLLAQIGDQYADLFLAAKNLSDAILLSDILRVNTEITKAPLSASMIKRYDEHHQDLTLLKALVRQQLPEKYKEIFFDQSKNGYAGYIDGGASQEEFYKFIKPILEKMDGTEELLVKLNREDLLRKQRTFDNGSIPHQIHLGELHAILRRQEDFYPFLKDNREKIEKILTFRIPYYVGPLARGNSRFAWMTRKSEETITPWNFEEVVDKGASAQSFIERMTNFDKNLPNEKVLPKHSLLYEYFTVYNELTKVKYVTEGMRKPAFLSGEQKKAIVDLLFKTNRKVTVKQLKEDYFKKIECFDSVEISGVEDRFNASLGTYHDLLKIIKDKDFLDNEENEDILEDIVLTLTLFEDREMIEERLKTYAHLFDDKVMKQLKRRRYTGWGRLSRKLINGIRDKQSGKTILDFLKSDGFANRNFMQLIHDDSLTFKEDIQKAQVSGQGDSLHEHIANLAGSPAIKKGILQTVKVVDELVKVMGRHKPENIVIEMARENQTTQKGQKNSRERMKRIEEGIKELGSQILKEHPVENTQLQNEKLYLYYLQNGRDMYVDQELDINRLSDYDVDHIVPQSFLKDDSIDNKVLTRSDKARGKSDNVPSEEVVKKMKNYWRQLLNAKLITQRKFDNLTKAERGGLSELDKAGFIKRQLVETRQITKHVAQILDSRMNTKYDENDKLIREVKVITLKSKLVSDFRKDFQFYKVREINNYHHAHDAYLNAVVGTALIKKYPKLESEFVYGDYKVYDVRKMIAKSEQEIGKATAKYFFYSNIMNFFKTEITLANGEIRKRPLIETNGETGEIVWDKGRDFATVRKVLSMPQVNIVKKTEVQTGGFSKESILPKRNSDKLIARKKDWDPKKYGGFDSPTVAYSVLVVAKVEKGKSKKLKSVKELLGITIMERSSFEKNPIDFLEAKGYKEVKKDLIIKLPKYSLFELENGRKRMLASAGELQKGNELALPSKYVNFLYLASHYEKLKGSPEDNEQKQLFVEQHKHYLDEIIEQISEFSKRVILADANLDKVLSAYNKHRDKPIREQAENIIHLFTLTNLGAPAAFKYFDTTIDRKRYTSTKEVLDATLIHQSITGLYETRIDLSQLGGDGGGGGPAPGGSGGWVQEISDSRPMLHIYLNGRRFLGLLNTGADKTCIAGRDWPANWPIHQTESSLQGLGMACGVARSSQPLRWQHEDKSGIIHPFVIPTLPFTLWGRDIMKDIKVRLMTDSPDDSQDLMIGAIESNLFADQISWKSDQPVWLNQWPLKQEKLQALQQLVTEQLQLGHLEESNSPWNTPVFVIKKKSGKWRLLQDLRAVNATMHDMGALQPGLPSPVAVPKGWEIIIIDLQDCFFNIKLHPEDCKRFAFSVPSPNFKRPYQRFQWKVLPQGMKNSPTLCQKFVDKAILTVRDKYQDSYIVHYMDDILLAHPSRSIVDEILTSMIQALNKHGLVVSTEKIQKYDNLKYLGTHIQGDSVSYQKLQIRTDKLRTLNDFQKLLGNINWIRPFLKLTTGELKPLFEILNGDSNPISTRKLTPEACKALQLMNERLSTARVKRLDLSQPWSLCILKTEYTPTACLWQDGVVEWIHLPHISPKVITPYDIFCTQLIIKGRHRSKELFSKDPDYIVVPYTKVQFDLLLQEKEDWPISLLGFLGEVHFHLPKDPLLTFTLQTAIIFPHMTSTTPLEKGIVIFTDGSANGRSVTYIQGREPIIKENTQNTAQQAEIVAVITAFEEVSQPFNLYTDSKYVTGLFPEIETATLSPRTKIYTELKHLQRLIHKRQEKFYIGHIRGHTGLPGPLAQGNAYADSLTRILTAGKRTADGSEFEKRTADGSEFESPKKKAKVE

SEQ ID NO: 3276 - protein, 2114 aa, synthetic construct
MPAAKRVKLDGGDKKYSIGLDIGTNSVGWAVITDEYKVPSKKFKVLGNTDRHSIKKNLIGALLFDSGETAEATRLKRTARRRYTRRKNRICYLQEIFSNEMAKVDDSFFHRLEESFLVEEDKKHERHPIFGNIVDEVAYHEKYPTIYHLRKKLVDSTDKADLRLIYLALAHMIKFRGHFLIEGDLNPDNSDVDKLFIQLVQTYNQLFEENPINASGVDAKAILSARLSKSRRLENLIAQLPGEKKNGLFGNLIALSLGLTPNFKSNFDLAEDAKLQLSKDTYDDDLDNLLAQIGDQYADLFLAAKNLSDAILLSDILRVNTEITKAPLSASMIKRYDEHHQDLTLLKALVRQQLPEKYKEIFFDQSKNGYAGYIDGGASQEEFYKFIKPILEKMDGTEELLVKLNREDLLRKQRTFDNGSIPHQIHLGELHAILRRQEDFYPFLKDNREKIEKILTFRIPYYVGPLARGNSRFAWMTRKSEETITPWNFEEVVDKGASAQSFIERMTNFDKNLPNEKVLPKHSLLYEYFTVYNELTKVKYVTEGMRKPAFLSGEQKKAIVDLLFKTNRKVTVKQLKEDYFKKIECFDSVEISGVEDRFNASLGTYHDLLKIIKDKDFLDNEENEDILEDIVLTLTLFEDREMIEERLKTYAHLFDDKVMKQLKRRRYTGWGRLSRKLINGIRDKQSGKTILDFLKSDGFANRNFMQLIHDDSLTFKEDIQKAQVSGQGDSLHEHIANLAGSPAIKKGILQTVKVVDELVKVMGRHKPENIVIEMARENQTTQKGQKNSRERMKRIEEGIKELGSQILKEHPVENTQLQNEKLYLYYLQNGRDMYVDQELDINRLSDYDVDHIVPQSFLKDDSIDNKVLTRSDKARGKSDNVPSEEVVKKMKNYWRQLLNAKLITQRKFDNLTKAERGGLSELDKAGFIKRQLVETRQITKHVAQILDSRMNTKYDENDKLIREVKVITLKSKLVSDFRKDFQFYKVREINNYHHAHDAYLNAVVGTALIKKYPKLESEFVYGDYKVYDVRKMIAKSEQEIGKATAKYFFYSNIMNFFKTEITLANGEIRKRPLIETNGETGEIVWDKGRDFATVRKVLSMPQVNIVKKTEVQTGGFSKESILPKRNSDKLIARKKDWDPKKYGGFDSPTVAYSVLVVAKVEKGKSKKLKSVKELLGITIMERSSFEKNPIDFLEAKGYKEVKKDLIIKLPKYSLFELENGRKRMLASAGELQKGNELALPSKYVNFLYLASHYEKLKGSPEDNEQKQLFVEQHKHYLDEIIEQISEFSKRVILADANLDKVLSAYNKHRDKPIREQAENIIHLFTLTNLGAPAAFKYFDTTIDRKRYTSTKEVLDATLIHQSITGLYETRIDLSQLGGDGGGGSGGGPAPGGWVQEISDSRPMLHIYLNGRRFLGLLNTGADKTCIAGRDWPANWPIHQTESSLQGLGMACGVARSSQPLRWQHEDKSGIIHPFVIPTLPFTLWGRDIMKDIKVRLMTDSPDDSQDLMIGAIESNLFADQISWKSDQPVWLNQWPLKQEKLQALQQLVTEQLQLGHLEESNSPWNTPVFVIKKKSGKWRLLQDLRAVNATMHDMGALQPGLPSPVAVPKGWEIIIIDLQDCFFNIKLHPEDCKRFAFSVPSPNFKRPYQRFQWKVLPQGMKNSPTLCQKFVDKAILTVRDKYQDSYIVHYMDDILLAHPSRSIVDEILTSMIQALNKHGLVVSTEKIQKYDNLKYLGTHIQGDSVSYQKLQIRTDKLRTLNDFQKLLGNINWIRPFLKLTTGELKPLFEILNGDSNPISTRKLTPEACKALQLMNERLSTARVKRLDLSQPWSLCILKTEYTPTACLWQDGVVEWIHLPHISPKVITPYDIFCTQLIIKGRHRSKELFSKDPDYIVVPYTKVQFDLLLQEKEDWPISLLGFLGEVHFHLPKDPLLTFTLQTAIIFPHMTSTTPLEKGIVIFTDGSANGRSVTYIQGREPIIKENTQNTAQQAEIVAVITAFEEVSQPFNLYTDSKYVTGLFPEIETATLSPRTKIYTELKHLQRLIHKRQEKFYIGHIRGHTGLPGPLAQGNAYADSLTRILTAGKRTADGSEFEKRTADGSEFESPKKKAKVE

SEQ ID NO: 3277 - protein, 2135 aa, synthetic construct; identical to SEQ ID NO: 3173

SEQ ID NO: 3278 - protein, 2110 aa, synthetic construct
MPAAKRVKLDGGDKKYSIGLDIGTNSVGWAVITDEYKVPSKKFKVLGNTDRHSIKKNLIGALLFDSGETAEATRLKRTARRRYTRRKNRICYLQEIFSNEMAKVDDSFFHRLEESFLVEEDKKHERHPIFGNIVDEVAYHEKYPTIYHLRKKLVDSTDKADLRLIYLALAHMIKFRGHFLIEGDLNPDNSDVDKLFIQLVQTYNQLFEENPINASGVDAKAILSARLSKSRRLENLIAQLPGEKKNGLFGNLIALSLGLTPNFKSNFDLAEDAKLQLSKDTYDDDLDNLLAQIGDQYADLFLAAKNLSDAILLSDILRVNTEITKAPLSASMIKRYDEHHQDLTLLKALVRQQLPEKYKEIFFDQSKNGYAGYIDGGASQEEFYKFIKPILEKMDGTEELLVKLNREDLLRKQRTFDNGSIPHQIHLGELHAILRRQEDFYPFLKDNREKIEKILTFRIPYYVGPLARGNSRFAWMTRKSEETITPWNFEEVVDKGASAQSFIERMTNFDKNLPNEKVLPKHSLLYEYFTVYNELTKVKYVTEGMRKPAFLSGEQKKAIVDLLFKTNRKVTVKQLKEDYFKKIECFDSVEISGVEDRFNASLGTYHDLLKIIKDKDFLDNEENEDILEDIVLTLTLFEDREMIEERLKTYAHLFDDKVMKQLKRRRYTGWGRLSRKLINGIRDKQSGKTILDFLKSDGFANRNFMQLIHDDSLTFKEDIQKAQVSGQGDSLHEHIANLAGSPAIKKGILQTVKVVDELVKVMGRHKPENIVIEMARENQTTQKGQKNSRERMKRIEEGIKELGSQILKEHPVENTQLQNEKLYLYYLQNGRDMYVDQELDINRLSDYDVDHIVPQSFLKDDSIDNKVLTRSDKARGKSDNVPSEEVVKKMKNYWRQLLNAKLITQRKFDNLTKAERGGLSELDKAGFIKRQLVETRQITKHVAQILDSRMNTKYDENDKLIREVKVITLKSKLVSDFRKDFQFYKVREINNYHHAHDAYLNAVVGTALIKKYPKLESEFVYGDYKVYDVRKMIAKSEQEIGKATAKYFFYSNIMNFFKTEITLANGEIRKRPLIETNGETGEIVWDKGRDFATVRKVLSMPQVNIVKKTEVQTGGFSKESILPKRNSDKLIARKKDWDPKKYGGFDSPTVAYSVLVVAKVEKGKSKKLKSVKELLGITIMERSSFEKNPIDFLEAKGYKEVKKDLIIKLPKYSLFELENGRKRMLASAGELQKGNELALPSKYVNFLYLASHYEKLKGSPEDNEQKQLFVEQHKHYLDEIIEQISEFSKRVILADANLDKVLSAYNKHRDKPIREQAENIIHLFTLTNLGAPAAFKYFDTTIDRKRYTSTKEVLDATLIHQSITGLYETRIDLSQLGGDGGEAAAKGGWVQEISDSRPMLHIYLNGRRFLGLLNTGADKTCIAGRDWPANWPIHQTESSLQGLGMACGVARSSQPLRWQHEDKSGIIHPFVIPTLPFTLWGRDIMKDIKVRLMTDSPDDSQDLMIGAIESNLFADQISWKSDQPVWLNQWPLKQEKLQALQQLVTEQLQLGHLEESNSPWNTPVFVIKKKSGKWRLLQDLRAVNATMHDMGALQPGLPSPVAVPKGWEIIIIDLQDCFFNIKLHPEDCKRFAFSVPSPNFKRPYQRFQWKVLPQGMKNSPTLCQKFVDKAILTVRDKYQDSYIVHYMDDILLAHPSRSIVDEILTSMIQALNKHGLVVSTEKIQKYDNLKYLGTHIQGDSVSYQKLQIRTDKLRTLNDFQKLLGNINWIRPFLKLTTGELKPLFEILNGDSNPISTRKLTPEACKALQLMNERLSTARVKRLDLSQPWSLCILKTEYTPTACLWQDGVVEWIHLPHISPKVITPYDIFCTQLIIKGRHRSKELFSKDPDYIVVPYTKVQFDLLLQEKEDWPISLLGFLGEVHFHLPKDPLLTFTLQTAIIFPHMTSTTPLEKGIVIFTDGSANGRSVTYIQGREPIIKENTQNTAQQAEIVAVITAFEEVSQPFNLYTDSKYVTGLFPEIETATLSPRTKIYTELKHLQRLIHKRQEKFYIGHIRGHTGLPGPLAQGNAYADSLTRILTAGKRTADGSEFEKRTADGSEFESPKKKAKVE

SEQ ID NO: 3279 - protein, 2116 aa, synthetic construct
MPAAKRVKLDGGDKKYSIGLDIGTNSVGWAVITDEYKVPSKKFKVLGNTDRHSIKKNLIGALLFDSGETAEATRLKRTARRRYTRRKNRICYLQEIFSNEMAKVDDSFFHRLEESFLVEEDKKHERHPIFGNIVDEVAYHEKYPTIYHLRKKLVDSTDKADLRLIYLALAHMIKFRGHFLIEGDLNPDNSDVDKLFIQLVQTYNQLFEENPINASGVDAKAILSARLSKSRRLENLIAQLPGEKKNGLFGNLIALSLGLTPNFKSNFDLAEDAKLQLSKDTYDDDLDNLLAQIGDQYADLFLAAKNLSDAILLSDILRVNTEITKAPLSASMIKRYDEHHQDLTLLKALVRQQLPEKYKEIFFDQSKNGYAGYIDGGASQEEFYKFIKPILEKMDGTEELLVKLNREDLLRKQRTFDNGSIPHQIHLGELHAILRRQEDFYPFLKDNREKIEKILTFRIPYYVGPLARGNSRFAWMTRKSEETITPWNFEEVVDKGASAQSFIERMTNFDKNLPNEKVLPKHSLLYEYFTVYNELTKVKYVTEGMRKPAFLSGEQKKAIVDLLFKTNRKVTVKQLKEDYFKKIECFDSVEISGVEDRFNASLGTYHDLLKIIKDKDFLDNEENEDILEDIVLTLTLFEDREMIEERLKTYAHLFDDKVMKQLKRRRYTGWGRLSRKLINGIRDKQSGKTILDFLKSDGFANRNFMQLIHDDSLTFKEDIQKAQVSGQGDSLHEHIANLAGSPAIKKGILQTVKVVDELVKVMGRHKPENIVIEMARENQTTQKGQKNSRERMKRIEEGIKELGSQILKEHPVENTQLQNEKLYLYYLQNGRDMYVDQELDINRLSDYDVDHIVPQSFLKDDSIDNKVLTRSDKARGKSDNVPSEEVVKKMKNYWRQLLNAKLITQRKFDNLTKAERGGLSELDKAGFIKRQLVETRQITKHVAQILDSRMNTKYDENDKLIREVKVITLKSKLVSDFRKDFQFYKVREINNYHHAHDAYLNAVVGTALIKKYPKLESEFVYGDYKVYDVRKMIAKSEQEIGKATAKYFFYSNIMNFFKTEITLANGEIRKRPLIETNGETGEIVWDKGRDFATVRKVLSMPQVNIVKKTEVQTGGFSKESILPKRNSDKLIARKKDWDPKKYGGFDSPTVAYSVLVVAKVEKGKSKKLKSVKELLGITIMERSSFEKNPIDFLEAKGYKEVKKDLIIKLPKYSLFELENGRKRMLASAGELQKGNELALPSKYVNFLYLASHYEKLKGSPEDNEQKQLFVEQHKHYLDEIIEQISEFSKRVILADANLDKVLSAYNKHRDKPIREQAENIIHLFTLTNLGAPAAFKYFDTTIDRKRYTSTKEVLDATLIHQSITGLYETRIDLSQLGGDGGGGGGGSEAAAKGGWVQEISDSRPMLHIYLNGRRFLGLLNTGADKTCIAGRDWPANWPIHQTESSLQGLGMACGVARSSQPLRWQHEDKSGIIHPFVIPTLPFTLWGRDIMKDIKVRLMTDSPDDSQDLMIGAIESNLFADQISWKSDQPVWLNQWPLKQEKLQALQQLVTEQLQLGHLEESNSPWNTPVFVIKKKSGKWRLLQDLRAVNATMHDMGALQPGLPSPVAVPKGWEIIIIDLQDCFFNIKLHPEDCKRFAFSVPSPNFKRPYQRFQWKVLPQGMKNSPTLCQKFVDKAILTVRDKYQDSYIVHYMDDILLAHPSRSIVDEILTSMIQALNKHGLVVSTEKIQKYDNLKYLGTHIQGDSVSYQKLQIRTDKLRTLNDFQKLLGNINWIRPFLKLTTGELKPLFEILNGDSNPISTRKLTPEACKALQLMNERLSTARVKRLDLSQPWSLCILKTEYTPTACLWQDGVVEWIHLPHISPKVITPYDIFCTQLIIKGRHRSKELFSKDPDYIVVPYTKVQFDLLLQEKEDWPISLLGFLGEVHFHLPKDPLLTFTLQTAIIFPHMTSTTPLEKGIVIFTDGSANGRSVTYIQGREPIIKENTQNTAQQAEIVAVITAFEEVSQPFNLYTDSKYVTGLFPEIETATLSPRTKIYTELKHLQRLIHKRQEKFYIGHIRGHTGLPGPLAQGNAYADSLTRILTAGKRTADGSEFEKRTADGSEFESPKKKAKVE

SEQ ID NO: 3280 - protein, 2125 aa, synthetic construct; identical to SEQ ID NO: 3193

SEQ ID NO: 3281 - protein, 2120 aa, synthetic construct
MPAAKRVKLDGGDKKYSIGLDIGTNSVGWAVITDEYKVPSKKFKVLGNTDRHSIKKNLIGALLFDSGETAEATRLKRTARRRYTRRKNRICYLQEIFSNEMAKVDDSFFHRLEESFLVEEDKKHERHPIFGNIVDEVAYHEKYPTIYHLRKKLVDSTDKADLRLIYLALAHMIKFRGHFLIEGDLNPDNSDVDKLFIQLVQTYNQLFEENPINASGVDAKAILSARLSKSRRLENLIAQLPGEKKNGLFGNLIALSLGLTPNFKSNFDLAEDAKLQLSKDTYDDDLDNLLAQIGDQYADLFLAAKNLSDAILLSDILRVNTEITKAPLSASMIKRYDEHHQDLTLLKALVRQQLPEKYKEIFFDQSKNGYAGYIDGGASQEEFYKFIKPILEKMDGTEELLVKLNREDLLRKQRTFDNGSIPHQIHLGELHAILRRQEDFYPFLKDNREKIEKILTFRIPYYVGPLARGNSRFAWMTRKSEETITPWNFEEVVDKGASAQSFIERMTNFDKNLPNEKVLPKHSLLYEYFTVYNELTKVKYVTEGMRKPAFLSGEQKKAIVDLLFKTNRKVTVKQLKEDYFKKIECFDSVEISGVEDRFNASLGTYHDLLKIIKDKDFLDNEENEDILEDIVLTLTLFEDREMIEERLKTYAHLFDDKVMKQLKRRRYTGWGRLSRKLINGIRDKQSGKTILDFLKSDGFANRNFMQLIHDDSLTFKEDIQKAQVSGQGDSLHEHIANLAGSPAIKKGILQTVKVVDELVKVMGRHKPENIVIEMARENQTTQKGQKNSRERMKRIEEGIKELGSQILKEHPVENTQLQNEKLYLYYLQNGRDMYVDQELDINRLSDYDVDHIVPQSFLKDDSIDNKVLTRSDKARGKSDNVPSEEVVKKMKNYWRQLLNAKLITQRKFDNLTKAERGGLSELDKAGFIKRQLVETRQITKHVAQILDSRMNTKYDENDKLIREVKVITLKSKLVSDFRKDFQFYKVREINNYHHAHDAYLNAVVGTALIKKYPKLESEFVYGDYKVYDVRKMIAKSEQEIGKATAKYFFYSNIMNFFKTEITLANGEIRKRPLIETNGETGEIVWDKGRDFATVRKVLSMPQVNIVKKTEVQTGGFSKESILPKRNSDKLIARKKDWDPKKYGGFDSPTVAYSVLVVAKVEKGKSKKLKSVKELLGITIMERSSFEKNPIDFLEAKGYKEVKKDLIIKLPKYSLFELENGRKRMLASAGELQKGNELALPSKYVNFLYLASHYEKLKGSPEDNEQKQLFVEQHKHYLDEIIEQISEFSKRVILADANLDKVLSAYNKHRDKPIREQAENIIHLFTLTNLGAPAAFKYFDTTIDRKRYTSTKEVLDATLIHQSITGLYETRIDLSQLGGDGGGSSGSSGSSGSSGSSGGWVQEISDSRPMLHIYLNGRRFLGLLNTGADKTCIAGRDWPANWPIHQTESSLQGLGMACGVARSSQPLRWQHEDKSGIIHPFVIPTLPFTLWGRDIMKDIKVRLMTDSPDDSQDLMIGAIESNLFADQISWKSDQPVWLNQWPLKQEKLQALQQLVTEQLQLGHLEESNSPWNTPVFVIKKKSGKWRLLQDLRAVNATMHDMGALQPGLPSPVAVPKGWEIIIIDLQDCFFNIKLHPEDCKRFAFSVPSPNFKRPYQRFQWKVLPQGMKNSPTLCQKFVDKAILTVRDKYQDSYIVHYMDDILLAHPSRSIVDEILTSMIQALNKHGLVVSTEKIQKYDNLKYLGTHIQGDSVSYQKLQIRTDKLRTLNDFQKLLGNINWIRPFLKLTTGELKPLFEILNGDSNPISTRKLTPEACKALQLMNERLSTARVKRLDLSQPWSLCILKTEYTPTACLWQDGVVEWIHLPHISPKVITPYDIFCTQLIIKGRHRSKELFSKDPDYIVVPYTKVQFDLLLQEKEDWPISLLGFLGEVHFHLPKDPLLTFTLQTAIIFPHMTSTTPLEKGIVIFTDGSANGRSVTYIQGREPIIKENTQNTAQQAEIVAVITAFEEVSQPFNLYTDSKYVTGLFPEIETATLSPRTKIYTELKHLQRLIHKRQEKFYIGHIRGHTGLPGPLAQGNAYADSLTRILTAGKRTADGSEFEKRTADGSEFESPKKKAKVE

SEQ ID NO: 3282 - protein, 2123 aa, synthetic construct
MPAAKRVKLDGGDKKYSIGLDIGTNSVGWAVITDEYKVPSKKFKVLGNTDRHSIKKNLIGALLFDSGETAEATRLKRTARRRYTRRKNRICYLQEIFSNEMAKVDDSFFHRLEESFLVEEDKKHERHPIFGNIVDEVAYHEKYPTIYHLRKKLVDSTDKADLRLIYLALAHMIKFRGHFLIEGDLNPDNSDVDKLFIQLVQTYNQLFEENPINASGVDAKAILSARLSKSRRLENLIAQLPGEKKNGLFGNLIALSLGLTPNFKSNFDLAEDAKLQLSKDTYDDDLDNLLAQIGDQYADLFLAAKNLSDAILLSDILRVNTEITKAPLSASMIKRYDEHHQDLTLLKALVRQQLPEKYKEIFFDQSKNGYAGYIDGGASQEEFYKFIKPILEKMDGTEELLVKLNREDLLRKQRTFDNGSIPHQIHLGELHAILRRQEDFYPFLKDNREKIEKILTFRIPYYVGPLARGNSRFAWMTRKSEETITPWNFEEVVDKGASAQSFIERMTNFDKNLPNEKVLPKHSLLYEYFTVYNELTKVKYVTEGMRKPAFLSGEQKKAIVDLLFKTNRKVTVKQLKEDYFKKIECFDSVEISGVEDRFNASLGTYHDLLKIIKDKDFLDNEENEDILEDIVLTLTLFEDREMIEERLKTYAHLFDDKVMKQLKRRRYTGWGRLSRKLINGIRDKQSGKTILDFLKSDGFANRNFMQLIHDDSLTFKEDIQKAQVSGQGDSLHEHIANLAGSPAIKKGILQTVKVVDELVKVMGRHKPENIVIEMARENQTTQKGQKNSRERMKRIEEGIKELGSQILKEHPVENTQLQNEKLYLYYLQNGRDMYVDQELDINRLSDYDVDHIVPQSFLKDDSIDNKVLTRSDKARGKSDNVPSEEVVKKMKNYWRQLLNAKLITQRKFDNLTKAERGGLSELDKAGFIKRQLVETRQITKHVAQILDSRMNTKYDENDKLIREVKVITLKSKLVSDFRKDFQFYKVREINNYHHAHDAYLNAVVGTALIKKYPKLESEFVYGDYKVYDVRKMIAKSEQEIGKATAKYFFYSNIMNFFKTEITLANGEIRKRPLIETNGETGEIVWDKGRDFATVRKVLSMPQVNIVKKTEVQTGGFSKESILPKRNSDKLIARKKDWDPKKYGGFDSPTVAYSVLVVAKVEKGKSKKLKSVKELLGITIMERSSFEKNPIDFLEAKGYKEVKKDLIIKLPKYSLFELENGRKRMLASAGELQKGNELALPSKYVNFLYLASHYEKLKGSPEDNEQKQLFVEQHKHYLDEIIEQISEFSKRVILADANLDKVLSAYNKHRDKPIREQAENIIHLFTLTNLGAPAAFKYFDTTIDRKRYTSTKEVLDATLIHQSITGLYETRIDLSQLGGDGGGSSGSSGSSGSSGSSGSSGGWVQEISDSRPMLHIYLNGRRFLGLLNTGADKTCIAGRDWPANWPIHQTESSLQGLGMACGVARSSQPLRWQHEDKSGIIHPFVIPTLPFTLWGRDIMKDIKVRLMTDSPDDSQDLMIGAIESNLFADQISWKSDQPVWLNQWPLKQEKLQALQQLVTEQLQLGHLEESNSPWNTPVFVIKKKSGKWRLLQDLRAVNATMHDMGALQPGLPSPVAVPKGWEIIIIDLQDCFFNIKLHPEDCKRFAFSVPSPNFKRPYQRFQWKVLPQGMKNSPTLCQKFVDKAILTVRDKYQDSYIVHYMDDILLAHPSRSIVDEILTSMIQALNKHGLVVSTEKIQKYDNLKYLGTHIQGDSVSYQKLQIRTDKLRTLNDFQKLLGNINWIRPFLKLTTGELKPLFEILNGDSNPISTRKLTPEACKALQLMNERLSTARVKRLDLSQPWSLCILKTEYTPTACLWQDGVVEWIHLPHISPKVITPYDIFCTQLIIKGRHRSKELFSKDPDYIVVPYTKVQFDLLLQEKEDWPISLLGFLGEVHFHLPKDPLLTFTLQTAIIFPHMTSTTPLEKGIVIFTDGSANGRSVTYIQGREPIIKENTQNTAQQAEIVAVITAFEEVSQPFNLYTDSKYVTGLFPEIETATLSPRTKIYTELKHLQRLIHKRQEKFYIGHIRGHTGLPGPLAQGNAYADSLTRILTAGKRTADGSEFEKRTADGSEFESPKKKAKVE

SEQ ID NO: 3283 - protein, 2116 aa, synthetic construct
MPAAKRVKLDGGDKKYSIGLDIGTNSVGWAVITDEYKVPSKKFKVLGNTDRHSIKKNLIGALLFDSGETAEATRLKRTARRRYTRRKNRICYLQEIFSNEMAKVDDSFFHRLEESFLVEEDKKHERHPIFGNIVDEVAYHEKYPTIYHLRKKLVDSTDKADLRLIYLALAHMIKFRGHFLIEGDLNPDNSDVDKLFIQLVQTYNQLFEENPINASGVDAKAILSARLSKSRRLENLIAQLPGEKKNGLFGNLIALSLGLTPNFKSNFDLAEDAKLQLSKDTYDDDLDNLLAQIGDQYADLFLAAKNLSDAILLSDILRVNTEITKAPLSASMIKRYDEHHQDLTLLKALVRQQLPEKYKEIFFDQSKNGYAGYIDGGASQEEFYKFIKPILEKMDGTEELLVKLNREDLLRKQRTFDNGSIPHQIHLGELHAILRRQEDFYPFLKDNREKIEKILTFRIPYYVGPLARGNSRFAWMTRKSEETITPWNFEEVVDKGASAQSFIERMTNFDKNLPNEKVLPKHSLLYEYFTVYNELTKVKYVTEGMRKPAFLSGEQKKAIVDLLFKTNRKVTVKQLKEDYFKKIECFDSVEISGVEDRFNASLGTYHDLLKIIKDKDFLDNEENEDILEDIVLTLTLFEDREMIEERLKTYAHLFDDKVMKQLKRRRYTGWGRLSRKLINGIRDKQSGKTILDFLKSDGFANRNFMQLIHDDSLTFKEDIQKAQVSGQGDSLHEHIANLAGSPAIKKGILQTVKVVDELVKVMGRHKPENIVIEMARENQTTQKGQKNSRERMKRIEEGIKELGSQILKEHPVENTQLQNEKLYLYYLQNGRDMYVDQELDINRLSDYDVDHIVPQSFLKDDSIDNKVLTRSDKARGKSDNVPSEEVVKKMKNYWRQLLNAKLITQRKFDNLTKAERGGLSELDKAGFIKRQLVETRQITKHVAQILDSRMNTKYDENDKLIREVKVITLKSKLVSDFRKDFQFYKVREINNYHHAHDAYLNAVVGTALIKKYPKLESEFVYGDYKVYDVRKMIAKSEQEIGKATAKYFFYSNIMNFFKTEITLANGEIRKRPLIETNGETGEIVWDKGRDFATVRKVLSMPQVNIVKKTEVQTGGFSKESILPKRNSDKLIARKKDWDPKKYGGFDSPTVAYSVLVVAKVEKGKSKKLKSVKELLGITIMERSSFEKNPIDFLEAKGYKEVKKDLIIKLPKYSLFELENGRKRMLASAGELQKGNELALPSKYVNFLYLASHYEKLKGSPEDNEQKQLFVEQHKHYLDEIIEQISEFSKRVILADANLDKVLSAYNKHRDKPIREQAENIIHLFTLTNLGAPAAFKYFDTTIDRKRYTSTKEVLDATLIHQSITGLYETRIDLSQLGGDGGEAAAKGGGGSSGGWVQEISDSRPMLHIYLNGRRFLGLLNTGADKTCIAGRDWPANWPIHQTESSLQGLGMACGVARSSQPLRWQHEDKSGIIHPFVIPTLPFTLWGRDIMKDIKVRLMTDSPDDSQDLMIGAIESNLFADQISWKSDQPVWLNQWPLKQEKLQALQQLVTEQLQLGHLEESNSPWNTPVFVIKKKSGKWRLLQDLRAVNATMHDMGALQPGLPSPVAVPKGWEIIIIDLQDCFFNIKLHPEDCKRFAFSVPSPNFKRPYQRFQWKVLPQGMKNSPTLCQKFVDKAILTVRDKYQDSYIVHYMDDILLAHPSRSIVDEILTSMIQALNKHGLVVSTEKIQKYDNLKYLGTHIQGDSVSYQKLQIRTDKLRTLNDFQKLLGNINWIRPFLKLTTGELKPLFEILNGDSNPISTRKLTPEACKALQLMNERLSTARVKRLDLSQPWSLCILKTEYTPTACLWQDGVVEWIHLPHISPKVITPYDIFCTQLIIKGRHRSKELFSKDPDYIVVPYTKVQFDLLLQEKEDWPISLLGFLGEVHFHLPKDPLLTFTLQTAIIFPHMTSTTPLEKGIVIFTDGSANGRSVTYIQGREPIIKENTQNTAQQAEIVAVITAFEEVSQPFNLYTDSKYVTGLFPEIETATLSPRTKIYTELKHLQRLIHKRQEKFYIGHIRGHTGLPGPLAQGNAYADSLTRILTAGKRTADGSEFEKRTADGSEFESPKKKAKVE

SEQ ID NO: 3284 - protein, 2116 aa, synthetic construct
MPAAKRVKLDGGDKKYSIGLDIGTNSVGWAVITDEYKVPSKKFKVLGNTDRHSIKKNLIGALLFDSGETAEATRLKRTARRRYTRRKNRICYLQEIFSNEMAKVDDSFFHRLEESFLVEEDKKHERHPIFGNIVDEVAYHEKYPTIYHLRKKLVDSTDKADLRLIYLALAHMIKFRGHFLIEGDLNPDNSDVDKLFIQLVQTYNQLFEENPINASGVDAKAILSARLSKSRRLENLIAQLPGEKKNGLFGNLIALSLGLTPNFKSNFDLAEDAKLQLSKDTYDDDLDNLLAQIGDQYADLFLAAKNLSDAILLSDILRVNTEITKAPLSASMIKRYDEHHQDLTLLKALVRQQLPEKYKEIFFDQSKNGYAGYIDGGASQEEFYKFIKPILEKMDGTEELLVKLNREDLLRKQRTFDNGSIPHQIHLGELHAILRRQEDFYPFLKDNREKIEKILTFRIPYYVGPLARGNSRFAWMTRKSEETITPWNFEEVVDKGASAQSFIERMTNFDKNLPNEKVLPKHSLLYEYFTVYNELTKVKYVTEGMRKPAFLSGEQKKAIVDLLFKTNRKVTVKQLKEDYFKKIECFDSVEISGVEDRFNASLGTYHDLLKIIKDKDFLDNEENEDILEDIVLTLTLFEDREMIEERLKTYAHLFDDKVMKQLKRRRYTGWGRLSRKLINGIRDKQSGKTILDFLKSDGFANRNFMQLIHDDSLTFKEDIQKAQVSGQGDSLHEHIANLAGSPAIKKGILQTVKVVDELVKVMGRHKPENIVIEMARENQTTQKGQKNSRERMKRIEEGIKELGSQILKEHPVENTQLQNEKLYLYYLQNGRDMYVDQELDINRLSDYDVDHIVPQSFLKDDSIDNKVLTRSDKARGKSDNVPSEEVVKKMKNYWRQLLNAKLITQRKFDNLTKAERGGLSELDKAGFIKRQLVETRQITKHVAQILDSRMNTKYDENDKLIREVKVITLKSKLVSDFRKDFQFYKVREINNYHHAHDAYLNAVVGTALIKKYPKLESEFVYGDYKVYDVRKMIAKSEQEIGKATAKYFFYSNIMNFFKTEITLANGEIRKRPLIETNGETGEIVWDKGRDFATVRKVLSMPQVNIVKKTEVQTGGFSKESILPKRNSDKLIARKKDWDPKKYGGFDSPTVAYSVLVVAKVEKGKSKKLKSVKELLGITIMERSSFEKNPIDFLEAKGYKEVKKDLIIKLPKYSLFELENGRKRMLASAGELQKGNELALPSKYVNFLYLASHYEKLKGSPEDNEQKQLFVEQHKHYLDEIIEQISEFSKRVILADANLDKVLSAYNKHRDKPIREQAENIIHLFTLTNLGAPAAFKYFDTTIDRKRYTSTKEVLDATLIHQSITGLYETRIDLSQLGGDGGEAAAKGGGGGSGGWVQEISDSRPMLHIYLNGRRFLGLLNTGADKTCIAGRDWPANWPIHQTESSLQGLGMACGVARSSQPLRWQHEDKSGIIHPFVIPTLPFTLWGRDIMKDIKVRLMTDSPDDSQDLMIGAIESNLFADQISWKSDQPVWLNQWPLKQEKLQALQQLVTEQLQLGHLEESNSPWNTPVFVIKKKSGKWRLLQDLRAVNATMHDMGALQPGLPSPVAVPKGWEIIIIDLQDCFFNIKLHPEDCKRFAFSVPSPNFKRPYQRFQWKVLPQGMKNSPTLCQKFVDKAILTVRDKYQDSYIVHYMDDILLAHPSRSIVDEILTSMIQALNKHGLVVSTEKIQKYDNLKYLGTHIQGDSVSYQKLQIRTDKLRTLNDFQKLLGNINWIRPFLKLTTGELKPLFEILNGDSNPISTRKLTPEACKALQLMNERLSTARVKRLDLSQPWSLCILKTEYTPTACLWQDGVVEWIHLPHISPKVITPYDIFCTQLIIKGRHRSKELFSKDPDYIVVPYTKVQFDLLLQEKEDWPISLLGFLGEVHFHLPKDPLLTFTLQTAIIFPHMTSTTPLEKGIVIFTDGSANGRSVTYIQGREPIIKENTQNTAQQAEIVAVITAFEEVSQPFNLYTDSKYVTGLFPEIETATLSPRTKIYTELKHLQRLIHKRQEKFYIGHIRGHTGLPGPLAQGNAYADSLTRILTAGKRTADGSEFEKRTADGSEFESPKKKAKVE

SEQ ID NO: 3285 - protein, 2116 aa, synthetic construct
MPAAKRVKLDGGDKKYSIGLDIGTNSVGWAVITDEYKVPSKKFKVLGNTDRHSIKKNLIGALLFDSGETAEATRLKRTARRRYTRRKNRICYLQEIFSNEMAKVDDSFFHRLEESFLVEEDKKHERHPIFGNIVDEVAYHEKYPTIYHLRKKLVDSTDKADLRLIYLALAHMIKFRGHFLIEGDLNPDNSDVDKLFIQLVQTYNQLFEENPINASGVDAKAILSARLSKSRRLENLIAQLPGEKKNGLFGNLIALSLGLTPNFKSNFDLAEDAKLQLSKDTYDDDLDNLLAQIGDQYADLFLAAKNLSDAILLSDILRVNTEITKAPLSASMIKRYDEHHQDLTLLKALVRQQLPEKYKEIFFDQSKNGYAGYIDGGASQEEFYKFIKPILEKMDGTEELLVKLNREDLLRKQRTFDNGSIPHQIHLGELHAILRRQEDFYPFLKDNREKIEKILTFRIPYYVGPLARGNSRFAWMTRKSEETITPWNFEEVVDKGASAQSFIERMTNFDKNLPNEKVLPKHSLLYEYFTVYNELTKVKYVTEGMRKPAFLSGEQKKAIVDLLFKTNRKVTVKQLKEDYFKKIECFDSVEISGVEDRFNASLGTYHDLLKIIKDKDFLDNEENEDILEDIVLTLTLFEDREMIEERLKTYAHLFDDKVMKQLKRRRYTGWGRLSRKLINGIRDKQSGKTILDFLKSDGFANRNFMQLIHDDSLTFKEDIQKAQVSGQGDSLHEHIANLAGSPAIKKGILQTVKVVDELVKVMGRHKPENIVIEMARENQTTQKGQKNSRERMKRIEEGIKELGSQILKEHPVENTQLQNEKLYLYYLQNGRDMYVDQELDINRLSDYDVDHIVPQSFLKDDSIDNKVLTRSDKARGKSDNVPSEEVVKKMKNYWRQLLNAKLITQRKFDNLTKAERGGLSELDKAGFIKRQLVETRQITKHVAQILDSRMNTKYDENDKLIREVKVITLKSKLVSDFRKDFQFYKVREINNYHHAHDAYLNAVVGTALIKKYPKLESEFVYGDYKVYDVRKMIAKSEQEIGKATAKYFFYSNIMNFFKTEITLANGEIRKRPLIETNGETGEIVWDKGRDFATVRKVLSMPQVNIVKKTEVQTGGFSKESILPKRNSDKLIARKKDWDPKKYGGFDSPTVAYSVLVVAKVEKGKSKKLKSVKELLGITIMERSSFEKNPIDFLEAKGYKEVKKDLIIKLPKYSLFELENGRKRMLASAGELQKGNELALPSKYVNFLYLASHYEKLKGSPEDNEQKQLFVEQHKHYLDEIIEQISEFSKRVILADANLDKVLSAYNKHRDKPIREQAENIIHLFTLTNLGAPAAFKYFDTTIDRKRYTSTKEVLDATLIHQSITGLYETRIDLSQLGGDGGGGGGSSEAAAKGGWVQEISDSRPMLHIYLNGRRFLGLLNTGADKTCIAGRDWPANWPIHQTESSLQGLGMACGVARSSQPLRWQHEDKSGIIHPFVIPTLPFTLWGRDIMKDIKVRLMTDSPDDSQDLMIGAIESNLFADQISWKSDQPVWLNQWPLKQEKLQALQQLVTEQLQLGHLEESNSPWNTPVFVIKKKSGKWRLLQDLRAVNATMHDMGALQPGLPSPVAVPKGWEIIIIDLQDCFFNIKLHPEDCKRFAFSVPSPNFKRPYQRFQWKVLPQGMKNSPTLCQKFVDKAILTVRDKYQDSYIVHYMDDILLAHPSRSIVDEILTSMIQALNKHGLVVSTEKIQKYDNLKYLGTHIQGDSVSYQKLQIRTDKLRTLNDFQKLLGNINWIRPFLKLTTGELKPLFEILNGDSNPISTRKLTPEACKALQLMNERLSTARVKRLDLSQPWSLCILKTEYTPTACLWQDGVVEWIHLPHISPKVITPYDIFCTQLIIKGRHRSKELFSKDPDYIVVPYTKVQFDLLLQEKEDWPISLLGFLGEVHFHLPKDPLLTFTLQTAIIFPHMTSTTPLEKGIVIFTDGSANGRSVTYIQGREPIIKENTQNTAQQAEIVAVITAFEEVSQPFNLYTDSKYVTGLFPEIETATLSPRTKIYTELKHLQRLIHKRQEKFYIGHIRGHTGLPGPLAQGNAYADSLTRILTAGKRTADGSEFEKRTADGSEFESPKKKAKVE

SEQ ID NO: 3286 - protein, 2116 aa, synthetic construct
MPAAKRVKLDGGDKKYSIGLDIGTNSVGWAVITDEYKVPSKKFKVLGNTDRHSIKKNLIGALLFDSGETAEATRLKRTARRRYTRRKNRICYLQEIFSNEMAKVDDSFFHRLEESFLVEEDKKHERHPIFGNIVDEVAYHEKYPTIYHLRKKLVDSTDKADLRLIYLALAHMIKFRGHFLIEGDLNPDNSDVDKLFIQLVQTYNQLFEENPINASGVDAKAILSARLSKSRRLENLIAQLPGEKKNGLFGNLIALSLGLTPNFKSNFDLAEDAKLQLSKDTYDDDLDNLLAQIGDQYADLFLAAKNLSDAILLSDILRVNTEITKAPLSASMIKRYDEHHQDLTLLKALVRQQLPEKYKEIFFDQSKNGYAGYIDGGASQEEFYKFIKPILEKMDGTEELLVKLNREDLLRKQRTFDNGSIPHQIHLGELHAILRRQEDFYPFLKDNREKIEKILTFRIPYYVGPLARGNSRFAWMTRKSEETITPWNFEEVVDKGASAQSFIERMTNFDKNLPNEKVLPKHSLLYEYFTVYNELTKVKYVTEGMRKPAFLSGEQKKAIVDLLFKTNRKVTVKQLKEDYFKKIECFDSVEISGVEDRFNASLGTYHDLLKIIKDKDFLDNEENEDILEDIVLTLTLFEDREMIEERLKTYAHLFDDKVMKQLKRRRYTGWGRLSRKLINGIRDKQSGKTILDFLKSDGFANRNFMQLIHDDSLTFKEDIQKAQVSGQGDSLHEHIANLAGSPAIKKGILQTVKVVDELVKVMGRHKPENIVIEMARENQTTQKGQKNSRERMKRIEEGIKELGSQILKEHPVENTQLQNEKLYLYYLQNGRDMYVDQELDINRLSDYDVDHIVPQSFLKDDSIDNKVLTRSDKARGKSDNVPSEEVVKKMKNYWRQLLNAKLITQRKFDNLTKAERGGLSELDKAGFIKRQLVETRQITKHVAQILDSRMNTKYDENDKLIREVKVITLKSKLVSDFRKDFQFYKVREINNYHHAHDAYLNAVVGTALIKKYPKLESEFVYGDYKVYDVRKMIAKSEQEIGKATAKYFFYSNIMNFFKTEITLANGEIRKRPLIETNGETGEIVWDKGRDFATVRKVLSMPQVNIVKKTEVQTGGFSKESILPKRNSDKLIARKKDWDPKKYGGFDSPTVAYSVLVVAKVEKGKSKKLKSVKELLGITIMERSSFEKNPIDFLEAKGYKEVKKDLIIKLPKYSLFELENGRKRMLASAGELQKGNELALPSKYVNFLYLASHYEKLKGSPEDNEQKQLFVEQHKHYLDEIIEQISEFSKRVILADANLDKVLSAYNKHRDKPIREQAENIIHLFTLTNLGAPAAFKYFDTTIDRKRYTSTKEVLDATLIHQSITGLYETRIDLSQLGGDGGGGSGGGEAAAKGGWVQEISDSRPMLHIYLNGRRFLGLLNTGADKTCIAGRDWPANWPIHQTESSLQGLGMACGVARSSQPLRWQHEDKSGIIHPFVIPTLPFTLWGRDIMKDIKVRLMTDSPDDSQDLMIGAIESNLFADQISWKSDQPVWLNQWPLKQEKLQALQQLVTEQLQLGHLEESNSPWNTPVFVIKKKSGKWRLLQDLRAVNATMHDMGALQPGLPSPVAVPKGWEIIIIDLQDCFFNIKLHPEDCKRFAFSVPSPNFKRPYQRFQWKVLPQGMKNSPTLCQKFVDKAILTVRDKYQDSYIVHYMDDILLAHPSRSIVDEILTSMIQALNKHGLVVSTEKIQKYDNLKYLGTHIQGDSVSYQKLQIRTDKLRTLNDFQKLLGNINWIRPFLKLTTGELKPLFEILNGDSNPISTRKLTPEACKALQLMNERLSTARVKRLDLSQPWSLCILKTEYTPTACLWQDGVVEWIHLPHISPKVITPYDIFCTQLIIKGRHRSKELFSKDPDYIVVPYTKVQFDLLLQEKEDWPISLLGFLGEVHFHLPKDPLLTFTLQTAIIFPHMTSTTPLEKGIVIFTDGSANGRSVTYIQGREPIIKENTQNTAQQAEIVAVITAFEEVSQPFNLYTDSKYVTGLFPEIETATLSPRTKIYTELKHLQRLIHKRQEKFYIGHIRGHTGLPGPLAQGNAYADSLTRILTAGKRTADGSEFEKRTADGSEFESPKKKAKVE

SEQ ID NO: 3287 - protein, 2114 aa, synthetic construct; identical to SEQ ID NO: 3179

SEQ ID NO: 3288 - protein, 2116 aa, synthetic construct
MPAAKRVKLDGGDKKYSIGLDIGTNSVGWAVITDEYKVPSKKFKVLGNTDRHSIKKNLIGALLFDSGETAEATRLKRTARRRYTRRKNRICYLQEIFSNEMAKVDDSFFHRLEESFLVEEDKKHERHPIFGNIVDEVAYHEKYPTIYHLRKKLVDSTDKADLRLIYLALAHMIKFRGHFLIEGDLNPDNSDVDKLFIQLVQTYNQLFEENPINASGVDAKAILSARLSKSRRLENLIAQLPGEKKNGLFGNLIALSLGLTPNFKSNFDLAEDAKLQLSKDTYDDDLDNLLAQIGDQYADLFLAAKNLSDAILLSDILRVNTEITKAPLSASMIKRYDEHHQDLTLLKALVRQQLPEKYKEIFFDQSKNGYAGYIDGGASQEEFYKFIKPILEKMDGTEELLVKLNREDLLRKQRTFDNGSIPHQIHLGELHAILRRQEDFYPFLKDNREKIEKILTFRIPYYVGPLARGNSRFAWMTRKSEETITPWNFEEVVDKGASAQSFIERMTNFDKNLPNEKVLPKHSLLYEYFTVYNELTKVKYVTEGMRKPAFLSGEQKKAIVDLLFKTNRKVTVKQLKEDYFKKIECFDSVEISGVEDRFNASLGTYHDLLKIIKDKDFLDNEENEDILEDIVLTLTLFEDREMIEERLKTYAHLFDDKVMKQLKRRRYTGWGRLSRKLINGIRDKQSGKTILDFLKSDGFANRNFMQLIHDDSLTFKEDIQKAQVSGQGDSLHEHIANLAGSPAIKKGILQTVKVVDELVKVMGRHKPENIVIEMARENQTTQKGQKNSRERMKRIEEGIKELGSQILKEHPVENTQLQNEKLYLYYLQNGRDMYVDQELDINRLSDYDVDHIVPQSFLKDDSIDNKVLTRSDKARGKSDNVPSEEVVKKMKNYWRQLLNAKLITQRKFDNLTKAERGGLSELDKAGFIKRQLVETRQITKHVAQILDSRMNTKYDENDKLIREVKVITLKSKLVSDFRKDFQFYKVREINNYHHAHDAYLNAVVGTALIKKYPKLESEFVYGDYKVYDVRKMIAKSEQEIGKATAKYFFYSNIMNFFKTEITLANGEIRKRPLIETNGETGEIVWDKGRDFATVRKVLSMPQVNIVKKTEVQTGGFSKESILPKRNSDKLIARKKDWDPKKYGGFDSPTVAYSVLVVAKVEKGKSKKLKSVKELLGITIMERSSFEKNPIDFLEAKGYKEVKKDLIIKLPKYSLFELENGRKRMLASAGELQKGNELALPSKYVNFLYLASHYEKLKGSPEDNEQKQLFVEQHKHYLDEIIEQISEFSKRVILADANLDKVLSAYNKHRDKPIREQAENIIHLFTLTNLGAPAAFKYFDTTIDRKRYTSTKEVLDATLIHQSITGLYETRIDLSQLGGDGGPAPEAAAKGGSGGWVQEISDSRPMLHIYLNGRRFLGLLNTGADKTCIAGRDWPANWPIHQTESSLQGLGMACGVARSSQPLRWQHEDKSGIIHPFVIPTLPFTLWGRDIMKDIKVRLMTDSPDDSQDLMIGAIESNLFADQISWKSDQPVWLNQWPLKQEKLQALQQLVTEQLQLGHLEESNSPWNTPVFVIKKKSGKWRLLQDLRAVNATMHDMGALQPGLPSPVAVPKGWEIIIIDLQDCFFNIKLHPEDCKRFAFSVPSPNFKRPYQRFQWKVLPQGMKNSPTLCQKFVDKAILTVRDKYQDSYIVHYMDDILLAHPSRSIVDEILTSMIQALNKHGLVVSTEKIQKYDNLKYLGTHIQGDSVSYQKLQIRTDKLRTLNDFQKLLGNINWIRPFLKLTTGELKPLFEILNGDSNPISTRKLTPEACKALQLMNERLSTARVKRLDLSQPWSLCILKTEYTPTACLWQDGVVEWIHLPHISPKVITPYDIFCTQLIIKGRHRSKELFSKDPDYIVVPYTKVQFDLLLQEKEDWPISLLGFLGEVHFHLPKDPLLTFTLQTAIIFPHMTSTTPLEKGIVIFTDGSANGRSVTYIQGREPIIKENTQNTAQQAEIVAVITAFEEVSQPFNLYTDSKYVTGLFPEIETATLSPRTKIYTELKHLQRLIHKRQEKFYIGHIRGHTGLPGPLAQGNAYADSLTRILTAGKRTADGSEFEKRTADGSEFESPKKKAKVE

SEQ ID NO: 3289 - protein, 2116 aa, synthetic construct; identical to SEQ ID NO: 3178

SEQ ID NO: 3290 - protein, 2116 aa, synthetic construct
MPAAKRVKLDGGDKKYSIGLDIGTNSVGWAVITDEYKVPSKKFKVLGNTDRHSIKKNLIGALLFDSGETAEATRLKRTARRRYTRRKNRICYLQEIFSNEMAKVDDSFFHRLEESFLVEEDKKHERHPIFGNIVDEVAYHEKYPTIYHLRKKLVDSTDKADLRLIYLALAHMIKFRGHFLIEGDLNPDNSDVDKLFIQLVQTYNQLFEENPINASGVDAKAILSARLSKSRRLENLIAQLPGEKKNGLFGNLIALSLGLTPNFKSNFDLAEDAKLQLSKDTYDDDLDNLLAQIGDQYADLFLAAKNLSDAILLSDILRVNTEITKAPLSASMIKRYDEHHQDLTLLKALVRQQLPEKYKEIFFDQSKNGYAGYIDGGASQEEFYKFIKPILEKMDGTEELLVKLNREDLLRKQRTFDNGSIPHQIHLGELHAILRRQEDFYPFLKDNREKIEKILTFRIPYYVGPLARGNSRFAWMTRKSEETITPWNFEEVVDKGASAQSFIERMTNFDKNLPNEKVLPKHSLLYEYFTVYNELTKVKYVTEGMRKPAFLSGEQKKAIVDLLFKTNRKVTVKQLKEDYFKKIECFDSVEISGVEDRFNASLGTYHDLLKIIKDKDFLDNEENEDILEDIVLTLTLFEDREMIEERLKTYAHLFDDKVMKQLKRRRYTGWGRLSRKLINGIRDKQSGKTILDFLKSDGFANRNFMQLIHDDSLTFKEDIQKAQVSGQGDSLHEHIANLAGSPAIKKGILQTVKVVDELVKVMGRHKPENIVIEMARENQTTQKGQKNSRERMKRIEEGIKELGSQILKEHPVENTQLQNEKLYLYYLQNGRDMYVDQELDINRLSDYDVDHIVPQSFLKDDSIDNKVLTRSDKARGKSDNVPSEEVVKKMKNYWRQLLNAKLITQRKFDNLTKAERGGLSELDKAGFIKRQLVETRQITKHVAQILDSRMNTKYDENDKLIREVKVITLKSKLVSDFRKDFQFYKVREINNYHHAHDAYLNAVVGTALIKKYPKLESEFVYGDYKVYDVRKMIAKSEQEIGKATAKYFFYSNIMNFFKTEITLANGEIRKRPLIETNGETGEIVWDKGRDFATVRKVLSMPQVNIVKKTEVQTGGFSKESILPKRNSDKLIARKKDWDPKKYGGFDSPTVAYSVLVVAKVEKGKSKKLKSVKELLGITIMERSSFEKNPIDFLEAKGYKEVKKDLIIKLPKYSLFELENGRKRMLASAGELQKGNELALPSKYVNFLYLASHYEKLKGSPEDNEQKQLFVEQHKHYLDEIIEQISEFSKRVILADANLDKVLSAYNKHRDKPIREQAENIIHLFTLTNLGAPAAFKYFDTTIDRKRYTSTKEVLDATLIHQSITGLYETRIDLSQLGGDGGPAPGGSEAAAKGGWVQEISDSRPMLHIYLNGRRFLGLLNTGADKTCIAGRDWPANWPIHQTESSLQGLGMACGVARSSQPLRWQHEDKSGIIHPFVIPTLPFTLWGRDIMKDIKVRLMTDSPDDSQDLMIGAIESNLFADQISWKSDQPVWLNQWPLKQEKLQALQQLVTEQLQLGHLEESNSPWNTPVFVIKKKSGKWRLLQDLRAVNATMHDMGALQPGLPSPVAVPKGWEIIIIDLQDCFFNIKLHPEDCKRFAFSVPSPNFKRPYQRFQWKVLPQGMKNSPTLCQKFVDKAILTVRDKYQDSYIVHYMDDILLAHPSRSIVDEILTSMIQALNKHGLVVSTEKIQKYDNLKYLGTHIQGDSVSYQKLQIRTDKLRTLNDFQKLLGNINWIRPFLKLTTGELKPLFEILNGDSNPISTRKLTPEACKALQLMNERLSTARVKRLDLSQPWSLCILKTEYTPTACLWQDGVVEWIHLPHISPKVITPYDIFCTQLIIKGRHRSKELFSKDPDYIVVPYTKVQFDLLLQEKEDWPISLLGFLGEVHFHLPKDPLLTFTLQTAIIFPHMTSTTPLEKGIVIFTDGSANGRSVTYIQGREPIIKENTQNTAQQAEIVAVITAFEEVSQPFNLYTDSKYVTGLFPEIETATLSPRTKIYTELKHLQRLIHKRQEKFYIGHIRGHTGLPGPLAQGNAYADSLTRILTAGKRTADGSEFEKRTADGSEFESPKKKAKVE

SEQ ID NO: 3291 - protein, 2116 aa, synthetic construct
MPAAKRVKLDGGDKKYSIGLDIGTNSVGWAVITDEYKVPSKKFKVLGNTDRHSIKKNLIGALLFDSGETAEATRLKRTARRRYTRRKNRICYLQEIFSNEMAKVDDSFFHRLEESFLVEEDKKHERHPIFGNIVDEVAYHEKYPTIYHLRKKLVDSTDKADLRLIYLALAHMIKFRGHFLIEGDLNPDNSDVDKLFIQLVQTYNQLFEENPINASGVDAKAILSARLSKSRRLENLIAQLPGEKKNGLFGNLIALSLGLTPNFKSNFDLAEDAKLQLSKDTYDDDLDNLLAQIGDQYADLFLAAKNLSDAILLSDILRVNTEITKAPLSASMIKRYDEHHQDLTLLKALVRQQLPEKYKEIFFDQSKNGYAGYIDGGASQEEFYKFIKPILEKMDGTEELLVKLNREDLLRKQRTFDNGSIPHQIHLGELHAILRRQEDFYPFLKDNREKIEKILTFRIPYYVGPLARGNSRFAWMTRKSEETITPWNFEEVVDKGASAQSFIERMTNFDKNLPNEKVLPKHSLLYEYFTVYNELTKVKYVTEGMRKPAFLSGEQKKAIVDLLFKTNRKVTVKQLKEDYFKKIECFDSVEISGVEDRFNASLGTYHDLLKIIKDKDFLDNEENEDILEDIVLTLTLFEDREMIEERLKTYAHLFDDKVMKQLKRRRYTGWGRLSRKLINGIRDKQSGKTILDFLKSDGFANRNFMQLIHDDSLTFKEDIQKAQVSGQGDSLHEHIANLAGSPAIKKGILQTVKVVDELVKVMGRHKPENIVIEMARENQTTQKGQKNSRERMKRIEEGIKELGSQILKEHPVENTQLQNEKLYLYYLQNGRDMYVDQELDINRLSDYDVDHIVPQSFLKDDSIDNKVLTRSDKARGKSDNVPSEEVVKKMKNYWRQLLNAKLITQRKFDNLTKAERGGLSELDKAGFIKRQLVETRQITKHVAQILDSRMNTKYDENDKLIREVKVITLKSKLVSDFRKDFQFYKVREINNYHHAHDAYLNAVVGTALIKKYPKLESEFVYGDYKVYDVRKMIAKSEQEIGKATAKYFFYSNIMNFFKTEITLANGEIRKRPLIETNGETGEIVWDKGRDFATVRKVLSMPQVNIVKKTEVQTGGFSKESILPKRNSDKLIARKKDWDPKKYGGFDSPTVAYSVLVVAKVEKGKSKKLKSVKELLGITIMERSSFEKNPIDFLEAKGYKEVKKDLIIKLPKYSLFELENGRKRMLASAGELQKGNELALPSKYVNFLYLASHYEKLKGSPEDNEQKQLFVEQHKHYLDEIIEQISEFSKRVILADANLDKVLSAYNKHRDKPIREQAENIIHLFTLTNLGAPAAFKYFDTTIDRKRYTSTKEVLDATLIHQSITGLYETRIDLSQLGGDGGGGSEAAAKGGGGGWVQEISDSRPMLHIYLNGRRFLGLLNTGADKTCIAGRDWPANWPIHQTESSLQGLGMACGVARSSQPLRWQHEDKSGIIHPFVIPTLPFTLWGRDIMKDIKVRLMTDSPDDSQDLMIGAIESNLFADQISWKSDQPVWLNQWPLKQEKLQALQQLVTEQLQLGHLEESNSPWNTPVFVIKKKSGKWRLLQDLRAVNATMHDMGALQPGLPSPVAVPKGWEIIIIDLQDCFFNIKLHPEDCKRFAFSVPSPNFKRPYQRFQWKVLPQGMKNSPTLCQKFVDKAILTVRDKYQDSYIVHYMDDILLAHPSRSIVDEILTSMIQALNKHGLVVSTEKIQKYDNLKYLGTHIQGDSVSYQKLQIRTDKLRTLNDFQKLLGNINWIRPFLKLTTGELKPLFEILNGDSNPISTRKLTPEACKALQLMNERLSTARVKRLDLSQPWSLCILKTEYTPTACLWQDGVVEWIHLPHISPKVITPYDIFCTQLIIKGRHRSKELFSKDPDYIVVPYTKVQFDLLLQEKEDWPISLLGFLGEVHFHLPKDPLLTFTLQTAIIFPHMTSTTPLEKGIVIFTDGSANGRSVTYIQGREPIIKENTQNTAQQAEIVAVITAFEEVSQPFNLYTDSKYVTGLFPEIETATLSPRTKIYTELKHLQRLIHKRQEKFYIGHIRGHTGLPGPLAQGNAYADSLTRILTAGKRTADGSEFEKRTADGSEFESPKKKAKVE

SEQ ID NO: 3292 - protein, 2114 aa, synthetic construct
MPAAKRVKLDGGDKKYSIGLDIGTNSVGWAVITDEYKVPSKKFKVLGNTDRHSIKKNLIGALLFDSGETAEATRLKRTARRRYTRRKNRICYLQEIFSNEMAKVDDSFFHRLEESFLVEEDKKHERHPIFGNIVDEVAYHEKYPTIYHLRKKLVDSTDKADLRLIYLALAHMIKFRGHFLIEGDLNPDNSDVDKLFIQLVQTYNQLFEENPINASGVDAKAILSARLSKSRRLENLIAQLPGEKKNGLFGNLIALSLGLTPNFKSNFDLAEDAKLQLSKDTYDDDLDNLLAQIGDQYADLFLAAKNLSDAILLSDILRVNTEITKAPLSASMIKRYDEHHQDLTLLKALVRQQLPEKYKEIFFDQSKNGYAGYIDGGASQEEFYKFIKPILEKMDGTEELLVKLNREDLLRKQRTFDNGSIPHQIHLGELHAILRRQEDFYPFLKDNREKIEKILTFRIPYYVGPLARGNSRFAWMTRKSEETITPWNFEEVVDKGASAQSFIERMTNFDKNLPNEKVLPKHSLLYEYFTVYNELTKVKYVTEGMRKPAFLSGEQKKAIVDLLFKTNRKVTVKQLKEDYFKKIECFDSVEISGVEDRFNASLGTYHDLLKIIKDKDFLDNEENEDILEDIVLTLTLFEDREMIEERLKTYAHLFDDKVMKQLKRRRYTGWGRLSRKLINGIRDKQSGKTILDFLKSDGFANRNFMQLIHDDSLTFKEDIQKAQVSGQGDSLHEHIANLAGSPAIKKGILQTVKVVDELVKVMGRHKPENIVIEMARENQTTQKGQKNSRERMKRIEEGIKELGSQILKEHPVENTQLQNEKLYLYYLQNGRDMYVDQELDINRLSDYDVDHIVPQSFLKDDSIDNKVLTRSDKARGKSDNVPSEEVVKKMKNYWRQLLNAKLITQRKFDNLTKAERGGLSELDKAGFIKRQLVETRQITKHVAQILDSRMNTKYDENDKLIREVKVITLKSKLVSDFRKDFQFYKVREINNYHHAHDAYLNAVVGTALIKKYPKLESEFVYGDYKVYDVRKMIAKSEQEIGKATAKYFFYSNIMNFFKTEITLANGEIRKRPLIETNGETGEIVWDKGRDFATVRKVLSMPQVNIVKKTEVQTGGFSKESILPKRNSDKLIARKKDWDPKKYGGFDSPTVAYSVLVVAKVEKGKSKKLKSVKELLGITIMERSSFEKNPIDFLEAKGYKEVKKDLIIKLPKYSLFELENGRKRMLASAGELQKGNELALPSKYVNFLYLASHYEKLKGSPEDNEQKQLFVEQHKHYLDEIIEQISEFSKRVILADANLDKVLSAYNKHRDKPIREQAENIIHLFTLTNLGAPAAFKYFDTTIDRKRYTSTKEVLDATLIHQSITGLYETRIDLSQLGGDGGGGSGGSGGSGGWVQEISDSRPMLHIYLNGRRFLGLLNTGADKTCIAGRDWPANWPIHQTESSLQGLGMACGVARSSQPLRWQHEDKSGIIHPFVIPTLPFTLWGRDIMKDIKVRLMTDSPDDSQDLMIGAIESNLFADQISWKSDQPVWLNQWPLKQEKLQALQQLVTEQLQLGHLEESNSPWNTPVFVIKKKSGKWRLLQDLRAVNATMHDMGALQPGLPSPVAVPKGWEIIIIDLQDCFFNIKLHPEDCKRFAFSVPSPNFKRPYQRFQWKVLPQGMKNSPTLCQKFVDKAILTVRDKYQDSYIVHYMDDILLAHPSRSIVDEILTSMIQALNKHGLVVSTEKIQKYDNLKYLGTHIQGDSVSYQKLQIRTDKLRTLNDFQKLLGNINWIRPFLKLTTGELKPLFEILNGDSNPISTRKLTPEACKALQLMNERLSTARVKRLDLSQPWSLCILKTEYTPTACLWQDGVVEWIHLPHISPKVITPYDIFCTQLIIKGRHRSKELFSKDPDYIVVPYTKVQFDLLLQEKEDWPISLLGFLGEVHFHLPKDPLLTFTLQTAIIFPHMTSTTPLEKGIVIFTDGSANGRSVTYIQGREPIIKENTQNTAQQAEIVAVITAFEEVSQPFNLYTDSKYVTGLFPEIETATLSPRTKIYTELKHLQRLIHKRQEKFYIGHIRGHTGLPGPLAQGNAYADSLTRILTAGKRTADGSEFEKRTADGSEFESPKKKAKVE

SEQ ID NO: 3293 - protein, 2113 aa, synthetic construct
MPAAKRVKLDGGDKKYSIGLDIGTNSVGWAVITDEYKVPSKKFKVLGNTDRHSIKKNLIGALLFDSGETAEATRLKRTARRRYTRRKNRICYLQEIFSNEMAKVDDSFFHRLEESFLVEEDKKHERHPIFGNIVDEVAYHEKYPTIYHLRKKLVDSTDKADLRLIYLALAHMIKFRGHFLIEGDLNPDNSDVDKLFIQLVQTYNQLFEENPINASGVDAKAILSARLSKSRRLENLIAQLPGEKKNGLFGNLIALSLGLTPNFKSNFDLAEDAKLQLSKDTYDDDLDNLLAQIGDQYADLFLAAKNLSDAILLSDILRVNTEITKAPLSASMIKRYDEHHQDLTLLKALVRQQLPEKYKEIFFDQSKNGYAGYIDGGASQEEFYKFIKPILEKMDGTEELLVKLNREDLLRKQRTFDNGSIPHQIHLGELHAILRRQEDFYPFLKDNREKIEKILTFRIPYYVGPLARGNSRFAWMTRKSEETITPWNFEEVVDKGASAQSFIERMTNFDKNLPNEKVLPKHSLLYEYFTVYNELTKVKYVTEGMRKPAFLSGEQKKAIVDLLFKTNRKVTVKQLKEDYFKKIECFDSVEISGVEDRFNASLGTYHDLLKIIKDKDFLDNEENEDILEDIVLTLTLFEDREMIEERLKTYAHLFDDKVMKQLKRRRYTGWGRLSRKLINGIRDKQSGKTILDFLKSDGFANRNFMQLIHDDSLTFKEDIQKAQVSGQGDSLHEHIANLAGSPAIKKGILQTVKVVDELVKVMGRHKPENIVIEMARENQTTQKGQKNSRERMKRIEEGIKELGSQILKEHPVENTQLQNEKLYLYYLQNGRDMYVDQELDINRLSDYDVDHIVPQSFLKDDSIDNKVLTRSDKARGKSDNVPSEEVVKKMKNYWRQLLNAKLITQRKFDNLTKAERGGLSELDKAGFIKRQLVETRQITKHVAQILDSRMNTKYDENDKLIREVKVITLKSKLVSDFRKDFQFYKVREINNYHHAHDAYLNAVVGTALIKKYPKLESEFVYGDYKVYDVRKMIAKSEQEIGKATAKYFFYSNIMNFFKTEITLANGEIRKRPLIETNGETGEIVWDKGRDFATVRKVLSMPQVNIVKKTEVQTGGFSKESILPKRNSDKLIARKKDWDPKKYGGFDSPTVAYSVLVVAKVEKGKSKKLKSVKELLGITIMERSSFEKNPIDFLEAKGYKEVKKDLIIKLPKYSLFELENGRKRMLASAGELQKGNELALPSKYVNFLYLASHYEKLKGSPEDNEQKQLFVEQHKHYLDEIIEQISEFSKRVILADANLDKVLSAYNKHRDKPIREQAENIIHLFTLTNLGAPAAFKYFDTTIDRKRYTSTKEVLDATLIHQSITGLYETRIDLSQLGGDGGGGSEAAAKGGWVQEISDSRPMLHIYLNGRRFLGLLNTGADKTCIAGRDWPANWPIHQTESSLQGLGMACGVARSSQPLRWQHEDKSGIIHPFVIPTLPFTLWGRDIMKDIKVRLMTDSPDDSQDLMIGAIESNLFADQISWKSDQPVWLNQWPLKQEKLQALQQLVTEQLQLGHLEESNSPWNTPVFVIKKKSGKWRLLQDLRAVNATMHDMGALQPGLPSPVAVPKGWEIIIIDLQDCFFNIKLHPEDCKRFAFSVPSPNFKRPYQRFQWKVLPQGMKNSPTLCQKFVDKAILTVRDKYQDSYIVHYMDDILLAHPSRSIVDEILTSMIQALNKHGLVVSTEKIQKYDNLKYLGTHIQGDSVSYQKLQIRTDKLRTLNDFQKLLGNINWIRPFLKLTTGELKPLFEILNGDSNPISTRKLTPEACKALQLMNERLSTARVKRLDLSQPWSLCILKTEYTPTACLWQDGVVEWIHLPHISPKVITPYDIFCTQLIIKGRHRSKELFSKDPDYIVVPYTKVQFDLLLQEKEDWPISLLGFLGEVHFHLPKDPLLTFTLQTAIIFPHMTSTTPLEKGIVIFTDGSANGRSVTYIQGREPIIKENTQNTAQQAEIVAVITAFEEVSQPFNLYTDSKYVTGLFPEIETATLSPRTKIYTELKHLQRLIHKRQEKFYIGHIRGHTGLPGPLAQGNAYADSLTRILTAGKRTADGSEFEKRTADGSEFESPKKKAKVE

SEQ ID NO: 3294 - protein, 2043 aa, synthetic construct
MPAAKRVKLDGGDKKYSIGLDIGTNSVGWAVITDEYKVPSKKFKVLGNTDRHSIKKNLIGALLFDSGETAEATRLKRTARRRYTRRKNRICYLQEIFSNEMAKVDDSFFHRLEESFLVEEDKKHERHPIFGNIVDEVAYHEKYPTIYHLRKKLVDSTDKADLRLIYLALAHMIKFRGHFLIEGDLNPDNSDVDKLFIQLVQTYNQLFEENPINASGVDAKAILSARLSKSRRLENLIAQLPGEKKNGLFGNLIALSLGLTPNFKSNFDLAEDAKLQLSKDTYDDDLDNLLAQIGDQYADLFLAAKNLSDAILLSDILRVNTEITKAPLSASMIKRYDEHHQDLTLLKALVRQQLPEKYKEIFFDQSKNGYAGYIDGGASQEEFYKFIKPILEKMDGTEELLVKLNREDLLRKQRTFDNGSIPHQIHLGELHAILRRQEDFYPFLKDNREKIEKILTFRIPYYVGPLARGNSRFAWMTRKSEETITPWNFEEVVDKGASAQSFIERMTNFDKNLPNEKVLPKHSLLYEYFTVYNELTKVKYVTEGMRKPAFLSGEQKKAIVDLLFKTNRKVTVKQLKEDYFKKIECFDSVEISGVEDRFNASLGTYHDLLKIIKDKDFLDNEENEDILEDIVLTLTLFEDREMIEERLKTYAHLFDDKVMKQLKRRRYTGWGRLSRKLINGIRDKQSGKTILDFLKSDGFANRNFMQLIHDDSLTFKEDIQKAQVSGQGDSLHEHIANLAGSPAIKKGILQTVKVVDELVKVMGRHKPENIVIEMARENQTTQKGQKNSRERMKRIEEGIKELGSQILKEHPVENTQLQNEKLYLYYLQNGRDMYVDQELDINRLSDYDVDHIVPQSFLKDDSIDNKVLTRSDKARGKSDNVPSEEVVKKMKNYWRQLLNAKLITQRKFDNLTKAERGGLSELDKAGFIKRQLVETRQITKHVAQILDSRMNTKYDENDKLIREVKVITLKSKLVSDFRKDFQFYKVREINNYHHAHDAYLNAVVGTALIKKYPKLESEFVYGDYKVYDVRKMIAKSEQEIGKATAKYFFYSNIMNFFKTEITLANGEIRKRPLIETNGETGEIVWDKGRDFATVRKVLSMPQVNIVKKTEVQTGGFSKESILPKRNSDKLIARKKDWDPKKYGGFDSPTVAYSVLVVAKVEKGKSKKLKSVKELLGITIMERSSFEKNPIDFLEAKGYKEVKKDLIIKLPKYSLFELENGRKRMLASAGELQKGNELALPSKYVNFLYLASHYEKLKGSPEDNEQKQLFVEQHKHYLDEIIEQISEFSKRVILADANLDKVLSAYNKHRDKPIREQAENIIHLFTLTNLGAPAAFKYFDTTIDRKRYTSTKEVLDATLIHQSITGLYETRIDLSQLGGDGGEAAAKEAAAKEAAAKEAAAKEAAAKEAAAKGGGRDIMKDIKVRLMTDSPDDSQDLMIGAIESNLFADQISWKSDQPVWLNQWPLKQEKLQALQQLVTEQLQLGHLEESNSPWNTPVFVIKKKSGKWRLLQDLRAVNATMHDMGALQPGLPSPVAVPKGWEIIIIDLQDCFFNIKLHPEDCKRFAFSVPSPNFKRPYQRFQWKVLPQGMKNSPTLCQKFVDKAILTVRDKYQDSYIVHYMDDILLAHPSRSIVDEILTSMIQALNKHGLVVSTEKIQKYDNLKYLGTHIQGDSVSYQKLQIRTDKLRTLNDFQKLLGNINWIRPFLKLTTGELKPLFEILNGDSNPISTRKLTPEACKALQLMNERLSTARVKRLDLSQPWSLCILKTEYTPTACLWQDGVVEWIHLPHISPKVITPYDIFCTQLIIKGRHRSKELFSKDPDYIVVPYTKVQFDLLLQEKEDWPISLLGFLGEVHFHLPKDPLLTFTLQTAIIFPHMTSTTPLEKGIVIFTDGSANGRSVTYIQGREPIIKENTQNTAQQAEIVAVITAFEEVSQPFNLYTDSKYVTGLFPEIETATLSPRTKIYTELKHLQRLIHKRQEKFYIGHIRGHTGLPGPLAQGNAYADSLTRILTAGKRTADGSEFEKRTADGSEFESPKKKAKVE

SEQ ID NO: 3295 - protein, 2046 aa, synthetic construct; identical to SEQ ID NO: 3238

SEQ ID NO: 3296 - protein, 2028 aa, synthetic construct; identical to SEQ ID NO: 3201

SEQ ID NO: 3297 - protein, 2031 aa, synthetic construct
MPAAKRVKLDGGDKKYSIGLDIGTNSVGWAVITDEYKVPSKKFKVLGNTDRHSIKKNLIGALLFDSGETAEATRLKRTARRRYTRRKNRICYLQEIFSNEMAKVDDSFFHRLEESFLVEEDKKHERHPIFGNIVDEVAYHEKYPTIYHLRKKLVDSTDKADLRLIYLALAHMIKFRGHFLIEGDLNPDNSDVDKLFIQLVQTYNQLFEENPINASGVDAKAILSARLSKSRRLENLIAQLPGEKKNGLFGNLIALSLGLTPNFKSNFDLAEDAKLQLSKDTYDDDLDNLLAQIGDQYADLFLAAKNLSDAILLSDILRVNTEITKAPLSASMIKRYDEHHQDLTLLKALVRQQLPEKYKEIFFDQSKNGYAGYIDGGASQEEFYKFIKPILEKMDGTEELLVKLNREDLLRKQRTFDNGSIPHQIHLGELHAILRRQEDFYPFLKDNREKIEKILTFRIPYYVGPLARGNSRFAWMTRKSEETITPWNFEEVVDKGASAQSFIERMTNFDKNLPNEKVLPKHSLLYEYFTVYNELTKVKYVTEGMRKPAFLSGEQKKAIVDLLFKTNRKVTVKQLKEDYFKKIECFDSVEISGVEDRFNASLGTYHDLLKIIKDKDFLDNEENEDILEDIVLTLTLFEDREMIEERLKTYAHLFDDKVMKQLKRRRYTGWGRLSRKLINGIRDKQSGKTILDFLKSDGFANRNFMQLIHDDSLTFKEDIQKAQVSGQGDSLHEHIANLAGSPAIKKGILQTVKVVDELVKVMGRHKPENIVIEMARENQTTQKGQKNSRERMKRIEEGIKELGSQILKEHPVENTQLQNEKLYLYYLQNGRDMYVDQELDINRLSDYDVDHIVPQSFLKDDSIDNKVLTRSDKARGKSDNVPSEEVVKKMKNYWRQLLNAKLITQRKFDNLTKAERGGLSELDKAGFIKRQLVETRQITKHVAQILDSRMNTKYDENDKLIREVKVITLKSKLVSDFRKDFQFYKVREINNYHHAHDAYLNAVVGTALIKKYPKLESEFVYGDYKVYDVRKMIAKSEQEIGKATAKYFFYSNIMNFFKTEITLANGEIRKRPLIETNGETGEIVWDKGRDFATVRKVLSMPQVNIVKKTEVQTGGFSKESILPKRNSDKLIARKKDWDPKKYGGFDSPTVAYSVLVVAKVEKGKSKKLKSVKELLGITIMERSSFEKNPIDFLEAKGYKEVKKDLIIKLPKYSLFELENGRKRMLASAGELQKGNELALPSKYVNFLYLASHYEKLKGSPEDNEQKQLFVEQHKHYLDEIIEQISEFSKRVILADANLDKVLSAYNKHRDKPIREQAENIIHLFTLTNLGAPAAFKYFDTTIDRKRYTSTKEVLDATLIHQSITGLYETRIDLSQLGGDGGGSSGSSGSSGSSGSSGSSGGGRDIMKDIKVRLMTDSPDDSQDLMIGAIESNLFADQISWKSDQPVWLNQWPLKQEKLQALQQLVTEQLQLGHLEESNSPWNTPVFVIKKKSGKWRLLQDLRAVNATMHDMGALQPGLPSPVAVPKGWEIIIIDLQDCFFNIKLHPEDCKRFAFSVPSPNFKRPYQRFQWKVLPQGMKNSPTLCQKFVDKAILTVRDKYQDSYIVHYMDDILLAHPSRSIVDEILTSMIQALNKHGLVVSTEKIQKYDNLKYLGTHIQGDSVSYQKLQIRTDKLRTLNDFQKLLGNINWIRPFLKLTTGELKPLFEILNGDSNPISTRKLTPEACKALQLMNERLSTARVKRLDLSQPWSLCILKTEYTPTACLWQDGVVEWIHLPHISPKVITPYDIFCTQLIIKGRHRSKELFSKDPDYIVVPYTKVQFDLLLQEKEDWPISLLGFLGEVHFHLPKDPLLTFTLQTAIIFPHMTSTTPLEKGIVIFTDGSANGRSVTYIQGREPIIKENTQNTAQQAEIVAVITAFEEVSQPFNLYTDSKYVTGLFPEIETATLSPRTKIYTELKHLQRLIHKRQEKFYIGHIRGHTGLPGPLAQGNAYADSLTRILTAGKRTADGSEFEKRTADGSEFESPKKKAKVE

SEQ ID NO: 3298 - protein, 2028 aa, synthetic construct
MPAAKRVKLDGGDKKYSIGLDIGTNSVGWAVITDEYKVPSKKFKVLGNTDRHSIKKNLIGALLFDSGETAEATRLKRTARRRYTRRKNRICYLQEIFSNEMAKVDDSFFHRLEESFLVEEDKKHERHPIFGNIVDEVAYHEKYPTIYHLRKKLVDSTDKADLRLIYLALAHMIKFRGHFLIEGDLNPDNSDVDKLFIQLVQTYNQLFEENPINASGVDAKAILSARLSKSRRLENLIAQLPGEKKNGLFGNLIALSLGLTPNFKSNFDLAEDAKLQLSKDTYDDDLDNLLAQIGDQYADLFLAAKNLSDAILLSDILRVNTEITKAPLSASMIKRYDEHHQDLTLLKALVRQQLPEKYKEIFFDQSKNGYAGYIDGGASQEEFYKFIKPILEKMDGTEELLVKLNREDLLRKQRTFDNGSIPHQIHLGELHAILRRQEDFYPFLKDNREKIEKILTFRIPYYVGPLARGNSRFAWMTRKSEETITPWNFEEVVDKGASAQSFIERMTNFDKNLPNEKVLPKHSLLYEYFTVYNELTKVKYVTEGMRKPAFLSGEQKKAIVDLLFKTNRKVTVKQLKEDYFKKIECFDSVEISGVEDRFNASLGTYHDLLKIIKDKDFLDNEENEDILEDIVLTLTLFEDREMIEERLKTYAHLFDDKVMKQLKRRRYTGWGRLSRKLINGIRDKQSGKTILDFLKSDGFANRNFMQLIHDDSLTFKEDIQKAQVSGQGDSLHEHIANLAGSPAIKKGILQTVKVVDELVKVMGRHKPENIVIEMARENQTTQKGQKNSRERMKRIEEGIKELGSQILKEHPVENTQLQNEKLYLYYLQNGRDMYVDQELDINRLSDYDVDHIVPQSFLKDDSIDNKVLTRSDKARGKSDNVPSEEVVKKMKNYWRQLLNAKLITQRKFDNLTKAERGGLSELDKAGFIKRQLVETRQITKHVAQILDSRMNTKYDENDKLIREVKVITLKSKLVSDFRKDFQFYKVREINNYHHAHDAYLNAVVGTALIKKYPKLESEFVYGDYKVYDVRKMIAKSEQEIGKATAKYFFYSNIMNFFKTEITLANGEIRKRPLIETNGETGEIVWDKGRDFATVRKVLSMPQVNIVKKTEVQTGGFSKESILPKRNSDKLIARKKDWDPKKYGGFDSPTVAYSVLVVAKVEKGKSKKLKSVKELLGITIMERSSFEKNPIDFLEAKGYKEVKKDLIIKLPKYSLFELENGRKRMLASAGELQKGNELALPSKYVNFLYLASHYEKLKGSPEDNEQKQLFVEQHKHYLDEIIEQISEFSKRVILADANLDKVLSAYNKHRDKPIREQAENIIHLFTLTNLGAPAAFKYFDTTIDRKRYTSTKEVLDATLIHQSITGLYETRIDLSQLGGDGGGGGGSEAAAKGGGGSGGGRDIMKDIKVRLMTDSPDDSQDLMIGAIESNLFADQISWKSDQPVWLNQWPLKQEKLQALQQLVTEQLQLGHLEESNSPWNTPVFVIKKKSGKWRLLQDLRAVNATMHDMGALQPGLPSPVAVPKGWEIIIIDLQDCFFNIKLHPEDCKRFAFSVPSPNFKRPYQRFQWKVLPQGMKNSPTLCQKFVDKAILTVRDKYQDSYIVHYMDDILLAHPSRSIVDEILTSMIQALNKHGLVVSTEKIQKYDNLKYLGTHIQGDSVSYQKLQIRTDKLRTLNDFQKLLGNINWIRPFLKLTTGELKPLFEILNGDSNPISTRKLTPEACKALQLMNERLSTARVKRLDLSQPWSLCILKTEYTPTACLWQDGVVEWIHLPHISPKVITPYDIFCTQLIIKGRHRSKELFSKDPDYIVVPYTKVQFDLLLQEKEDWPISLLGFLGEVHFHLPKDPLLTFTLQTAIIFPHMTSTTPLEKGIVIFTDGSANGRSVTYIQGREPIIKENTQNTAQQAEIVAVITAFEEVSQPFNLYTDSKYVTGLFPEIETATLSPRTKIYTELKHLQRLIHKRQEKFYIGHIRGHTGLPGPLAQGNAYADSLTRILTAGKRTADGSEFEKRTADGSEFESPKKKAKVE

SEQ ID NO: 3299 - protein, 2028 aa, synthetic construct
MPAAKRVKLDGGDKKYSIGLDIGTNSVGWAVITDEYKVPSKKFKVLGNTDRHSIKKNLIGALLFDSGETAEATRLKRTARRRYTRRKNRICYLQEIFSNEMAKVDDSFFHRLEESFLVEEDKKHERHPIFGNIVDEVAYHEKYPTIYHLRKKLVDSTDKADLRLIYLALAHMIKFRGHFLIEGDLNPDNSDVDKLFIQLVQTYNQLFEENPINASGVDAKAILSARLSKSRRLENLIAQLPGEKKNGLFGNLIALSLGLTPNFKSNFDLAEDAKLQLSKDTYDDDLDNLLAQIGDQYADLFLAAKNLSDAILLSDILRVNTEITKAPLSASMIKRYDEHHQDLTLLKALVRQQLPEKYKEIFFDQSKNGYAGYIDGGASQEEFYKFIKPILEKMDGTEELLVKLNREDLLRKQRTFDNGSIPHQIHLGELHAILRRQEDFYPFLKDNREKIEKILTFRIPYYVGPLARGNSRFAWMTRKSEETITPWNFEEVVDKGASAQSFIERMTNFDKNLPNEKVLPKHSLLYEYFTVYNELTKVKYVTEGMRKPAFLSGEQKKAIVDLLFKTNRKVTVKQLKEDYFKKIECFDSVEISGVEDRFNASLGTYHDLLKIIKDKDFLDNEENEDILEDIVLTLTLFEDREMIEERLKTYAHLFDDKVMKQLKRRRYTGWGRLSRKLINGIRDKQSGKTILDFLKSDGFANRNFMQLIHDDSLTFKEDIQKAQVSGQGDSLHEHIANLAGSPAIKKGILQTVKVVDELVKVMGRHKPENIVIEMARENQTTQKGQKNSRERMKRIEEGIKELGSQILKEHPVENTQLQNEKLYLYYLQNGRDMYVDQELDINRLSDYDVDHIVPQSFLKDDSIDNKVLTRSDKARGKSDNVPSEEVVKKMKNYWRQLLNAKLITQRKFDNLTKAERGGLSELDKAGFIKRQLVETRQITKHVAQILDSRMNTKYDENDKLIREVKVITLKSKLVSDFRKDFQFYKVREINNYHHAHDAYLNAVVGTALIKKYPKLESEFVYGDYKVYDVRKMIAKSEQEIGKATAKYFFYSNIMNFFKTEITLANGEIRKRPLIETNGETGEIVWDKGRDFATVRKVLSMPQVNIVKKTEVQTGGFSKESILPKRNSDKLIARKKDWDPKKYGGFDSPTVAYSVLVVAKVEKGKSKKLKSVKELLGITIMERSSFEKNPIDFLEAKGYKEVKKDLIIKLPKYSLFELENGRKRMLASAGELQKGNELALPSKYVNFLYLASHYEKLKGSPEDNEQKQLFVEQHKHYLDEIIEQISEFSKRVILADANLDKVLSAYNKHRDKPIREQAENIIHLFTLTNLGAPAAFKYFDTTIDRKRYTSTKEVLDATLIHQSITGLYETRIDLSQLGGDGGEAAAKEAAAKEAAAKGGGRDIMKDIKVRLMTDSPDDSQDLMIGAIESNLFADQISWKSDQPVWLNQWPLKQEKLQALQQLVTEQLQLGHLEESNSPWNTPVFVIKKKSGKWRLLQDLRAVNATMHDMGALQPGLPSPVAVPKGWEIIIIDLQDCFFNIKLHPEDCKRFAFSVPSPNFKRPYQRFQWKVLPQGMKNSPTLCQKFVDKAILTVRDKYQDSYIVHYMDDILLAHPSRSIVDEILTSMIQALNKHGLVVSTEKIQKYDNLKYLGTHIQGDSVSYQKLQIRTDKLRTLNDFQKLLGNINWIRPFLKLTTGELKPLFEILNGDSNPISTRKLTPEACKALQLMNERLSTARVKRLDLSQPWSLCILKTEYTPTACLWQDGVVEWIHLPHISPKVITPYDIFCTQLIIKGRHRSKELFSKDPDYIVVPYTKVQFDLLLQEKEDWPISLLGFLGEVHFHLPKDPLLTFTLQTAIIFPHMTSTTPLEKGIVIFTDGSANGRSVTYIQGREPIIKENTQNTAQQAEIVAVITAFEEVSQPFNLYTDSKYVTGLFPEIETATLSPRTKIYTELKHLQRLIHKRQEKFYIGHIRGHTGLPGPLAQGNAYADSLTRILTAGKRTADGSEFEKRTADGSEFESPKKKAKVE

SEQ ID NO: 3300 - protein, 2024 aa, synthetic construct; identical to SEQ ID NO: 3213

SEQ ID NO: 3301 - protein, 2024 aa, synthetic construct
MPAAKRVKLDGGDKKYSIGLDIGTNSVGWAVITDEYKVPSKKFKVLGNTDRHSIKKNLIGALLFDSGETAEATRLKRTARRRYTRRKNRICYLQEIFSNEMAKVDDSFFHRLEESFLVEEDKKHERHPIFGNIVDEVAYHEKYPTIYHLRKKLVDSTDKADLRLIYLALAHMIKFRGHFLIEGDLNPDNSDVDKLFIQLVQTYNQLFEENPINASGVDAKAILSARLSKSRRLENLIAQLPGEKKNGLFGNLIALSLGLTPNFKSNFDLAEDAKLQLSKDTYDDDLDNLLAQIGDQYADLFLAAKNLSDAILLSDILRVNTEITKAPLSASMIKRYDEHHQDLTLLKALVRQQLPEKYKEIFFDQSKNGYAGYIDGGASQEEFYKFIKPILEKMDGTEELLVKLNREDLLRKQRTFDNGSIPHQIHLGELHAILRRQEDFYPFLKDNREKIEKILTFRIPYYVGPLARGNSRFAWMTRKSEETITPWNFEEVVDKGASAQSFIERMTNFDKNLPNEKVLPKHSLLYEYFTVYNELTKVKYVTEGMRKPAFLSGEQKKAIVDLLFKTNRKVTVKQLKEDYFKKIECFDSVEISGVEDRFNASLGTYHDLLKIIKDKDFLDNEENEDILEDIVLTLTLFEDREMIEERLKTYAHLFDDKVMKQLKRRRYTGWGRLSRKLINGIRDKQSGKTILDFLKSDGFANRNFMQLIHDDSLTFKEDIQKAQVSGQGDSLHEHIANLAGSPAIKKGILQTVKVVDELVKVMGRHKPENIVIEMARENQTTQKGQKNSRERMKRIEEGIKELGSQILKEHPVENTQLQNEKLYLYYLQNGRDMYVDQELDINRLSDYDVDHIVPQSFLKDDSIDNKVLTRSDKARGKSDNVPSEEVVKKMKNYWRQLLNAKLITQRKFDNLTKAERGGLSELDKAGFIKRQLVETRQITKHVAQILDSRMNTKYDENDKLIREVKVITLKSKLVSDFRKDFQFYKVREINNYHHAHDAYLNAVVGTALIKKYPKLESEFVYGDYKVYDVRKMIAKSEQEIGKATAKYFFYSNIMNFFKTEITLANGEIRKRPLIETNGETGEIVWDKGRDFATVRKVLSMPQVNIVKKTEVQTGGFSKESILPKRNSDKLIARKKDWDPKKYGGFDSPTVAYSVLVVAKVEKGKSKKLKSVKELLGITIMERSSFEKNPIDFLEAKGYKEVKKDLIIKLPKYSLFELENGRKRMLASAGELQKGNELALPSKYVNFLYLASHYEKLKGSPEDNEQKQLFVEQHKHYLDEIIEQISEFSKRVILADANLDKVLSAYNKHRDKPIREQAENIIHLFTLTNLGAPAAFKYFDTTIDRKRYTSTKEVLDATLIHQSITGLYETRIDLSQLGGDGGEAAAKGSSGGSGGGRDIMKDIKVRLMTDSPDDSQDLMIGAIESNLFADQISWKSDQPVWLNQWPLKQEKLQALQQLVTEQLQLGHLEESNSPWNTPVFVIKKKSGKWRLLQDLRAVNATMHDMGALQPGLPSPVAVPKGWEIIIIDLQDCFFNIKLHPEDCKRFAFSVPSPNFKRPYQRFQWKVLPQGMKNSPTLCQKFVDKAILTVRDKYQDSYIVHYMDDILLAHPSRSIVDEILTSMIQALNKHGLVVSTEKIQKYDNLKYLGTHIQGDSVSYQKLQIRTDKLRTLNDFQKLLGNINWIRPFLKLTTGELKPLFEILNGDSNPISTRKLTPEACKALQLMNERLSTARVKRLDLSQPWSLCILKTEYTPTACLWQDGVVEWIHLPHISPKVITPYDIFCTQLIIKGRHRSKELFSKDPDYIVVPYTKVQFDLLLQEKEDWPISLLGFLGEVHFHLPKDPLLTFTLQTAIIFPHMTSTTPLEKGIVIFTDGSANGRSVTYIQGREPIIKENTQNTAQQAEIVAVITAFEEVSQPFNLYTDSKYVTGLFPEIETATLSPRTKIYTELKHLQRLIHKRQEKFYIGHIRGHTGLPGPLAQGNAYADSLTRILTAGKRTADGSEFEKRTADGSEFESPKKKAKVE

SEQ ID NO: 3302 - protein, 2028 aa, synthetic construct
MPAAKRVKLDGGDKKYSIGLDIGTNSVGWAVITDEYKVPSKKFKVLGNTDRHSIKKNLIGALLFDSGETAEATRLKRTARRRYTRRKNRICYLQEIFSNEMAKVDDSFFHRLEESFLVEEDKKHERHPIFGNIVDEVAYHEKYPTIYHLRKKLVDSTDKADLRLIYLALAHMIKFRGHFLIEGDLNPDNSDVDKLFIQLVQTYNQLFEENPINASGVDAKAILSARLSKSRRLENLIAQLPGEKKNGLFGNLIALSLGLTPNFKSNFDLAEDAKLQLSKDTYDDDLDNLLAQIGDQYADLFLAAKNLSDAILLSDILRVNTEITKAPLSASMIKRYDEHHQDLTLLKALVRQQLPEKYKEIFFDQSKNGYAGYIDGGASQEEFYKFIKPILEKMDGTEELLVKLNREDLLRKQRTFDNGSIPHQIHLGELHAILRRQEDFYPFLKDNREKIEKILTFRIPYYVGPLARGNSRFAWMTRKSEETITPWNFEEVVDKGASAQSFIERMTNFDKNLPNEKVLPKHSLLYEYFTVYNELTKVKYVTEGMRKPAFLSGEQKKAIVDLLFKTNRKVTVKQLKEDYFKKIECFDSVEISGVEDRFNASLGTYHDLLKIIKDKDFLDNEENEDILEDIVLTLTLFEDREMIEERLKTYAHLFDDKVMKQLKRRRYTGWGRLSRKLINGIRDKQSGKTILDFLKSDGFANRNFMQLIHDDSLTFKEDIQKAQVSGQGDSLHEHIANLAGSPAIKKGILQTVKVVDELVKVMGRHKPENIVIEMARENQTTQKGQKNSRERMKRIEEGIKELGSQILKEHPVENTQLQNEKLYLYYLQNGRDMYVDQELDINRLSDYDVDHIVPQSFLKDDSIDNKVLTRSDKARGKSDNVPSEEVVKKMKNYWRQLLNAKLITQRKFDNLTKAERGGLSELDKAGFIKRQLVETRQITKHVAQILDSRMNTKYDENDKLIREVKVITLKSKLVSDFRKDFQFYKVREINNYHHAHDAYLNAVVGTALIKKYPKLESEFVYGDYKVYDVRKMIAKSEQEIGKATAKYFFYSNIMNFFKTEITLANGEIRKRPLIETNGETGEIVWDKGRDFATVRKVLSMPQVNIVKKTEVQTGGFSKESILPKRNSDKLIARKKDWDPKKYGGFDSPTVAYSVLVVAKVEKGKSKKLKSVKELLGITIMERSSFEKNPIDFLEAKGYKEVKKDLIIKLPKYSLFELENGRKRMLASAGELQKGNELALPSKYVNFLYLASHYEKLKGSPEDNEQKQLFVEQHKHYLDEIIEQISEFSKRVILADANLDKVLSAYNKHRDKPIREQAENIIHLFTLTNLGAPAAFKYFDTTIDRKRYTSTKEVLDATLIHQSITGLYETRIDLSQLGGDGGGGSGGSGGSGGSGGSGGGRDIMKDIKVRLMTDSPDDSQDLMIGAIESNLFADQISWKSDQPVWLNQWPLKQEKLQALQQLVTEQLQLGHLEESNSPWNTPVFVIKKKSGKWRLLQDLRAVNATMHDMGALQPGLPSPVAVPKGWEIIIIDLQDCFFNIKLHPEDCKRFAFSVPSPNFKRPYQRFQWKVLPQGMKNSPTLCQKFVDKAILTVRDKYQDSYIVHYMDDILLAHPSRSIVDEILTSMIQALNKHGLVVSTEKIQKYDNLKYLGTHIQGDSVSYQKLQIRTDKLRTLNDFQKLLGNINWIRPFLKLTTGELKPLFEILNGDSNPISTRKLTPEACKALQLMNERLSTARVKRLDLSQPWSLCILKTEYTPTACLWQDGVVEWIHLPHISPKVITPYDIFCTQLIIKGRHRSKELFSKDPDYIVVPYTKVQFDLLLQEKEDWPISLLGFLGEVHFHLPKDPLLTFTLQTAIIFPHMTSTTPLEKGIVIFTDGSANGRSVTYIQGREPIIKENTQNTAQQAEIVAVITAFEEVSQPFNLYTDSKYVTGLFPEIETATLSPRTKIYTELKHLQRLIHKRQEKFYIGHIRGHTGLPGPLAQGNAYADSLTRILTAGKRTADGSEFEKRTADGSEFESPKKKAKVE

SEQ ID NO: 3303 - protein, 2028 aa, synthetic construct
MPAAKRVKLDGGDKKYSIGLDIGTNSVGWAVITDEYKVPSKKFKVLGNTDRHSIKKNLIGALLFDSGETAEATRLKRTARRRYTRRKNRICYLQEIFSNEMAKVDDSFFHRLEESFLVEEDKKHERHPIFGNIVDEVAYHEKYPTIYHLRKKLVDSTDKADLRLIYLALAHMIKFRGHFLIEGDLNPDNSDVDKLFIQLVQTYNQLFEENPINASGVDAKAILSARLSKSRRLENLIAQLPGEKKNGLFGNLIALSLGLTPNFKSNFDLAEDAKLQLSKDTYDDDLDNLLAQIGDQYADLFLAAKNLSDAILLSDILRVNTEITKAPLSASMIKRYDEHHQDLTLLKALVRQQLPEKYKEIFFDQSKNGYAGYIDGGASQEEFYKFIKPILEKMDGTEELLVKLNREDLLRKQRTFDNGSIPHQIHLGELHAILRRQEDFYPFLKDNREKIEKILTFRIPYYVGPLARGNSRFAWMTRKSEETITPWNFEEVVDKGASAQSFIERMTNFDKNLPNEKVLPKHSLLYEYFTVYNELTKVKYVTEGMRKPAFLSGEQKKAIVDLLFKTNRKVTVKQLKEDYFKKIECFDSVEISGVEDRFNASLGTYHDLLKIIKDKDFLDNEENEDILEDIVLTLTLFEDREMIEERLKTYAHLFDDKVMKQLKRRRYTGWGRLSRKLINGIRDKQSGKTILDFLKSDGFANRNFMQLIHDDSLTFKEDIQKAQVSGQGDSLHEHIANLAGSPAIKKGILQTVKVVDELVKVMGRHKPENIVIEMARENQTTQKGQKNSRERMKRIEEGIKELGSQILKEHPVENTQLQNEKLYLYYLQNGRDMYVDQELDINRLSDYDVDHIVPQSFLKDDSIDNKVLTRSDKARGKSDNVPSEEVVKKMKNYWRQLLNAKLITQRKFDNLTKAERGGLSELDKAGFIKRQLVETRQITKHVAQILDSRMNTKYDENDKLIREVKVITLKSKLVSDFRKDFQFYKVREINNYHHAHDAYLNAVVGTALIKKYPKLESEFVYGDYKVYDVRKMIAKSEQEIGKATAKYFFYSNIMNFFKTEITLANGEIRKRPLIETNGETGEIVWDKGRDFATVRKVLSMPQVNIVKKTEVQTGGFSKESILPKRNSDKLIARKKDWDPKKYGGFDSPTVAYSVLVVAKVEKGKSKKLKSVKELLGITIMERSSFEKNPIDFLEAKGYKEVKKDLIIKLPKYSLFELENGRKRMLASAGELQKGNELALPSKYVNFLYLASHYEKLKGSPEDNEQKQLFVEQHKHYLDEIIEQISEFSKRVILADANLDKVLSAYNKHRDKPIREQAENIIHLFTLTNLGAPAAFKYFDTTIDRKRYTSTKEVLDATLIHQSITGLYETRIDLSQLGGDGGGSSGSSGSSGSSGSSGGGRDIMKDIKVRLMTDSPDDSQDLMIGAIESNLFADQISWKSDQPVWLNQWPLKQEKLQALQQLVTEQLQLGHLEESNSPWNTPVFVIKKKSGKWRLLQDLRAVNATMHDMGALQPGLPSPVAVPKGWEIIIIDLQDCFFNIKLHPEDCKRFAFSVPSPNFKRPYQRFQWKVLPQGMKNSPTLCQKFVDKAILTVRDKYQDSYIVHYMDDILLAHPSRSIVDEILTSMIQALNKHGLVVSTEKIQKYDNLKYLGTHIQGDSVSYQKLQIRTDKLRTLNDFQKLLGNINWIRPFLKLTTGELKPLFEILNGDSNPISTRKLTPEACKALQLMNERLSTARVKRLDLSQPWSLCILKTEYTPTACLWQDGVVEWIHLPHISPKVITPYDIFCTQLIIKGRHRSKELFSKDPDYIVVPYTKVQFDLLLQEKEDWPISLLGFLGEVHFHLPKDPLLTFTLQTAIIFPHMTSTTPLEKGIVIFTDGSANGRSVTYIQGREPIIKENTQNTAQQAEIVAVITAFEEVSQPFNLYTDSKYVTGLFPEIETATLSPRTKIYTELKHLQRLIHKRQEKFYIGHIRGHTGLPGPLAQGNAYADSLTRILTAGKRTADGSEFEKRTADGSEFESPKKKAKVE

SEQ ID NO: 3304 - protein, 2022 aa, synthetic construct; identical to SEQ ID NO: 3221

SEQ ID NO: 3305 - protein, 2022 aa, synthetic construct
MPAAKRVKLDGGDKKYSIGLDIGTNSVGWAVITDEYKVPSKKFKVLGNTDRHSIKKNLIGALLFDSGETAEATRLKRTARRRYTRRKNRICYLQEIFSNEMAKVDDSFFHRLEESFLVEEDKKHERHPIFGNIVDEVAYHEKYPTIYHLRKKLVDSTDKADLRLIYLALAHMIKFRGHFLIEGDLNPDNSDVDKLFIQLVQTYNQLFEENPINASGVDAKAILSARLSKSRRLENLIAQLPGEKKNGLFGNLIALSLGLTPNFKSNFDLAEDAKLQLSKDTYDDDLDNLLAQIGDQYADLFLAAKNLSDAILLSDILRVNTEITKAPLSASMIKRYDEHHQDLTLLKALVRQQLPEKYKEIFFDQSKNGYAGYIDGGASQEEFYKFIKPILEKMDGTEELLVKLNREDLLRKQRTFDNGSIPHQIHLGELHAILRRQEDFYPFLKDNREKIEKILTFRIPYYVGPLARGNSRFAWMTRKSEETITPWNFEEVVDKGASAQSFIERMTNFDKNLPNEKVLPKHSLLYEYFTVYNELTKVKYVTEGMRKPAFLSGEQKKAIVDLLFKTNRKVTVKQLKEDYFKKIECFDSVEISGVEDRFNASLGTYHDLLKIIKDKDFLDNEENEDILEDIVLTLTLFEDREMIEERLKTYAHLFDDKVMKQLKRRRYTGWGRLSRKLINGIRDKQSGKTILDFLKSDGFANRNFMQLIHDDSLTFKEDIQKAQVSGQGDSLHEHIANLAGSPAIKKGILQTVKVVDELVKVMGRHKPENIVIEMARENQTTQKGQKNSRERMKRIEEGIKELGSQILKEHPVENTQLQNEKLYLYYLQNGRDMYVDQELDINRLSDYDVDHIVPQSFLKDDSIDNKVLTRSDKARGKSDNVPSEEVVKKMKNYWRQLLNAKLITQRKFDNLTKAERGGLSELDKAGFIKRQLVETRQITKHVAQILDSRMNTKYDENDKLIREVKVITLKSKLVSDFRKDFQFYKVREINNYHHAHDAYLNAVVGTALIKKYPKLESEFVYGDYKVYDVRKMIAKSEQEIGKATAKYFFYSNIMNFFKTEITLANGEIRKRPLIETNGETGEIVWDKGRDFATVRKVLSMPQVNIVKKTEVQTGGFSKESILPKRNSDKLIARKKDWDPKKYGGFDSPTVAYSVLVVAKVEKGKSKKLKSVKELLGITIMERSSFEKNPIDFLEAKGYKEVKKDLIIKLPKYSLFELENGRKRMLASAGELQKGNELALPSKYVNFLYLASHYEKLKGSPEDNEQKQLFVEQHKHYLDEIIEQISEFSKRVILADANLDKVLSAYNKHRDKPIREQAENIIHLFTLTNLGAPAAFKYFDTTIDRKRYTSTKEVLDATLIHQSITGLYETRIDLSQLGGDGGGSSGGSPAPGGGRDIMKDIKVRLMTDSPDDSQDLMIGAIESNLFADQISWKSDQPVWLNQWPLKQEKLQALQQLVTEQLQLGHLEESNSPWNTPVFVIKKKSGKWRLLQDLRAVNATMHDMGALQPGLPSPVAVPKGWEIIIIDLQDCFFNIKLHPEDCKRFAFSVPSPNFKRPYQRFQWKVLPQGMKNSPTLCQKFVDKAILTVRDKYQDSYIVHYMDDILLAHPSRSIVDEILTSMIQALNKHGLVVSTEKIQKYDNLKYLGTHIQGDSVSYQKLQIRTDKLRTLNDFQKLLGNINWIRPFLKLTTGELKPLFEILNGDSNPISTRKLTPEACKALQLMNERLSTARVKRLDLSQPWSLCILKTEYTPTACLWQDGVVEWIHLPHISPKVITPYDIFCTQLIIKGRHRSKELFSKDPDYIVVPYTKVQFDLLLQEKEDWPISLLGFLGEVHFHLPKDPLLTFTLQTAIIFPHMTSTTPLEKGIVIFTDGSANGRSVTYIQGREPIIKENTQNTAQQAEIVAVITAFEEVSQPFNLYTDSKYVTGLFPEIETATLSPRTKIYTELKHLQRLIHKRQEKFYIGHIRGHTGLPGPLAQGNAYADSLTRILTAGKRTADGSEFEKRTADGSEFESPKKKAKVE

SEQ ID NO: 3306 - protein, 2024 aa, synthetic construct
MPAAKRVKLDGGDKKYSIGLDIGTNSVGWAVITDEYKVPSKKFKVLGNTDRHSIKKNLIGALLFDSGETAEATRLKRTARRRYTRRKNRICYLQEIFSNEMAKVDDSFFHRLEESFLVEEDKKHERHPIFGNIVDEVAYHEKYPTIYHLRKKLVDSTDKADLRLIYLALAHMIKFRGHFLIEGDLNPDNSDVDKLFIQLVQTYNQLFEENPINASGVDAKAILSARLSKSRRLENLIAQLPGEKKNGLFGNLIALSLGLTPNFKSNFDLAEDAKLQLSKDTYDDDLDNLLAQIGDQYADLFLAAKNLSDAILLSDILRVNTEITKAPLSASMIKRYDEHHQDLTLLKALVRQQLPEKYKEIFFDQSKNGYAGYIDGGASQEEFYKFIKPILEKMDGTEELLVKLNREDLLRKQRTFDNGSIPHQIHLGELHAILRRQEDFYPFLKDNREKIEKILTFRIPYYVGPLARGNSRFAWMTRKSEETITPWNFEEVVDKGASAQSFIERMTNFDKNLPNEKVLPKHSLLYEYFTVYNELTKVKYVTEGMRKPAFLSGEQKKAIVDLLFKTNRKVTVKQLKEDYFKKIECFDSVEISGVEDRFNASLGTYHDLLKIIKDKDFLDNEENEDILEDIVLTLTLFEDREMIEERLKTYAHLFDDKVMKQLKRRRYTGWGRLSRKLINGIRDKQSGKTILDFLKSDGFANRNFMQLIHDDSLTFKEDIQKAQVSGQGDSLHEHIANLAGSPAIKKGILQTVKVVDELVKVMGRHKPENIVIEMARENQTTQKGQKNSRERMKRIEEGIKELGSQILKEHPVENTQLQNEKLYLYYLQNGRDMYVDQELDINRLSDYDVDHIVPQSFLKDDSIDNKVLTRSDKARGKSDNVPSEEVVKKMKNYWRQLLNAKLITQRKFDNLTKAERGGLSELDKAGFIKRQLVETRQITKHVAQILDSRMNTKYDENDKLIREVKVITLKSKLVSDFRKDFQFYKVREINNYHHAHDAYLNAVVGTALIKKYPKLESEFVYGDYKVYDVRKMIAKSEQEIGKATAKYFFYSNIMNFFKTEITLANGEIRKRPLIETNGETGEIVWDKGRDFATVRKVLSMPQVNIVKKTEVQTGGFSKESILPKRNSDKLIARKKDWDPKKYGGFDSPTVAYSVLVVAKVEKGKSKKLKSVKELLGITIMERSSFEKNPIDFLEAKGYKEVKKDLIIKLPKYSLFELENGRKRMLASAGELQKGNELALPSKYVNFLYLASHYEKLKGSPEDNEQKQLFVEQHKHYLDEIIEQISEFSKRVILADANLDKVLSAYNKHRDKPIREQAENIIHLFTLTNLGAPAAFKYFDTTIDRKRYTSTKEVLDATLIHQSITGLYETRIDLSQLGGDGGEAAAKGGGGSSGGGRDIMKDIKVRLMTDSPDDSQDLMIGAIESNLFADQISWKSDQPVWLNQWPLKQEKLQALQQLVTEQLQLGHLEESNSPWNTPVFVIKKKSGKWRLLQDLRAVNATMHDMGALQPGLPSPVAVPKGWEIIIIDLQDCFFNIKLHPEDCKRFAFSVPSPNFKRPYQRFQWKVLPQGMKNSPTLCQKFVDKAILTVRDKYQDSYIVHYMDDILLAHPSRSIVDEILTSMIQALNKHGLVVSTEKIQKYDNLKYLGTHIQGDSVSYQKLQIRTDKLRTLNDFQKLLGNINWIRPFLKLTTGELKPLFEILNGDSNPISTRKLTPEACKALQLMNERLSTARVKRLDLSQPWSLCILKTEYTPTACLWQDGVVEWIHLPHISPKVITPYDIFCTQLIIKGRHRSKELFSKDPDYIVVPYTKVQFDLLLQEKEDWPISLLGFLGEVHFHLPKDPLLTFTLQTAIIFPHMTSTTPLEKGIVIFTDGSANGRSVTYIQGREPIIKENTQNTAQQAEIVAVITAFEEVSQPFNLYTDSKYVTGLFPEIETATLSPRTKIYTELKHLQRLIHKRQEKFYIGHIRGHTGLPGPLAQGNAYADSLTRILTAGKRTADGSEFEKRTADGSEFESPKKKAKVE

SEQ ID NO: 3307 - protein, 2021 aa, synthetic construct
MPAAKRVKLDGGDKKYSIGLDIGTNSVGWAVITDEYKVPSKKFKVLGNTDRHSIKKNLIGALLFDSGETAEATRLKRTARRRYTRRKNRICYLQEIFSNEMAKVDDSFFHRLEESFLVEEDKKHERHPIFGNIVDEVAYHEKYPTIYHLRKKLVDSTDKADLRLIYLALAHMIKFRGHFLIEGDLNPDNSDVDKLFIQLVQTYNQLFEENPINASGVDAKAILSARLSKSRRLENLIAQLPGEKKNGLFGNLIALSLGLTPNFKSNFDLAEDAKLQLSKDTYDDDLDNLLAQIGDQYADLFLAAKNLSDAILLSDILRVNTEITKAPLSASMIKRYDEHHQDLTLLKALVRQQLPEKYKEIFFDQSKNGYAGYIDGGASQEEFYKFIKPILEKMDGTEELLVKLNREDLLRKQRTFDNGSIPHQIHLGELHAILRRQEDFYPFLKDNREKIEKILTFRIPYYVGPLARGNSRFAWMTRKSEETITPWNFEEVVDKGASAQSFIERMTNFDKNLPNEKVLPKHSLLYEYFTVYNELTKVKYVTEGMRKPAFLSGEQKKAIVDLLFKTNRKVTVKQLKEDYFKKIECFDSVEISGVEDRFNASLGTYHDLLKIIKDKDFLDNEENEDILEDIVLTLTLFEDREMIEERLKTYAHLFDDKVMKQLKRRRYTGWGRLSRKLINGIRDKQSGKTILDFLKSDGFANRNFMQLIHDDSLTFKEDIQKAQVSGQGDSLHEHIANLAGSPAIKKGILQTVKVVDELVKVMGRHKPENIVIEMARENQTTQKGQKNSRERMKRIEEGIKELGSQILKEHPVENTQLQNEKLYLYYLQNGRDMYVDQELDINRLSDYDVDHIVPQSFLKDDSIDNKVLTRSDKARGKSDNVPSEEVVKKMKNYWRQLLNAKLITQRKFDNLTKAERGGLSELDKAGFIKRQLVETRQITKHVAQILDSRMNTKYDENDKLIREVKVITLKSKLVSDFRKDFQFYKVREINNYHHAHDAYLNAVVGTALIKKYPKLESEFVYGDYKVYDVRKMIAKSEQEIGKATAKYFFYSNIMNFFKTEITLANGEIRKRPLIETNGETGEIVWDKGRDFATVRKVLSMPQVNIVKKTEVQTGGFSKESILPKRNSDKLIARKKDWDPKKYGGFDSPTVAYSVLVVAKVEKGKSKKLKSVKELLGITIMERSSFEKNPIDFLEAKGYKEVKKDLIIKLPKYSLFELENGRKRMLASAGELQKGNELALPSKYVNFLYLASHYEKLKGSPEDNEQKQLFVEQHKHYLDEIIEQISEFSKRVILADANLDKVLSAYNKHRDKPIREQAENIIHLFTLTNLGAPAAFKYFDTTIDRKRYTSTKEVLDATLIHQSITGLYETRIDLSQLGGDGGGSSEAAAKGGGRDIMKDIKVRLMTDSPDDSQDLMIGAIESNLFADQISWKSDQPVWLNQWPLKQEKLQALQQLVTEQLQLGHLEESNSPWNTPVFVIKKKSGKWRLLQDLRAVNATMHDMGALQPGLPSPVAVPKGWEIIIIDLQDCFFNIKLHPEDCKRFAFSVPSPNFKRPYQRFQWKVLPQGMKNSPTLCQKFVDKAILTVRDKYQDSYIVHYMDDILLAHPSRSIVDEILTSMIQALNKHGLVVSTEKIQKYDNLKYLGTHIQGDSVSYQKLQIRTDKLRTLNDFQKLLGNINWIRPFLKLTTGELKPLFEILNGDSNPISTRKLTPEACKALQLMNERLSTARVKRLDLSQPWSLCILKTEYTPTACLWQDGVVEWIHLPHISPKVITPYDIFCTQLIIKGRHRSKELFSKDPDYIVVPYTKVQFDLLLQEKEDWPISLLGFLGEVHFHLPKDPLLTFTLQTAIIFPHMTSTTPLEKGIVIFTDGSANGRSVTYIQGREPIIKENTQNTAQQAEIVAVITAFEEVSQPFNLYTDSKYVTGLFPEIETATLSPRTKIYTELKHLQRLIHKRQEKFYIGHIRGHTGLPGPLAQGNAYADSLTRILTAGKRTADGSEFEKRTADGSEFESPKKKAKVE

SEQ ID NO: 3308 - protein, 2022 aa, synthetic construct; identical to SEQ ID NO: 3224

SEQ ID NO: 3309 - protein, 2024 aa, synthetic construct
MPAAKRVKLDGGDKKYSIGLDIGTNSVGWAVITDEYKVPSKKFKVLGNTDRHSIKKNLIGALLFDSGETAEATRLKRTARRRYTRRKNRICYLQEIFSNEMAKVDDSFFHRLEESFLVEEDKKHERHPIFGNIVDEVAYHEKYPTIYHLRKKLVDSTDKADLRLIYLALAHMIKFRGHFLIEGDLNPDNSDVDKLFIQLVQTYNQLFEENPINASGVDAKAILSARLSKSRRLENLIAQLPGEKKNGLFGNLIALSLGLTPNFKSNFDLAEDAKLQLSKDTYDDDLDNLLAQIGDQYADLFLAAKNLSDAILLSDILRVNTEITKAPLSASMIKRYDEHHQDLTLLKALVRQQLPEKYKEIFFDQSKNGYAGYIDGGASQEEFYKFIKPILEKMDGTEELLVKLNREDLLRKQRTFDNGSIPHQIHLGELHAILRRQEDFYPFLKDNREKIEKILTFRIPYYVGPLARGNSRFAWMTRKSEETITPWNFEEVVDKGASAQSFIERMTNFDKNLPNEKVLPKHSLLYEYFTVYNELTKVKYVTEGMRKPAFLSGEQKKAIVDLLFKTNRKVTVKQLKEDYFKKIECFDSVEISGVEDRFNASLGTYHDLLKIIKDKDFLDNEENEDILEDIVLTLTLFEDREMIEERLKTYAHLFDDKVMKQLKRRRYTGWGRLSRKLINGIRDKQSGKTILDFLKSDGFANRNFMQLIHDDSLTFKEDIQKAQVSGQGDSLHEHIANLAGSPAIKKGILQTVKVVDELVKVMGRHKPENIVIEMARENQTTQKGQKNSRERMKRIEEGIKELGSQILKEHPVENTQLQNEKLYLYYLQNGRDMYVDQELDINRLSDYDVDHIVPQSFLKDDSIDNKVLTRSDKARGKSDNVPSEEVVKKMKNYWRQLLNAKLITQRKFDNLTKAERGGLSELDKAGFIKRQLVETRQITKHVAQILDSRMNTKYDENDKLIREVKVITLKSKLVSDFRKDFQFYKVREINNYHHAHDAYLNAVVGTALIKKYPKLESEFVYGDYKVYDVRKMIAKSEQEIGKATAKYFFYSNIMNFFKTEITLANGEIRKRPLIETNGETGEIVWDKGRDFATVRKVLSMPQVNIVKKTEVQTGGFSKESILPKRNSDKLIARKKDWDPKKYGGFDSPTVAYSVLVVAKVEKGKSKKLKSVKELLGITIMERSSFEKNPIDFLEAKGYKEVKKDLIIKLPKYSLFELENGRKRMLASAGELQKGNELALPSKYVNFLYLASHYEKLKGSPEDNEQKQLFVEQHKHYLDEIIEQISEFSKRVILADANLDKVLSAYNKHRDKPIREQAENIIHLFTLTNLGAPAAFKYFDTTIDRKRYTSTKEVLDATLIHQSITGLYETRIDLSQLGGDGGPAPAPAPAPAPGGGRDIMKDIKVRLMTDSPDDSQDLMIGAIESNLFADQISWKSDQPVWLNQWPLKQEKLQALQQLVTEQLQLGHLEESNSPWNTPVFVIKKKSGKWRLLQDLRAVNATMHDMGALQPGLPSPVAVPKGWEIIIIDLQDCFFNIKLHPEDCKRFAFSVPSPNFKRPYQRFQWKVLPQGMKNSPTLCQKFVDKAILTVRDKYQDSYIVHYMDDILLAHPSRSIVDEILTSMIQALNKHGLVVSTEKIQKYDNLKYLGTHIQGDSVSYQKLQIRTDKLRTLNDFQKLLGNINWIRPFLKLTTGELKPLFEILNGDSNPISTRKLTPEACKALQLMNERLSTARVKRLDLSQPWSLCILKTEYTPTACLWQDGVVEWIHLPHISPKVITPYDIFCTQLIIKGRHRSKELFSKDPDYIVVPYTKVQFDLLLQEKEDWPISLLGFLGEVHFHLPKDPLLTFTLQTAIIFPHMTSTTPLEKGIVIFTDGSANGRSVTYIQGREPIIKENTQNTAQQAEIVAVITAFEEVSQPFNLYTDSKYVTGLFPEIETATLSPRTKIYTELKHLQRLIHKRQEKFYIGHIRGHTGLPGPLAQGNAYADSLTRILTAGKRTADGSEFEKRTADGSEFESPKKKAKVE

SEQ ID NO: 3310 - protein, 2024 aa, synthetic construct
MPAAKRVKLDGGDKKYSIGLDIGTNSVGWAVITDEYKVPSKKFKVLGNTDRHSIKKNLIGALLFDSGETAEATRLKRTARRRYTRRKNRICYLQEIFSNEMAKVDDSFFHRLEESFLVEEDKKHERHPIFGNIVDEVAYHEKYPTIYHLRKKLVDSTDKADLRLIYLALAHMIKFRGHFLIEGDLNPDNSDVDKLFIQLVQTYNQLFEENPINASGVDAKAILSARLSKSRRLENLIAQLPGEKKNGLFGNLIALSLGLTPNFKSNFDLAEDAKLQLSKDTYDDDLDNLLAQIGDQYADLFLAAKNLSDAILLSDILRVNTEITKAPLSASMIKRYDEHHQDLTLLKALVRQQLPEKYKEIFFDQSKNGYAGYIDGGASQEEFYKFIKPILEKMDGTEELLVKLNREDLLRKQRTFDNGSIPHQIHLGELHAILRRQEDFYPFLKDNREKIEKILTFRIPYYVGPLARGNSRFAWMTRKSEETITPWNFEEVVDKGASAQSFIERMTNFDKNLPNEKVLPKHSLLYEYFTVYNELTKVKYVTEGMRKPAFLSGEQKKAIVDLLFKTNRKVTVKQLKEDYFKKIECFDSVEISGVEDRFNASLGTYHDLLKIIKDKDFLDNEENEDILEDIVLTLTLFEDREMIEERLKTYAHLFDDKVMKQLKRRRYTGWGRLSRKLINGIRDKQSGKTILDFLKSDGFANRNFMQLIHDDSLTFKEDIQKAQVSGQGDSLHEHIANLAGSPAIKKGILQTVKVVDELVKVMGRHKPENIVIEMARENQTTQKGQKNSRERMKRIEEGIKELGSQILKEHPVENTQLQNEKLYLYYLQNGRDMYVDQELDINRLSDYDVDHIVPQSFLKDDSIDNKVLTRSDKARGKSDNVPSEEVVKKMKNYWRQLLNAKLITQRKFDNLTKAERGGLSELDKAGFIKRQLVETRQITKHVAQILDSRMNTKYDENDKLIREVKVITLKSKLVSDFRKDFQFYKVREINNYHHAHDAYLNAVVGTALIKKYPKLESEFVYGDYKVYDVRKMIAKSEQEIGKATAKYFFYSNIMNFFKTEITLANGEIRKRPLIETNGETGEIVWDKGRDFATVRKVLSMPQVNIVKKTEVQTGGFSKESILPKRNSDKLIARKKDWDPKKYGGFDSPTVAYSVLVVAKVEKGKSKKLKSVKELLGITIMERSSFEKNPIDFLEAKGYKEVKKDLIIKLPKYSLFELENGRKRMLASAGELQKGNELALPSKYVNFLYLASHYEKLKGSPEDNEQKQLFVEQHKHYLDEIIEQISEFSKRVILADANLDKVLSAYNKHRDKPIREQAENIIHLFTLTNLGAPAAFKYFDTTIDRKRYTSTKEVLDATLIHQSITGLYETRIDLSQLGGDGGGSSEAAAKGGSGGGRDIMKDIKVRLMTDSPDDSQDLMIGAIESNLFADQISWKSDQPVWLNQWPLKQEKLQALQQLVTEQLQLGHLEESNSPWNTPVFVIKKKSGKWRLLQDLRAVNATMHDMGALQPGLPSPVAVPKGWEIIIIDLQDCFFNIKLHPEDCKRFAFSVPSPNFKRPYQRFQWKVLPQGMKNSPTLCQKFVDKAILTVRDKYQDSYIVHYMDDILLAHPSRSIVDEILTSMIQALNKHGLVVSTEKIQKYDNLKYLGTHIQGDSVSYQKLQIRTDKLRTLNDFQKLLGNINWIRPFLKLTTGELKPLFEILNGDSNPISTRKLTPEACKALQLMNERLSTARVKRLDLSQPWSLCILKTEYTPTACLWQDGVVEWIHLPHISPKVITPYDIFCTQLIIKGRHRSKELFSKDPDYIVVPYTKVQFDLLLQEKEDWPISLLGFLGEVHFHLPKDPLLTFTLQTAIIFPHMTSTTPLEKGIVIFTDGSANGRSVTYIQGREPIIKENTQNTAQQAEIVAVITAFEEVSQPFNLYTDSKYVTGLFPEIETATLSPRTKIYTELKHLQRLIHKRQEKFYIGHIRGHTGLPGPLAQGNAYADSLTRILTAGKRTADGSEFEKRTADGSEFESPKKKAKVE

SEQ ID NO: 3311 - protein, 2024 aa, synthetic construct
MPAAKRVKLDGGDKKYSIGLDIGTNSVGWAVITDEYKVPSKKFKVLGNTDRHSIKKNLIGALLFDSGETAEATRLKRTARRRYTRRKNRICYLQEIFSNEMAKVDDSFFHRLEESFLVEEDKKHERHPIFGNIVDEVAYHEKYPTIYHLRKKLVDSTDKADLRLIYLALAHMIKFRGHFLIEGDLNPDNSDVDKLFIQLVQTYNQLFEENPINASGVDAKAILSARLSKSRRLENLIAQLPGEKKNGLFGNLIALSLGLTPNFKSNFDLAEDAKLQLSKDTYDDDLDNLLAQIGDQYADLFLAAKNLSDAILLSDILRVNTEITKAPLSASMIKRYDEHHQDLTLLKALVRQQLPEKYKEIFFDQSKNGYAGYIDGGASQEEFYKFIKPILEKMDGTEELLVKLNREDLLRKQRTFDNGSIPHQIHLGELHAILRRQEDFYPFLKDNREKIEKILTFRIPYYVGPLARGNSRFAWMTRKSEETITPWNFEEVVDKGASAQSFIERMTNFDKNLPNEKVLPKHSLLYEYFTVYNELTKVKYVTEGMRKPAFLSGEQKKAIVDLLFKTNRKVTVKQLKEDYFKKIECFDSVEISGVEDRFNASLGTYHDLLKIIKDKDFLDNEENEDILEDIVLTLTLFEDREMIEERLKTYAHLFDDKVMKQLKRRRYTGWGRLSRKLINGIRDKQSGKTILDFLKSDGFANRNFMQLIHDDSLTFKEDIQKAQVSGQGDSLHEHIANLAGSPAIKKGILQTVKVVDELVKVMGRHKPENIVIEMARENQTTQKGQKNSRERMKRIEEGIKELGSQILKEHPVENTQLQNEKLYLYYLQNGRDMYVDQELDINRLSDYDVDHIVPQSFLKDDSIDNKVLTRSDKARGKSDNVPSEEVVKKMKNYWRQLLNAKLITQRKFDNLTKAERGGLSELDKAGFIKRQLVETRQITKHVAQILDSRMNTKYDENDKLIREVKVITLKSKLVSDFRKDFQFYKVREINNYHHAHDAYLNAVVGTALIKKYPKLESEFVYGDYKVYDVRKMIAKSEQEIGKATAKYFFYSNIMNFFKTEITLANGEIRKRPLIETNGETGEIVWDKGRDFATVRKVLSMPQVNIVKKTEVQTGGFSKESILPKRNSDKLIARKKDWDPKKYGGFDSPTVAYSVLVVAKVEKGKSKKLKSVKELLGITIMERSSFEKNPIDFLEAKGYKEVKKDLIIKLPKYSLFELENGRKRMLASAGELQKGNELALPSKYVNFLYLASHYEKLKGSPEDNEQKQLFVEQHKHYLDEIIEQISEFSKRVILADANLDKVLSAYNKHRDKPIREQAENIIHLFTLTNLGAPAAFKYFDTTIDRKRYTSTKEVLDATLIHQSITGLYETRIDLSQLGGDGGGGGGSSEAAAKGGGRDIMKDIKVRLMTDSPDDSQDLMIGAIESNLFADQISWKSDQPVWLNQWPLKQEKLQALQQLVTEQLQLGHLEESNSPWNTPVFVIKKKSGKWRLLQDLRAVNATMHDMGALQPGLPSPVAVPKGWEIIIIDLQDCFFNIKLHPEDCKRFAFSVPSPNFKRPYQRFQWKVLPQGMKNSPTLCQKFVDKAILTVRDKYQDSYIVHYMDDILLAHPSRSIVDEILTSMIQALNKHGLVVSTEKIQKYDNLKYLGTHIQGDSVSYQKLQIRTDKLRTLNDFQKLLGNINWIRPFLKLTTGELKPLFEILNGDSNPISTRKLTPEACKALQLMNERLSTARVKRLDLSQPWSLCILKTEYTPTACLWQDGVVEWIHLPHISPKVITPYDIFCTQLIIKGRHRSKELFSKDPDYIVVPYTKVQFDLLLQEKEDWPISLLGFLGEVHFHLPKDPLLTFTLQTAIIFPHMTSTTPLEKGIVIFTDGSANGRSVTYIQGREPIIKENTQNTAQQAEIVAVITAFEEVSQPFNLYTDSKYVTGLFPEIETATLSPRTKIYTELKHLQRLIHKRQEKFYIGHIRGHTGLPGPLAQGNAYADSLTRILTAGKRTADGSEFEKRTADGSEFESPKKKAKVE

SEQ ID NO: 3312 - protein, 2022 aa, synthetic construct; identical to SEQ ID NO: 3229

SEQ ID NO: 3313 - protein, 2021 aa, synthetic construct; identical to SEQ ID NO: 3208

SEQ ID NO: 3314 - protein, 2024 aa, synthetic construct
MPAAKRVKLDGGDKKYSIGLDIGTNSVGWAVITDEYKVPSKKFKVLGNTDRHSIKKNLIGALLFDSGETAEATRLKRTARRRYTRRKNRICYLQEIFSNEMAKVDDSFFHRLEESFLVEEDKKHERHPIFGNIVDEVAYHEKYPTIYHLRKKLVDSTDKADLRLIYLALAHMIKFRGHFLIEGDLNPDNSDVDKLFIQLVQTYNQLFEENPINASGVDAKAILSARLSKSRRLENLIAQLPGEKKNGLFGNLIALSLGLTPNFKSNFDLAEDAKLQLSKDTYDDDLDNLLAQIGDQYADLFLAAKNLSDAILLSDILRVNTEITKAPLSASMIKRYDEHHQDLTLLKALVRQQLPEKYKEIFFDQSKNGYAGYIDGGASQEEFYKFIKPILEKMDGTEELLVKLNREDLLRKQRTFDNGSIPHQIHLGELHAILRRQEDFYPFLKDNREKIEKILTFRIPYYVGPLARGNSRFAWMTRKSEETITPWNFEEVVDKGASAQSFIERMTNFDKNLPNEKVLPKHSLLYEYFTVYNELTKVKYVTEGMRKPAFLSGEQKKAIVDLLFKTNRKVTVKQLKEDYFKKIECFDSVEISGVEDRFNASLGTYHDLLKIIKDKDFLDNEENEDILEDIVLTLTLFEDREMIEERLKTYAHLFDDKVMKQLKRRRYTGWGRLSRKLINGIRDKQSGKTILDFLKSDGFANRNFMQLIHDDSLTFKEDIQKAQVSGQGDSLHEHIANLAGSPAIKKGILQTVKVVDELVKVMGRHKPENIVIEMARENQTTQKGQKNSRERMKRIEEGIKELGSQILKEHPVENTQLQNEKLYLYYLQNGRDMYVDQELDINRLSDYDVDHIVPQSFLKDDSIDNKVLTRSDKARGKSDNVPSEEVVKKMKNYWRQLLNAKLITQRKFDNLTKAERGGLSELDKAGFIKRQLVETRQITKHVAQILDSRMNTKYDENDKLIREVKVITLKSKLVSDFRKDFQFYKVREINNYHHAHDAYLNAVVGTALIKKYPKLESEFVYGDYKVYDVRKMIAKSEQEIGKATAKYFFYSNIMNFFKTEITLANGEIRKRPLIETNGETGEIVWDKGRDFATVRKVLSMPQVNIVKKTEVQTGGFSKESILPKRNSDKLIARKKDWDPKKYGGFDSPTVAYSVLVVAKVEKGKSKKLKSVKELLGITIMERSSFEKNPIDFLEAKGYKEVKKDLIIKLPKYSLFELENGRKRMLASAGELQKGNELALPSKYVNFLYLASHYEKLKGSPEDNEQKQLFVEQHKHYLDEIIEQISEFSKRVILADANLDKVLSAYNKHRDKPIREQAENIIHLFTLTNLGAPAAFKYFDTTIDRKRYTSTKEVLDATLIHQSITGLYETRIDLSQLGGDGGGSSGGSEAAAKGGGRDIMKDIKVRLMTDSPDDSQDLMIGAIESNLFADQISWKSDQPVWLNQWPLKQEKLQALQQLVTEQLQLGHLEESNSPWNTPVFVIKKKSGKWRLLQDLRAVNATMHDMGALQPGLPSPVAVPKGWEIIIIDLQDCFFNIKLHPEDCKRFAFSVPSPNFKRPYQRFQWKVLPQGMKNSPTLCQKFVDKAILTVRDKYQDSYIVHYMDDILLAHPSRSIVDEILTSMIQALNKHGLVVSTEKIQKYDNLKYLGTHIQGDSVSYQKLQIRTDKLRTLNDFQKLLGNINWIRPFLKLTTGELKPLFEILNGDSNPISTRKLTPEACKALQLMNERLSTARVKRLDLSQPWSLCILKTEYTPTACLWQDGVVEWIHLPHISPKVITPYDIFCTQLIIKGRHRSKELFSKDPDYIVVPYTKVQFDLLLQEKEDWPISLLGFLGEVHFHLPKDPLLTFTLQTAIIFPHMTSTTPLEKGIVIFTDGSANGRSVTYIQGREPIIKENTQNTAQQAEIVAVITAFEEVSQPFNLYTDSKYVTGLFPEIETATLSPRTKIYTELKHLQRLIHKRQEKFYIGHIRGHTGLPGPLAQGNAYADSLTRILTAGKRTADGSEFEKRTADGSEFESPKKKAKVE

SEQ ID NO: 3315 - protein, 2022 aa, synthetic construct; identical to SEQ ID NO: 3199

SEQ ID NO: 3316 - protein, 2022 aa, synthetic construct
MPAAKRVKLDGGDKKYSIGLDIGTNSVGWAVITDEYKVPSKKFKVLGNTDRHSIKKNLIGALLFDSGETAEATRLKRTARRRYTRRKNRICYLQEIFSNEMAKVDDSFFHRLEESFLVEEDKKHERHPIFGNIVDEVAYHEKYPTIYHLRKKLVDSTDKADLRLIYLALAHMIKFRGHFLIEGDLNPDNSDVDKLFIQLVQTYNQLFEENPINASGVDAKAILSARLSKSRRLENLIAQLPGEKKNGLFGNLIALSLGLTPNFKSNFDLAEDAKLQLSKDTYDDDLDNLLAQIGDQYADLFLAAKNLSDAILLSDILRVNTEITKAPLSASMIKRYDEHHQDLTLLKALVRQQLPEKYKEIFFDQSKNGYAGYIDGGASQEEFYKFIKPILEKMDGTEELLVKLNREDLLRKQRTFDNGSIPHQIHLGELHAILRRQEDFYPFLKDNREKIEKILTFRIPYYVGPLARGNSRFAWMTRKSEETITPWNFEEVVDKGASAQSFIERMTNFDKNLPNEKVLPKHSLLYEYFTVYNELTKVKYVTEGMRKPAFLSGEQKKAIVDLLFKTNRKVTVKQLKEDYFKKIECFDSVEISGVEDRFNASLGTYHDLLKIIKDKDFLDNEENEDILEDIVLTLTLFEDREMIEERLKTYAHLFDDKVMKQLKRRRYTGWGRLSRKLINGIRDKQSGKTILDFLKSDGFANRNFMQLIHDDSLTFKEDIQKAQVSGQGDSLHEHIANLAGSPAIKKGILQTVKVVDELVKVMGRHKPENIVIEMARENQTTQKGQKNSRERMKRIEEGIKELGSQILKEHPVENTQLQNEKLYLYYLQNGRDMYVDQELDINRLSDYDVDHIVPQSFLKDDSIDNKVLTRSDKARGKSDNVPSEEVVKKMKNYWRQLLNAKLITQRKFDNLTKAERGGLSELDKAGFIKRQLVETRQITKHVAQILDSRMNTKYDENDKLIREVKVITLKSKLVSDFRKDFQFYKVREINNYHHAHDAYLNAVVGTALIKKYPKLESEFVYGDYKVYDVRKMIAKSEQEIGKATAKYFFYSNIMNFFKTEITLANGEIRKRPLIETNGETGEIVWDKGRDFATVRKVLSMPQVNIVKKTEVQTGGFSKESILPKRNSDKLIARKKDWDPKKYGGFDSPTVAYSVLVVAKVEKGKSKKLKSVKELLGITIMERSSFEKNPIDFLEAKGYKEVKKDLIIKLPKYSLFELENGRKRMLASAGELQKGNELALPSKYVNFLYLASHYEKLKGSPEDNEQKQLFVEQHKHYLDEIIEQISEFSKRVILADANLDKVLSAYNKHRDKPIREQAENIIHLFTLTNLGAPAAFKYFDTTIDRKRYTSTKEVLDATLIHQSITGLYETRIDLSQLGGDGGGGSGGSGGSGGGRDIMKDIKVRLMTDSPDDSQDLMIGAIESNLFADQISWKSDQPVWLNQWPLKQEKLQALQQLVTEQLQLGHLEESNSPWNTPVFVIKKKSGKWRLLQDLRAVNATMHDMGALQPGLPSPVAVPKGWEIIIIDLQDCFFNIKLHPEDCKRFAFSVPSPNFKRPYQRFQWKVLPQGMKNSPTLCQKFVDKAILTVRDKYQDSYIVHYMDDILLAHPSRSIVDEILTSMIQALNKHGLVVSTEKIQKYDNLKYLGTHIQGDSVSYQKLQIRTDKLRTLNDFQKLLGNINWIRPFLKLTTGELKPLFEILNGDSNPISTRKLTPEACKALQLMNERLSTARVKRLDLSQPWSLCILKTEYTPTACLWQDGVVEWIHLPHISPKVITPYDIFCTQLIIKGRHRSKELFSKDPDYIVVPYTKVQFDLLLQEKEDWPISLLGFLGEVHFHLPKDPLLTFTLQTAIIFPHMTSTTPLEKGIVIFTDGSANGRSVTYIQGREPIIKENTQNTAQQAEIVAVITAFEEVSQPFNLYTDSKYVTGLFPEIETATLSPRTKIYTELKHLQRLIHKRQEKFYIGHIRGHTGLPGPLAQGNAYADSLTRILTAGKRTADGSEFEKRTADGSEFESPKKKAKVE

SEQ ID NO: 3317 - protein, 2025 aa, synthetic construct
MPAAKRVKLDGGDKKYSIGLDIGTNSVGWAVITDEYKVPSKKFKVLGNTDRHSIKKNLIGALLFDSGETAEATRLKRTARRRYTRRKNRICYLQEIFSNEMAKVDDSFFHRLEESFLVEEDKKHERHPIFGNIVDEVAYHEKYPTIYHLRKKLVDSTDKADLRLIYLALAHMIKFRGHFLIEGDLNPDNSDVDKLFIQLVQTYNQLFEENPINASGVDAKAILSARLSKSRRLENLIAQLPGEKKNGLFGNLIALSLGLTPNFKSNFDLAEDAKLQLSKDTYDDDLDNLLAQIGDQYADLFLAAKNLSDAILLSDILRVNTEITKAPLSASMIKRYDEHHQDLTLLKALVRQQLPEKYKEIFFDQSKNGYAGYIDGGASQEEFYKFIKPILEKMDGTEELLVKLNREDLLRKQRTFDNGSIPHQIHLGELHAILRRQEDFYPFLKDNREKIEKILTFRIPYYVGPLARGNSRFAWMTRKSEETITPWNFEEVVDKGASAQSFIERMTNFDKNLPNEKVLPKHSLLYEYFTVYNELTKVKYVTEGMRKPAFLSGEQKKAIVDLLFKTNRKVTVKQLKEDYFKKIECFDSVEISGVEDRFNASLGTYHDLLKIIKDKDFLDNEENEDILEDIVLTLTLFEDREMIEERLKTYAHLFDDKVMKQLKRRRYTGWGRLSRKLINGIRDKQSGKTILDFLKSDGFANRNFMQLIHDDSLTFKEDIQKAQVSGQGDSLHEHIANLAGSPAIKKGILQTVKVVDELVKVMGRHKPENIVIEMARENQTTQKGQKNSRERMKRIEEGIKELGSQILKEHPVENTQLQNEKLYLYYLQNGRDMYVDQELDINRLSDYDVDHIVPQSFLKDDSIDNKVLTRSDKARGKSDNVPSEEVVKKMKNYWRQLLNAKLITQRKFDNLTKAERGGLSELDKAGFIKRQLVETRQITKHVAQILDSRMNTKYDENDKLIREVKVITLKSKLVSDFRKDFQFYKVREINNYHHAHDAYLNAVVGTALIKKYPKLESEFVYGDYKVYDVRKMIAKSEQEIGKATAKYFFYSNIMNFFKTEITLANGEIRKRPLIETNGETGEIVWDKGRDFATVRKVLSMPQVNIVKKTEVQTGGFSKESILPKRNSDKLIARKKDWDPKKYGGFDSPTVAYSVLVVAKVEKGKSKKLKSVKELLGITIMERSSFEKNPIDFLEAKGYKEVKKDLIIKLPKYSLFELENGRKRMLASAGELQKGNELALPSKYVNFLYLASHYEKLKGSPEDNEQKQLFVEQHKHYLDEIIEQISEFSKRVILADANLDKVLSAYNKHRDKPIREQAENIIHLFTLTNLGAPAAFKYFDTTIDRKRYTSTKEVLDATLIHQSITGLYETRIDLSQLGGDGGGGSGGSGGSGGSGGGRDIMKDIKVRLMTDSPDDSQDLMIGAIESNLFADQISWKSDQPVWLNQWPLKQEKLQALQQLVTEQLQLGHLEESNSPWNTPVFVIKKKSGKWRLLQDLRAVNATMHDMGALQPGLPSPVAVPKGWEIIIIDLQDCFFNIKLHPEDCKRFAFSVPSPNFKRPYQRFQWKVLPQGMKNSPTLCQKFVDKAILTVRDKYQDSYIVHYMDDILLAHPSRSIVDEILTSMIQALNKHGLVVSTEKIQKYDNLKYLGTHIQGDSVSYQKLQIRTDKLRTLNDFQKLLGNINWIRPFLKLTTGELKPLFEILNGDSNPISTRKLTPEACKALQLMNERLSTARVKRLDLSQPWSLCILKTEYTPTACLWQDGVVEWIHLPHISPKVITPYDIFCTQLIIKGRHRSKELFSKDPDYIVVPYTKVQFDLLLQEKEDWPISLLGFLGEVHFHLPKDPLLTFTLQTAIIFPHMTSTTPLEKGIVIFTDGSANGRSVTYIQGREPIIKENTQNTAQQAEIVAVITAFEEVSQPFNLYTDSKYVTGLFPEIETATLSPRTKIYTELKHLQRLIHKRQEKFYIGHIRGHTGLPGPLAQGNAYADSLTRILTAGKRTADGSEFEKRTADGSEFESPKKKAKVE

SEQ ID NO: 3318 - protein, 2024 aa, synthetic construct; identical to SEQ ID NO: 3207

SEQ ID NO: 3319 - protein, 2016 aa, synthetic construct; identical to SEQ ID NO: 3210

SEQ ID NO: 3320 - protein, 2024 aa, synthetic construct
MPAAKRVKLDGGDKKYSIGLDIGTNSVGWAVITDEYKVPSKKFKVLGNTDRHSIKKNLIGALLFDSGETAEATRLKRTARRRYTRRKNRICYLQEIFSNEMAKVDDSFFHRLEESFLVEEDKKHERHPIFGNIVDEVAYHEKYPTIYHLRKKLVDSTDKADLRLIYLALAHMIKFRGHFLIEGDLNPDNSDVDKLFIQLVQTYNQLFEENPINASGVDAKAILSARLSKSRRLENLIAQLPGEKKNGLFGNLIALSLGLTPNFKSNFDLAEDAKLQLSKDTYDDDLDNLLAQIGDQYADLFLAAKNLSDAILLSDILRVNTEITKAPLSASMIKRYDEHHQDLTLLKALVRQQLPEKYKEIFFDQSKNGYAGYIDGGASQEEFYKFIKPILEKMDGTEELLVKLNREDLLRKQRTFDNGSIPHQIHLGELHAILRRQEDFYPFLKDNREKIEKILTFRIPYYVGPLARGNSRFAWMTRKSEETITPWNFEEVVDKGASAQSFIERMTNFDKNLPNEKVLPKHSLLYEYFTVYNELTKVKYVTEGMRKPAFLSGEQKKAIVDLLFKTNRKVTVKQLKEDYFKKIECFDSVEISGVEDRFNASLGTYHDLLKIIKDKDFLDNEENEDILEDIVLTLTLFEDREMIEERLKTYAHLFDDKVMKQLKRRRYTGWGRLSRKLINGIRDKQSGKTILDFLKSDGFANRNFMQLIHDDSLTFKEDIQKAQVSGQGDSLHEHIANLAGSPAIKKGILQTVKVVDELVKVMGRHKPENIVIEMARENQTTQKGQKNSRERMKRIEEGIKELGSQILKEHPVENTQLQNEKLYLYYLQNGRDMYVDQELDINRLSDYDVDHIVPQSFLKDDSIDNKVLTRSDKARGKSDNVPSEEVVKKMKNYWRQLLNAKLITQRKFDNLTKAERGGLSELDKAGFIKRQLVETRQITKHVAQILDSRMNTKYDENDKLIREVKVITLKSKLVSDFRKDFQFYKVREINNYHHAHDAYLNAVVGTALIKKYPKLESEFVYGDYKVYDVRKMIAKSEQEIGKATAKYFFYSNIMNFFKTEITLANGEIRKRPLIETNGETGEIVWDKGRDFATVRKVLSMPQVNIVKKTEVQTGGFSKESILPKRNSDKLIARKKDWDPKKYGGFDSPTVAYSVLVVAKVEKGKSKKLKSVKELLGITIMERSSFEKNPIDFLEAKGYKEVKKDLIIKLPKYSLFELENGRKRMLASAGELQKGNELALPSKYVNFLYLASHYEKLKGSPEDNEQKQLFVEQHKHYLDEIIEQISEFSKRVILADANLDKVLSAYNKHRDKPIREQAENIIHLFTLTNLGAPAAFKYFDTTIDRKRYTSTKEVLDATLIHQSITGLYETRIDLSQLGGDGGGGSPAPEAAAKGGGRDIMKDIKVRLMTDSPDDSQDLMIGAIESNLFADQISWKSDQPVWLNQWPLKQEKLQALQQLVTEQLQLGHLEESNSPWNTPVFVIKKKSGKWRLLQDLRAVNATMHDMGALQPGLPSPVAVPKGWEIIIIDLQDCFFNIKLHPEDCKRFAFSVPSPNFKRPYQRFQWKVLPQGMKNSPTLCQKFVDKAILTVRDKYQDSYIVHYMDDILLAHPSRSIVDEILTSMIQALNKHGLVVSTEKIQKYDNLKYLGTHIQGDSVSYQKLQIRTDKLRTLNDFQKLLGNINWIRPFLKLTTGELKPLFEILNGDSNPISTRKLTPEACKALQLMNERLSTARVKRLDLSQPWSLCILKTEYTPTACLWQDGVVEWIHLPHISPKVITPYDIFCTQLIIKGRHRSKELFSKDPDYIVVPYTKVQFDLLLQEKEDWPISLLGFLGEVHFHLPKDPLLTFTLQTAIIFPHMTSTTPLEKGIVIFTDGSANGRSVTYIQGREPIIKENTQNTAQQAEIVAVITAFEEVSQPFNLYTDSKYVTGLFPEIETATLSPRTKIYTELKHLQRLIHKRQEKFYIGHIRGHTGLPGPLAQGNAYADSLTRILTAGKRTADGSEFEKRTADGSEFESPKKKAKVE

SEQ ID NO: 3321 - protein, 2022 aa, synthetic construct; identical to SEQ ID NO: 3215

SEQ ID NO: 3322 - protein, 2024 aa, synthetic construct; identical to SEQ ID NO: 3232

SEQ ID NO: 3323 - protein, 2024 aa, synthetic construct; identical to SEQ ID NO: 3235

SEQ ID NO: 3324 - protein, 2024 aa, synthetic construct; identical to SEQ ID NO: 3236

SEQ ID NO: 3325 - protein, 2024 aa, synthetic construct
MPAAKRVKLDGGDKKYSIGLDIGTNSVGWAVITDEYKVPSKKFKVLGNTDRHSIKKNLIGALLFDSGETAEATRLKRTARRRYTRRKNRICYLQEIFSNEMAKVDDSFFHRLEESFLVEEDKKHERHPIFGNIVDEVAYHEKYPTIYHLRKKLVDSTDKADLRLIYLALAHMIKFRGHFLIEGDLNPDNSDVDKLFIQLVQTYNQLFEENPINASGVDAKAILSARLSKSRRLENLIAQLPGEKKNGLFGNLIALSLGLTPNFKSNFDLAEDAKLQLSKDTYDDDLDNLLAQIGDQYADLFLAAKNLSDAILLSDILRVNTEITKAPLSASMIKRYDEHHQDLTLLKALVRQQLPEKYKEIFFDQSKNGYAGYIDGGASQEEFYKFIKPILEKMDGTEELLVKLNREDLLRKQRTFDNGSIPHQIHLGELHAILRRQEDFYPFLKDNREKIEKILTFRIPYYVGPLARGNSRFAWMTRKSEETITPWNFEEVVDKGASAQSFIERMTNFDKNLPNEKVLPKHSLLYEYFTVYNELTKVKYVTEGMRKPAFLSGEQKKAIVDLLFKTNRKVTVKQLKEDYFKKIECFDSVEISGVEDRFNASLGTYHDLLKIIKDKDFLDNEENEDILEDIVLTLTLFEDREMIEERLKTYAHLFDDKVMKQLKRRRYTGWGRLSRKLINGIRDKQSGKTILDFLKSDGFANRNFMQLIHDDSLTFKEDIQKAQVSGQGDSLHEHIANLAGSPAIKKGILQTVKVVDELVKVMGRHKPENIVIEMARENQTTQKGQKNSRERMKRIEEGIKELGSQILKEHPVENTQLQNEKLYLYYLQNGRDMYVDQELDINRLSDYDVDHIVPQSFLKDDSIDNKVLTRSDKARGKSDNVPSEEVVKKMKNYWRQLLNAKLITQRKFDNLTKAERGGLSELDKAGFIKRQLVETRQITKHVAQILDSRMNTKYDENDKLIREVKVITLKSKLVSDFRKDFQFYKVREINNYHHAHDAYLNAVVGTALIKKYPKLESEFVYGDYKVYDVRKMIAKSEQEIGKATAKYFFYSNIMNFFKTEITLANGEIRKRPLIETNGETGEIVWDKGRDFATVRKVLSMPQVNIVKKTEVQTGGFSKESILPKRNSDKLIARKKDWDPKKYGGFDSPTVAYSVLVVAKVEKGKSKKLKSVKELLGITIMERSSFEKNPIDFLEAKGYKEVKKDLIIKLPKYSLFELENGRKRMLASAGELQKGNELALPSKYVNFLYLASHYEKLKGSPEDNEQKQLFVEQHKHYLDEIIEQISEFSKRVILADANLDKVLSAYNKHRDKPIREQAENIIHLFTLTNLGAPAAFKYFDTTIDRKRYTSTKEVLDATLIHQSITGLYETRIDLSQLGGDGGGGGGGSEAAAKGGGRDIMKDIKVRLMTDSPDDSQDLMIGAIESNLFADQISWKSDQPVWLNQWPLKQEKLQALQQLVTEQLQLGHLEESNSPWNTPVFVIKKKSGKWRLLQDLRAVNATMHDMGALQPGLPSPVAVPKGWEIIIIDLQDCFFNIKLHPEDCKRFAFSVPSPNFKRPYQRFQWKVLPQGMKNSPTLCQKFVDKAILTVRDKYQDSYIVHYMDDILLAHPSRSIVDEILTSMIQALNKHGLVVSTEKIQKYDNLKYLGTHIQGDSVSYQKLQIRTDKLRTLNDFQKLLGNINWIRPFLKLTTGELKPLFEILNGDSNPISTRKLTPEACKALQLMNERLSTARVKRLDLSQPWSLCILKTEYTPTACLWQDGVVEWIHLPHISPKVITPYDIFCTQLIIKGRHRSKELFSKDPDYIVVPYTKVQFDLLLQEKEDWPISLLGFLGEVHFHLPKDPLLTFTLQTAIIFPHMTSTTPLEKGIVIFTDGSANGRSVTYIQGREPIIKENTQNTAQQAEIVAVITAFEEVSQPFNLYTDSKYVTGLFPEIETATLSPRTKIYTELKHLQRLIHKRQEKFYIGHIRGHTGLPGPLAQGNAYADSLTRILTAGKRTADGSEFEKRTADGSEFESPKKKAKVE

SEQ ID NO: 3326 - protein, 2024 aa, synthetic construct
MPAAKRVKLDGGDKKYSIGLDIGTNSVGWAVITDEYKVPSKKFKVLGNTDRHSIKKNLIGALLFDSGETAEATRLKRTARRRYTRRKNRICYLQEIFSNEMAKVDDSFFHRLEESFLVEEDKKHERHPIFGNIVDEVAYHEKYPTIYHLRKKLVDSTDKADLRLIYLALAHMIKFRGHFLIEGDLNPDNSDVDKLFIQLVQTYNQLFEENPINASGVDAKAILSARLSKSRRLENLIAQLPGEKKNGLFGNLIALSLGLTPNFKSNFDLAEDAKLQLSKDTYDDDLDNLLAQIGDQYADLFLAAKNLSDAILLSDILRVNTEITKAPLSASMIKRYDEHHQDLTLLKALVRQQLPEKYKEIFFDQSKNGYAGYIDGGASQEEFYKFIKPILEKMDGTEELLVKLNREDLLRKQRTFDNGSIPHQIHLGELHAILRRQEDFYPFLKDNREKIEKILTFRIPYYVGPLARGNSRFAWMTRKSEETITPWNFEEVVDKGASAQSFIERMTNFDKNLPNEKVLPKHSLLYEYFTVYNELTKVKYVTEGMRKPAFLSGEQKKAIVDLLFKTNRKVTVKQLKEDYFKKIECFDSVEISGVEDRFNASLGTYHDLLKIIKDKDFLDNEENEDILEDIVLTLTLFEDREMIEERLKTYAHLFDDKVMKQLKRRRYTGWGRLSRKLINGIRDKQSGKTILDFLKSDGFANRNFMQLIHDDSLTFKEDIQKAQVSGQGDSLHEHIANLAGSPAIKKGILQTVKVVDELVKVMGRHKPENIVIEMARENQTTQKGQKNSRERMKRIEEGIKELGSQILKEHPVENTQLQNEKLYLYYLQNGRDMYVDQELDINRLSDYDVDHIVPQSFLKDDSIDNKVLTRSDKARGKSDNVPSEEVVKKMKNYWRQLLNAKLITQRKFDNLTKAERGGLSELDKAGFIKRQLVETRQITKHVAQILDSRMNTKYDENDKLIREVKVITLKSKLVSDFRKDFQFYKVREINNYHHAHDAYLNAVVGTALIKKYPKLESEFVYGDYKVYDVRKMIAKSEQEIGKATAKYFFYSNIMNFFKTEITLANGEIRKRPLIETNGETGEIVWDKGRDFATVRKVLSMPQVNIVKKTEVQTGGFSKESILPKRNSDKLIARKKDWDPKKYGGFDSPTVAYSVLVVAKVEKGKSKKLKSVKELLGITIMERSSFEKNPIDFLEAKGYKEVKKDLIIKLPKYSLFELENGRKRMLASAGELQKGNELALPSKYVNFLYLASHYEKLKGSPEDNEQKQLFVEQHKHYLDEIIEQISEFSKRVILADANLDKVLSAYNKHRDKPIREQAENIIHLFTLTNLGAPAAFKYFDTTIDRKRYTSTKEVLDATLIHQSITGLYETRIDLSQLGGDGGGGSEAAAKGSSGGGRDIMKDIKVRLMTDSPDDSQDLMIGAIESNLFADQISWKSDQPVWLNQWPLKQEKLQALQQLVTEQLQLGHLEESNSPWNTPVFVIKKKSGKWRLLQDLRAVNATMHDMGALQPGLPSPVAVPKGWEIIIIDLQDCFFNIKLHPEDCKRFAFSVPSPNFKRPYQRFQWKVLPQGMKNSPTLCQKFVDKAILTVRDKYQDSYIVHYMDDILLAHPSRSIVDEILTSMIQALNKHGLVVSTEKIQKYDNLKYLGTHIQGDSVSYQKLQIRTDKLRTLNDFQKLLGNINWIRPFLKLTTGELKPLFEILNGDSNPISTRKLTPEACKALQLMNERLSTARVKRLDLSQPWSLCILKTEYTPTACLWQDGVVEWIHLPHISPKVITPYDIFCTQLIIKGRHRSKELFSKDPDYIVVPYTKVQFDLLLQEKEDWPISLLGFLGEVHFHLPKDPLLTFTLQTAIIFPHMTSTTPLEKGIVIFTDGSANGRSVTYIQGREPIIKENTQNTAQQAEIVAVITAFEEVSQPFNLYTDSKYVTGLFPEIETATLSPRTKIYTELKHLQRLIHKRQEKFYIGHIRGHTGLPGPLAQGNAYADSLTRILTAGKRTADGSEFEKRTADGSEFESPKKKAKVE

SEQ ID NO: 3327 - protein, 2018 aa, synthetic construct
MPAAKRVKLDGGDKKYSIGLDIGTNSVGWAVITDEYKVPSKKFKVLGNTDRHSIKKNLIGALLFDSGETAEATRLKRTARRRYTRRKNRICYLQEIFSNEMAKVDDSFFHRLEESFLVEEDKKHERHPIFGNIVDEVAYHEKYPTIYHLRKKLVDSTDKADLRLIYLALAHMIKFRGHFLIEGDLNPDNSDVDKLFIQLVQTYNQLFEENPINASGVDAKAILSARLSKSRRLENLIAQLPGEKKNGLFGNLIALSLGLTPNFKSNFDLAEDAKLQLSKDTYDDDLDNLLAQIGDQYADLFLAAKNLSDAILLSDILRVNTEITKAPLSASMIKRYDEHHQDLTLLKALVRQQLPEKYKEIFFDQSKNGYAGYIDGGASQEEFYKFIKPILEKMDGTEELLVKLNREDLLRKQRTFDNGSIPHQIHLGELHAILRRQEDFYPFLKDNREKIEKILTFRIPYYVGPLARGNSRFAWMTRKSEETITPWNFEEVVDKGASAQSFIERMTNFDKNLPNEKVLPKHSLLYEYFTVYNELTKVKYVTEGMRKPAFLSGEQKKAIVDLLFKTNRKVTVKQLKEDYFKKIECFDSVEISGVEDRFNASLGTYHDLLKIIKDKDFLDNEENEDILEDIVLTLTLFEDREMIEERLKTYAHLFDDKVMKQLKRRRYTGWGRLSRKLINGIRDKQSGKTILDFLKSDGFANRNFMQLIHDDSLTFKEDIQKAQVSGQGDSLHEHIANLAGSPAIKKGILQTVKVVDELVKVMGRHKPENIVIEMARENQTTQKGQKNSRERMKRIEEGIKELGSQILKEHPVENTQLQNEKLYLYYLQNGRDMYVDQELDINRLSDYDVDHIVPQSFLKDDSIDNKVLTRSDKARGKSDNVPSEEVVKKMKNYWRQLLNAKLITQRKFDNLTKAERGGLSELDKAGFIKRQLVETRQITKHVAQILDSRMNTKYDENDKLIREVKVITLKSKLVSDFRKDFQFYKVREINNYHHAHDAYLNAVVGTALIKKYPKLESEFVYGDYKVYDVRKMIAKSEQEIGKATAKYFFYSNIMNFFKTEITLANGEIRKRPLIETNGETGEIVWDKGRDFATVRKVLSMPQVNIVKKTEVQTGGFSKESILPKRNSDKLIARKKDWDPKKYGGFDSPTVAYSVLVVAKVEKGKSKKLKSVKELLGITIMERSSFEKNPIDFLEAKGYKEVKKDLIIKLPKYSLFELENGRKRMLASAGELQKGNELALPSKYVNFLYLASHYEKLKGSPEDNEQKQLFVEQHKHYLDEIIEQISEFSKRVILADANLDKVLSAYNKHRDKPIREQAENIIHLFTLTNLGAPAAFKYFDTTIDRKRYTSTKEVLDATLIHQSITGLYETRIDLSQLGGDGGPAPAPGGGRDIMKDIKVRLMTDSPDDSQDLMIGAIESNLFADQISWKSDQPVWLNQWPLKQEKLQALQQLVTEQLQLGHLEESNSPWNTPVFVIKKKSGKWRLLQDLRAVNATMHDMGALQPGLPSPVAVPKGWEIIIIDLQDCFFNIKLHPEDCKRFAFSVPSPNFKRPYQRFQWKVLPQGMKNSPTLCQKFVDKAILTVRDKYQDSYIVHYMDDILLAHPSRSIVDEILTSMIQALNKHGLVVSTEKIQKYDNLKYLGTHIQGDSVSYQKLQIRTDKLRTLNDFQKLLGNINWIRPFLKLTTGELKPLFEILNPDSNPISTRKLTPEACKALQLMNERLSTARVKRLDLSQPWSLCILKTEYTPTACLWQDGVVEWIHLPHISPKVITPYDIFCTQLIIKGRHRSKELFSKDPDYIVVPYTKVQFDLLLQEKEDWPISLLGFLGEVHFHLPKDPLLTFTLQTAIIFPHMTSTTPLEKGIVIFTDGSANGRSVTYIQGREPIIKENTQNTAQQAEIVAVITAFEEVSQPFNLYTDSKYVTGLFPEIETATLSPRTKIYTELKHLQRLIHKRQEKFYIGHIRGHTGLPGPLAQGNAYADSLTRILTAGKRTADGSEFEKRTADGSEFESPKKKAKVE

SEQ ID NO: 3328 - protein, 2028 aa, synthetic construct
MPAAKRVKLDGGDKKYSIGLDIGTNSVGWAVITDEYKVPSKKFKVLGNTDRHSIKKNLIGALLFDSGETAEATRLKRTARRRYTRRKNRICYLQEIFSNEMAKVDDSFFHRLEESFLVEEDKKHERHPIFGNIVDEVAYHEKYPTIYHLRKKLVDSTDKADLRLIYLALAHMIKFRGHFLIEGDLNPDNSDVDKLFIQLVQTYNQLFEENPINASGVDAKAILSARLSKSRRLENLIAQLPGEKKNGLFGNLIALSLGLTPNFKSNFDLAEDAKLQLSKDTYDDDLDNLLAQIGDQYADLFLAAKNLSDAILLSDILRVNTEITKAPLSASMIKRYDEHHQDLTLLKALVRQQLPEKYKEIFFDQSKNGYAGYIDGGASQEEFYKFIKPILEKMDGTEELLVKLNREDLLRKQRTFDNGSIPHQIHLGELHAILRRQEDFYPFLKDNREKIEKILTFRIPYYVGPLARGNSRFAWMTRKSEETITPWNFEEVVDKGASAQSFIERMTNFDKNLPNEKVLPKHSLLYEYFTVYNELTKVKYVTEGMRKPAFLSGEQKKAIVDLLFKTNRKVTVKQLKEDYFKKIECFDSVEISGVEDRFNASLGTYHDLLKIIKDKDFLDNEENEDILEDIVLTLTLFEDREMIEERLKTYAHLFDDKVMKQLKRRRYTGWGRLSRKLINGIRDKQSGKTILDFLKSDGFANRNFMQLIHDDSLTFKEDIQKAQVSGQGDSLHEHIANLAGSPAIKKGILQTVKVVDELVKVMGRHKPENIVIEMARENQTTQKGQKNSRERMKRIEEGIKELGSQILKEHPVENTQLQNEKLYLYYLQNGRDMYVDQELDINRLSDYDVDHIVPQSFLKDDSIDNKVLTRSDKARGKSDNVPSEEVVKKMKNYWRQLLNAKLITQRKFDNLTKAERGGLSELDKAGFIKRQLVETRQITKHVAQILDSRMNTKYDENDKLIREVKVITLKSKLVSDFRKDFQFYKVREINNYHHAHDAYLNAVVGTALIKKYPKLESEFVYGDYKVYDVRKMIAKSEQEIGKATAKYFFYSNIMNFFKTEITLANGEIRKRPLIETNGETGEIVWDKGRDFATVRKVLSMPQVNIVKKTEVQTGGFSKESILPKRNSDKLIARKKDWDPKKYGGFDSPTVAYSVLVVAKVEKGKSKKLKSVKELLGITIMERSSFEKNPIDFLEAKGYKEVKKDLIIKLPKYSLFELENGRKRMLASAGELQKGNELALPSKYVNFLYLASHYEKLKGSPEDNEQKQLFVEQHKHYLDEIIEQISEFSKRVILADANLDKVLSAYNKHRDKPIREQAENIIHLFTLTNLGAPAAFKYFDTTIDRKRYTSTKEVLDATLIHQSITGLYETRIDLSQLGGDGGGGGGSEAAAKGGGGSGGGRDIMKDIKVRLMTDSPDDSQDLMIGAIESNLFADQISWKSDQPVWLNQWPLKQEKLQALQQLVTEQLQLGHLEESNSPWNTPVFVIKKKSGKWRLLQDLRAVNATMHDMGALQPGLPSPVAVPKGWEIIIIDLQDCFFNIKLHPEDCKRFAFSVPSPNFKRPYQRFQWKVLPQGMKNSPTLCQKFVDKAILTVRDKYQDSYIVHYMDDILLAHPSRSIVDEILTSMIQALNKHGLVVSTEKIQKYDNLKYLGTHIQGDSVSYQKLQIRTDKLRTLNDFQKLLGNINWIRPFLKLTTGELKPLFEILNPDSNPISTRKLTPEACKALQLMNERLSTARVKRLDLSQPWSLCILKTEYTPTACLWQDGVVEWIHLPHISPKVITPYDIFCTQLIIKGRHRSKELFSKDPDYIVVPYTKVQFDLLLQEKEDWPISLLGFLGEVHFHLPKDPLLTFTLQTAIIFPHMTSTTPLEKGIVIFTDGSANGRSVTYIQGREPIIKENTQNTAQQAEIVAVITAFEEVSQPFNLYTDSKYVTGLFPEIETATLSPRTKIYTELKHLQRLIHKRQEKFYIGHIRGHTGLPGPLAQGNAYADSLTRILTAGKRTADGSEFEKRTADGSEFESPKKKAKVE

SEQ ID NO: 3329 - protein, 2022 aa, synthetic construct
MPAAKRVKLDGGDKKYSIGLDIGTNSVGWAVITDEYKVPSKKFKVLGNTDRHSIKKNLIGALLFDSGETAEATRLKRTARRRYTRRKNRICYLQEIFSNEMAKVDDSFFHRLEESFLVEEDKKHERHPIFGNIVDEVAYHEKYPTIYHLRKKLVDSTDKADLRLIYLALAHMIKFRGHFLIEGDLNPDNSDVDKLFIQLVQTYNQLFEENPINASGVDAKAILSARLSKSRRLENLIAQLPGEKKNGLFGNLIALSLGLTPNFKSNFDLAEDAKLQLSKDTYDDDLDNLLAQIGDQYADLFLAAKNLSDAILLSDILRVNTEITKAPLSASMIKRYDEHHQDLTLLKALVRQQLPEKYKEIFFDQSKNGYAGYIDGGASQEEFYKFIKPILEKMDGTEELLVKLNREDLLRKQRTFDNGSIPHQIHLGELHAILRRQEDFYPFLKDNREKIEKILTFRIPYYVGPLARGNSRFAWMTRKSEETITPWNFEEVVDKGASAQSFIERMTNFDKNLPNEKVLPKHSLLYEYFTVYNELTKVKYVTEGMRKPAFLSGEQKKAIVDLLFKTNRKVTVKQLKEDYFKKIECFDSVEISGVEDRFNASLGTYHDLLKIIKDKDFLDNEENEDILEDIVLTLTLFEDREMIEERLKTYAHLFDDKVMKQLKRRRYTGWGRLSRKLINGIRDKQSGKTILDFLKSDGFANRNFMQLIHDDSLTFKEDIQKAQVSGQGDSLHEHIANLAGSPAIKKGILQTVKVVDELVKVMGRHKPENIVIEMARENQTTQKGQKNSRERMKRIEEGIKELGSQILKEHPVENTQLQNEKLYLYYLQNGRDMYVDQELDINRLSDYDVDHIVPQSFLKDDSIDNKVLTRSDKARGKSDNVPSEEVVKKMKNYWRQLLNAKLITQRKFDNLTKAERGGLSELDKAGFIKRQLVETRQITKHVAQILDSRMNTKYDENDKLIREVKVITLKSKLVSDFRKDFQFYKVREINNYHHAHDAYLNAVVGTALIKKYPKLESEFVYGDYKVYDVRKMIAKSEQEIGKATAKYFFYSNIMNFFKTEITLANGEIRKRPLIETNGETGEIVWDKGRDFATVRKVLSMPQVNIVKKTEVQTGGFSKESILPKRNSDKLIARKKDWDPKKYGGFDSPTVAYSVLVVAKVEKGKSKKLKSVKELLGITIMERSSFEKNPIDFLEAKGYKEVKKDLIIKLPKYSLFELENGRKRMLASAGELQKGNELALPSKYVNFLYLASHYEKLKGSPEDNEQKQLFVEQHKHYLDEIIEQISEFSKRVILADANLDKVLSAYNKHRDKPIREQAENIIHLFTLTNLGAPAAFKYFDTTIDRKRYTSTKEVLDATLIHQSITGLYETRIDLSQLGGDGGGGSGGGGSSGGGRDIMKDIKVRLMTDSPDDSQDLMIGAIESNLFADQISWKSDQPVWLNQWPLKQEKLQALQQLVTEQLQLGHLEESNSPWNTPVFVIKKKSGKWRLLQDLRAVNATMHDMGALQPGLPSPVAVPKGWEIIIIDLQDCFFNIKLHPEDCKRFAFSVPSPNFKRPYQRFQWKVLPQGMKNSPTLCQKFVDKAILTVRDKYQDSYIVHYMDDILLAHPSRSIVDEILTSMIQALNKHGLVVSTEKIQKYDNLKYLGTHIQGDSVSYQKLQIRTDKLRTLNDFQKLLGNINWIRPFLKLTTGELKPLFEILNPDSNPISTRKLTPEACKALQLMNERLSTARVKRLDLSQPWSLCILKTEYTPTACLWQDGVVEWIHLPHISPKVITPYDIFCTQLIIKGRHRSKELFSKDPDYIVVPYTKVQFDLLLQEKEDWPISLLGFLGEVHFHLPKDPLLTFTLQTAIIFPHMTSTTPLEKGIVIFTDGSANGRSVTYIQGREPIIKENTQNTAQQAEIVAVITAFEEVSQPFNLYTDSKYVTGLFPEIETATLSPRTKIYTELKHLQRLIHKRQEKFYIGHIRGHTGLPGPLAQGNAYADSLTRILTAGKRTADGSEFEKRTADGSEFESPKKKAKVE

SEQ ID NO: 3330 - protein, 2033 aa, synthetic construct
MPAAKRVKLDGGDKKYSIGLDIGTNSVGWAVITDEYKVPSKKFKVLGNTDRHSIKKNLIGALLFDSGETAEATRLKRTARRRYTRRKNRICYLQEIFSNEMAKVDDSFFHRLEESFLVEEDKKHERHPIFGNIVDEVAYHEKYPTIYHLRKKLVDSTDKADLRLIYLALAHMIKFRGHFLIEGDLNPDNSDVDKLFIQLVQTYNQLFEENPINASGVDAKAILSARLSKSRRLENLIAQLPGEKKNGLFGNLIALSLGLTPNFKSNFDLAEDAKLQLSKDTYDDDLDNLLAQIGDQYADLFLAAKNLSDAILLSDILRVNTEITKAPLSASMIKRYDEHHQDLTLLKALVRQQLPEKYKEIFFDQSKNGYAGYIDGGASQEEFYKFIKPILEKMDGTEELLVKLNREDLLRKQRTFDNGSIPHQIHLGELHAILRRQEDFYPFLKDNREKIEKILTFRIPYYVGPLARGNSRFAWMTRKSEETITPWNFEEVVDKGASAQSFIERMTNFDKNLPNEKVLPKHSLLYEYFTVYNELTKVKYVTEGMRKPAFLSGEQKKAIVDLLFKTNRKVTVKQLKEDYFKKIECFDSVEISGVEDRFNASLGTYHDLLKIIKDKDFLDNEENEDILEDIVLTLTLFEDREMIEERLKTYAHLFDDKVMKQLKRRRYTGWGRLSRKLINGIRDKQSGKTILDFLKSDGFANRNFMQLIHDDSLTFKEDIQKAQVSGQGDSLHEHIANLAGSPAIKKGILQTVKVVDELVKVMGRHKPENIVIEMARENQTTQKGQKNSRERMKRIEEGIKELGSQILKEHPVENTQLQNEKLYLYYLQNGRDMYVDQELDINRLSDYDVDHIVPQSFLKDDSIDNKVLTRSDKARGKSDNVPSEEVVKKMKNYWRQLLNAKLITQRKFDNLTKAERGGLSELDKAGFIKRQLVETRQITKHVAQILDSRMNTKYDENDKLIREVKVITLKSKLVSDFRKDFQFYKVREINNYHHAHDAYLNAVVGTALIKKYPKLESEFVYGDYKVYDVRKMIAKSEQEIGKATAKYFFYSNIMNFFKTEITLANGEIRKRPLIETNGETGEIVWDKGRDFATVRKVLSMPQVNIVKKTEVQTGGFSKESILPKRNSDKLIARKKDWDPKKYGGFDSPTVAYSVLVVAKVEKGKSKKLKSVKELLGITIMERSSFEKNPIDFLEAKGYKEVKKDLIIKLPKYSLFELENGRKRMLASAGELQKGNELALPSKYVNFLYLASHYEKLKGSPEDNEQKQLFVEQHKHYLDEIIEQISEFSKRVILADANLDKVLSAYNKHRDKPIREQAENIIHLFTLTNLGAPAAFKYFDTTIDRKRYTSTKEVLDATLIHQSITGLYETRIDLSQLGGDGGEAAAKEAAAKEAAAKEAAAKGGGRDIMKDIKVRLMTDSPDDSQDLMIGAIESNLFADQISWKSDQPVWLNQWPLKQEKLQALQQLVTEQLQLGHLEESNSPWNTPVFVIKKKSGKWRLLQDLRAVNATMHDMGALQPGLPSPVAPPKGWEIIIIDLQDCFFNIKLHPEDCKRFAFSVPSPNFKRPYQRFQWKVLPQGMKNSPTLCQKFVDKAILTVRDKYQDSYIVHYMDDILLAHPSRSIVDEILTSMIQALNKHGLVVSTEKIQKYDNLKYLGTHIQGDSVSYQKLQIRTDKLRTLNDFQKLLGNINWIRPFLKLTTGELKPLFEILNPDSNPISTRKLTPEACKALQLMNERLSTARVKRLDLSQPWSLCILKTEYTPTACLWQDGVVEWIHLPHISPKVITPYDIFCTQLIIKGRHRSKELFSKDPDYIVVPYTKVQFDLLLQEKEDWPISLLGFLGEVHFHLPKDPLLTFTLQTAIIFPHMTSTTPLEKGIVIFTDGSANGRSVTYIQGREPIIKENTQNTAQQAEIVAVITAFEEVSQPFNLYTDSKYVTGLFPEIETATLSPRTKIYTELKHLQRLIHKRQEKFYIGHIRGHTGLPGPLAQGNAYADSLTRILTAGKRTADGSEFEKRTADGSEFESPKKKAKVE

SEQ ID NO: 3331 - protein, 2022 aa, synthetic construct
MPAAKRVKLDGGDKKYSIGLDIGTNSVGWAVITDEYKVPSKKFKVLGNTDRHSIKKNLIGALLFDSGETAEATRLKRTARRRYTRRKNRICYLQEIFSNEMAKVDDSFFHRLEESFLVEEDKKHERHPIFGNIVDEVAYHEKYPTIYHLRKKLVDSTDKADLRLIYLALAHMIKFRGHFLIEGDLNPDNSDVDKLFIQLVQTYNQLFEENPINASGVDAKAILSARLSKSRRLENLIAQLPGEKKNGLFGNLIALSLGLTPNFKSNFDLAEDAKLQLSKDTYDDDLDNLLAQIGDQYADLFLAAKNLSDAILLSDILRVNTEITKAPLSASMIKRYDEHHQDLTLLKALVRQQLPEKYKEIFFDQSKNGYAGYIDGGASQEEFYKFIKPILEKMDGTEELLVKLNREDLLRKQRTFDNGSIPHQIHLGELHAILRRQEDFYPFLKDNREKIEKILTFRIPYYVGPLARGNSRFAWMTRKSEETITPWNFEEVVDKGASAQSFIERMTNFDKNLPNEKVLPKHSLLYEYFTVYNELTKVKYVTEGMRKPAFLSGEQKKAIVDLLFKTNRKVTVKQLKEDYFKKIECFDSVEISGVEDRFNASLGTYHDLLKIIKDKDFLDNEENEDILEDIVLTLTLFEDREMIEERLKTYAHLFDDKVMKQLKRRRYTGWGRLSRKLINGIRDKQSGKTILDFLKSDGFANRNFMQLIHDDSLTFKEDIQKAQVSGQGDSLHEHIANLAGSPAIKKGILQTVKVVDELVKVMGRHKPENIVIEMARENQTTQKGQKNSRERMKRIEEGIKELGSQILKEHPVENTQLQNEKLYLYYLQNGRDMYVDQELDINRLSDYDVDHIVPQSFLKDDSIDNKVLTRSDKARGKSDNVPSEEVVKKMKNYWRQLLNAKLITQRKFDNLTKAERGGLSELDKAGFIKRQLVETRQITKHVAQILDSRMNTKYDENDKLIREVKVITLKSKLVSDFRKDFQFYKVREINNYHHAHDAYLNAVVGTALIKKYPKLESEFVYGDYKVYDVRKMIAKSEQEIGKATAKYFFYSNIMNFFKTEITLANGEIRKRPLIETNGETGEIVWDKGRDFATVRKVLSMPQVNIVKKTEVQTGGFSKESILPKRNSDKLIARKKDWDPKKYGGFDSPTVAYSVLVVAKVEKGKSKKLKSVKELLGITIMERSSFEKNPIDFLEAKGYKEVKKDLIIKLPKYSLFELENGRKRMLASAGELQKGNELALPSKYVNFLYLASHYEKLKGSPEDNEQKQLFVEQHKHYLDEIIEQISEFSKRVILADANLDKVLSAYNKHRDKPIREQAENIIHLFTLTNLGAPAAFKYFDTTIDRKRYTSTKEVLDATLIHQSITGLYETRIDLSQLGGDGGGGGGGSPAPGGGRDIMKDIKVRLMTDSPDDSQDLMIGAIESNLFADQISWKSDQPVWLNQWPLKQEKLQALQQLVTEQLQLGHLEESNSPWNTPVFVIKKKSGKWRLLQDLRAVNATMHDMGALQPGLPSPVAPPKGWEIIIIDLQDCFFNIKLHPEDCKRFAFSVPSPNFKRPYQRFQWKVLPQGMKNSPTLCQKFVDKAILTVRDKYQDSYIVHYMDDILLAHPSRSIVDEILTSMIQALNKHGLVVSTEKIQKYDNLKYLGTHIQGDSVSYQKLQIRTDKLRTLNDFQKLLGNINWIRPFLKLTTGELKPLFEILNPDSNPISTRKLTPEACKALQLMNERLSTARVKRLDLSQPWSLCILKTEYTPTACLWQDGVVEWIHLPHISPKVITPYDIFCTQLIIKGRHRSKELFSKDPDYIVVPYTKVQFDLLLQEKEDWPISLLGFLGEVHFHLPKDPLLTFTLQTAIIFPHMTSTTPLEKGIVIFTDGSANGRSVTYIQGREPIIKENTQNTAQQAEIVAVITAFEEVSQPFNLYTDSKYVTGLFPEIETATLSPRTKIYTELKHLQRLIHKRQEKFYIGHIRGHTGLPGPLAQGNAYADSLTRILTAGKRTADGSEFEKRTADGSEFESPKKKAKVE

SEQ ID NO: 3332 - protein, 2024 aa, synthetic construct
MPAAKRVKLDGGDKKYSIGLDIGTNSVGWAVITDEYKVPSKKFKVLGNTDRHSIKKNLIGALLFDSGETAEATRLKRTARRRYTRRKNRICYLQEIFSNEMAKVDDSFFHRLEESFLVEEDKKHERHPIFGNIVDEVAYHEKYPTIYHLRKKLVDSTDKADLRLIYLALAHMIKFRGHFLIEGDLNPDNSDVDKLFIQLVQTYNQLFEENPINASGVDAKAILSARLSKSRRLENLIAQLPGEKKNGLFGNLIALSLGLTPNFKSNFDLAEDAKLQLSKDTYDDDLDNLLAQIGDQYADLFLAAKNLSDAILLSDILRVNTEITKAPLSASMIKRYDEHHQDLTLLKALVRQQLPEKYKEIFFDQSKNGYAGYIDGGASQEEFYKFIKPILEKMDGTEELLVKLNREDLLRKQRTFDNGSIPHQIHLGELHAILRRQEDFYPFLKDNREKIEKILTFRIPYYVGPLARGNSRFAWMTRKSEETITPWNFEEVVDKGASAQSFIERMTNFDKNLPNEKVLPKHSLLYEYFTVYNELTKVKYVTEGMRKPAFLSGEQKKAIVDLLFKTNRKVTVKQLKEDYFKKIECFDSVEISGVEDRFNASLGTYHDLLKIIKDKDFLDNEENEDILEDIVLTLTLFEDREMIEERLKTYAHLFDDKVMKQLKRRRYTGWGRLSRKLINGIRDKQSGKTILDFLKSDGFANRNFMQLIHDDSLTFKEDIQKAQVSGQGDSLHEHIANLAGSPAIKKGILQTVKVVDELVKVMGRHKPENIVIEMARENQTTQKGQKNSRERMKRIEEGIKELGSQILKEHPVENTQLQNEKLYLYYLQNGRDMYVDQELDINRLSDYDVDHIVPQSFLKDDSIDNKVLTRSDKARGKSDNVPSEEVVKKMKNYWRQLLNAKLITQRKFDNLTKAERGGLSELDKAGFIKRQLVETRQITKHVAQILDSRMNTKYDENDKLIREVKVITLKSKLVSDFRKDFQFYKVREINNYHHAHDAYLNAVVGTALIKKYPKLESEFVYGDYKVYDVRKMIAKSEQEIGKATAKYFFYSNIMNFFKTEITLANGEIRKRPLIETNGETGEIVWDKGRDFATVRKVLSMPQVNIVKKTEVQTGGFSKESILPKRNSDKLIARKKDWDPKKYGGFDSPTVAYSVLVVAKVEKGKSKKLKSVKELLGITIMERSSFEKNPIDFLEAKGYKEVKKDLIIKLPKYSLFELENGRKRMLASAGELQKGNELALPSKYVNFLYLASHYEKLKGSPEDNEQKQLFVEQHKHYLDEIIEQISEFSKRVILADANLDKVLSAYNKHRDKPIREQAENIIHLFTLTNLGAPAAFKYFDTTIDRKRYTSTKEVLDATLIHQSITGLYETRIDLSQLGGDGGGSSEAAAKPAPGGGRDIMKDIKVRLMTDSPDDSQDLMIGAIESNLFADQISWKSDQPVWLNQWPLKQEKLQALQQLVTEQLQLGHLEESNSPWNTPVFVIKKKSGKWRLLQDLRAVNATMHDMGALQPGLPSPVAPPKGWEIIIIDLQDCFFNIKLHPEDCKRFAFSVPSPNFKRPYQRFQWKVLPQGMKNSPTLCQKFVDKAILTVRDKYQDSYIVHYMDDILLAHPSRSIVDEILTSMIQALNKHGLVVSTEKIQKYDNLKYLGTHIQGDSVSYQKLQIRTDKLRTLNDFQKLLGNINWIRPFLKLTTGELKPLFEILNPDSNPISTRKLTPEACKALQLMNERLSTARVKRLDLSQPWSLCILKTEYTPTACLWQDGVVEWIHLPHISPKVITPYDIFCTQLIIKGRHRSKELFSKDPDYIVVPYTKVQFDLLLQEKEDWPISLLGFLGEVHFHLPKDPLLTFTLQTAIIFPHMTSTTPLEKGIVIFTDGSANGRSVTYIQGREPIIKENTQNTAQQAEIVAVITAFEEVSQPFNLYTDSKYVTGLFPEIETATLSPRTKIYTELKHLQRLIHKRQEKFYIGHIRGHTGLPGPLAQGNAYADSLTRILTAGKRTADGSEFEKRTADGSEFESPKKKAKVE

SEQ ID NO: 3333-3999 - skipped (667 entries)

SEQ ID NO: 4000 - protein, 1381 aa, synthetic construct
MPAAKRVKLDGGDKKYSIGLDIGTNSVGWAVITDEYKVPSKKFKVLGNTDRHSIKKNLIGALLFDSGETAEATRLKRTARRRYTRRKNRICYLQEIFSNEMAKVDDSFFHRLEESFLVEEDKKHERHPIFGNIVDEVAYHEKYPTIYHLRKKLVDSTDKADLRLIYLALAHMIKFRGHFLIEGDLNPDNSDVDKLFIQLVQTYNQLFEENPINASGVDAKAILSARLSKSRRLENLIAQLPGEKKNGLFGNLIALSLGLTPNFKSNFDLAEDAKLQLSKDTYDDDLDNLLAQIGDQYADLFLAAKNLSDAILLSDILRVNTEITKAPLSASMIKRYDEHHQDLTLLKALVRQQLPEKYKEIFFDQSKNGYAGYIDGGASQEEFYKFIKPILEKMDGTEELLVKLNREDLLRKQRTFDNGSIPHQIHLGELHAILRRQEDFYPFLKDNREKIEKILTFRIPYYVGPLARGNSRFAWMTRKSEETITPWNFEEVVDKGASAQSFIERMTNFDKNLPNEKVLPKHSLLYEYFTVYNELTKVKYVTEGMRKPAFLSGEQKKAIVDLLFKTNRKVTVKQLKEDYFKKIECFDSVEISGVEDRFNASLGTYHDLLKIIKDKDFLDNEENEDILEDIVLTLTLFEDREMIEERLKTYAHLFDDKVMKQLKRRRYTGWGRLSRKLINGIRDKQSGKTILDFLKSDGFANRNFMQLIHDDSLTFKEDIQKAQVSGQGDSLHEHIANLAGSPAIKKGILQTVKVVDELVKVMGRHKPENIVIEMARENQTTQKGQKNSRERMKRIEEGIKELGSQILKEHPVENTQLQNEKLYLYYLQNGRDMYVDQELDINRLSDYDVDHIVPQSFLKDDSIDNKVLTRSDKARGKSDNVPSEEVVKKMKNYWRQLLNAKLITQRKFDNLTKAERGGLSELDKAGFIKRQLVETRQITKHVAQILDSRMNTKYDENDKLIREVKVITLKSKLVSDFRKDFQFYKVREINNYHHAHDAYLNAVVGTALIKKYPKLESEFVYGDYKVYDVRKMIAKSEQEIGKATAKYFFYSNIMNFFKTEITLANGEIRKRPLIETNGETGEIVWDKGRDFATVRKVLSMPQVNIVKKTEVQTGGFSKESILPKRNSDKLIARKKDWDPKKYGGFDSPTVAYSVLVVAKVEKGKSKKLKSVKELLGITIMERSSFEKNPIDFLEAKGYKEVKKDLIIKLPKYSLFELENGRKRMLASAGELQKGNELALPSKYVNFLYLASHYEKLKGSPEDNEQKQLFVEQHKHYLDEIIEQISEFSKRVILADANLDKVLSAYNKHRDKPIREQAENIIHLFTLTNLGAPAAFKYFDTTIDRKRYTSTKEVLDATLIHQSITGLYETRIDLSQLGGDGG

SEQ ID NO: 4001 - protein, 31 aa, synthetic construct
AGKRTADGSEFEKRTADGSEFESPKKKAKVE

SEQ ID NO: 4002 - protein, 2138 aa, synthetic construct; identical to SEQ ID NO: 2892

SEQ ID NO: 4003-4500 - skipped (498 entries)

SEQ ID NO: 4501 - protein, 2096 aa, synthetic construct
MPAAKRVKLDGGDKKYSIGLDIGTNSVGWAVITDEYKVPSKKFKVLGNTDRHSIKKNLIGALLFDSGETAEATRLKRTARRRYTRRKNRICYLQEIFSNEMAKVDDSFFHRLEESFLVEEDKKHERHPIFGNIVDEVAYHEKYPTIYHLRKKLVDSTDKADLRLIYLALAHMIKFRGHFLIEGDLNPDNSDVDKLFIQLVQTYNQLFEENPINASGVDAKAILSARLSKSRRLENLIAQLPGEKKNGLFGNLIALSLGLTPNFKSNFDLAEDAKLQLSKDTYDDDLDNLLAQIGDQYADLFLAAKNLSDAILLSDILRVNTEITKAPLSASMIKRYDEHHQDLTLLKALVRQQLPEKYKEIFFDQSKNGYAGYIDGGASQEEFYKFIKPILEKMDGTEELLVKLNREDLLRKQRTFDNGSIPHQIHLGELHAILRRQEDFYPFLKDNREKIEKILTFRIPYYVGPLARGNSRFAWMTRKSEETITPWNFEEVVDKGASAQSFIERMTNFDKNLPNEKVLPKHSLLYEYFTVYNELTKVKYVTEGMRKPAFLSGEQKKAIVDLLFKTNRKVTVKQLKEDYFKKIECFDSVEISGVEDRFNASLGTYHDLLKIIKDKDFLDNEENEDILEDIVLTLTLFEDREMIEERLKTYAHLFDDKVMKQLKRRRYTGWGRLSRKLINGIRDKQSGKTILDFLKSDGFANRNFMQLIHDDSLTFKEDIQKAQVSGQGDSLHEHIANLAGSPAIKKGILQTVKVVDELVKVMGRHKPENIVIEMARENQTTQKGQKNSRERMKRIEEGIKELGSQILKEHPVENTQLQNEKLYLYYLQNGRDMYVDQELDINRLSDYDVDHIVPQSFLKDDSIDNKVLTRSDKARGKSDNVPSEEVVKKMKNYWRQLLNAKLITQRKFDNLTKAERGGLSELDKAGFIKRQLVETRQITKHVAQILDSRMNTKYDENDKLIREVKVITLKSKLVSDFRKDFQFYKVREINNYHHAHDAYLNAVVGTALIKKYPKLESEFVYGDYKVYDVRKMIAKSEQEIGKATAKYFFYSNIMNFFKTEITLANGEIRKRPLIETNGETGEIVWDKGRDFATVRKVLSMPQVNIVKKTEVQTGGFSKESILPKRNSDKLIARKKDWDPKKYGGFDSPTVAYSVLVVAKVEKGKSKKLKSVKELLGITIMERSSFEKNPIDFLEAKGYKEVKKDLIIKLPKYSLFELENGRKRMLASAGELQKGNELALPSKYVNFLYLASHYEKLKGSPEDNEQKQLFVEQHKHYLDEIIEQISEFSKRVILADANLDKVLSAYNKHRDKPIREQAENIIHLFTLTNLGAPAAFKYFDTTIDRKRYTSTKEVLDATLIHQSITGLYETRIDLSQLGGDGGGGSGGSGGSGGTAPLEEEYRLFLEAPIQNVTLLEQWKREIPKVWAEINPPGLASTQAPIHVQLLSTALPVRVRQYPITLEAKRSLRETIRKFRAAGILRPVHSPWNTPLLPVRKSGTSEYRMVQDLREVNKRVETIHPTVPNPYTLLSLLPPDRIWYSVLDLKDAFFCIPLAPESQLIFAFEWADAEEGESGQLTWTRLPQGFKNSPTLFNEALNRDLQGFRLDHPSVSLLQYVDDLLIAADTQAACLSATRDLLMTLAELGYRVSGKKAQLCQEEVTYLGFKIHKGSRSLSNSRTQAILQIPVPKTKRQVREFLGKIGYCRLFIPGFAELAQPLYAATRPGNDPLVWGEKEEEAFQSLKLALTQPPALALPSLDKPFQLFVEETSGAAKGVLTQALGPWKRPVAYLSKRLDPVAAGWPRCLRAIAAAALLTREASKLTFGQDIEITSSHNLESLLRSPPDKWLTNARITQYQVLLLDPPRVRFKQTAALNPATLLPETDDTLPIHHCLDTLDSLTSTRPDLTDQPLAQAEATLFTDGSSYIRDGKRYAGAAVVTLDSVIWAEPLPIGTSAQKAELIALTKALEWSKDKSVNIYTDSRYAFATLHVHGMIYRERGWLTAGGKAIKNAPEILALLTAVWLPKRVAVMHCKGHQKDDAPTSTGNRRADEVAREVAIRPLSTQATISAGKRTADGSEFEKRTADGSEFESPKKKAKVE

SEQ ID NO: 4502 - protein, 2098 aa, synthetic construct
MPAAKRVKLDGGDKKYSIGLDIGTNSVGWAVITDEYKVPSKKFKVLGNTDRHSIKKNLIGALLFDSGETAEATRLKRTARRRYTRRKNRICYLQEIFSNEMAKVDDSFFHRLEESFLVEEDKKHERHPIFGNIVDEVAYHEKYPTIYHLRKKLVDSTDKADLRLIYLALAHMIKFRGHFLIEGDLNPDNSDVDKLFIQLVQTYNQLFEENPINASGVDAKAILSARLSKSRRLENLIAQLPGEKKNGLFGNLIALSLGLTPNFKSNFDLAEDAKLQLSKDTYDDDLDNLLAQIGDQYADLFLAAKNLSDAILLSDILRVNTEITKAPLSASMIKRYDEHHQDLTLLKALVRQQLPEKYKEIFFDQSKNGYAGYIDGGASQEEFYKFIKPILEKMDGTEELLVKLNREDLLRKQRTFDNGSIPHQIHLGELHAILRRQEDFYPFLKDNREKIEKILTFRIPYYVGPLARGNSRFAWMTRKSEETITPWNFEEVVDKGASAQSFIERMTNFDKNLPNEKVLPKHSLLYEYFTVYNELTKVKYVTEGMRKPAFLSGEQKKAIVDLLFKTNRKVTVKQLKEDYFKKIECFDSVEISGVEDRFNASLGTYHDLLKIIKDKDFLDNEENEDILEDIVLTLTLFEDREMIEERLKTYAHLFDDKVMKQLKRRRYTGWGRLSRKLINGIRDKQSGKTILDFLKSDGFANRNFMQLIHDDSLTFKEDIQKAQVSGQGDSLHEHIANLAGSPAIKKGILQTVKVVDELVKVMGRHKPENIVIEMARENQTTQKGQKNSRERMKRIEEGIKELGSQILKEHPVENTQLQNEKLYLYYLQNGRDMYVDQELDINRLSDYDVDHIVPQSFLKDDSIDNKVLTRSDKARGKSDNVPSEEVVKKMKNYWRQLLNAKLITQRKFDNLTKAERGGLSELDKAGFIKRQLVETRQITKHVAQILDSRMNTKYDENDKLIREVKVITLKSKLVSDFRKDFQFYKVREINNYHHAHDAYLNAVVGTALIKKYPKLESEFVYGDYKVYDVRKMIAKSEQEIGKATAKYFFYSNIMNFFKTEITLANGEIRKRPLIETNGETGEIVWDKGRDFATVRKVLSMPQVNIVKKTEVQTGGFSKESILPKRNSDKLIARKKDWDPKKYGGFDSPTVAYSVLVVAKVEKGKSKKLKSVKELLGITIMERSSFEKNPIDFLEAKGYKEVKKDLIIKLPKYSLFELENGRKRMLASAGELQKGNELALPSKYVNFLYLASHYEKLKGSPEDNEQKQLFVEQHKHYLDEIIEQISEFSKRVILADANLDKVLSAYNKHRDKPIREQAENIIHLFTLTNLGAPAAFKYFDTTIDRKRYTSTKEVLDATLIHQSITGLYETRIDLSQLGGDGGGGSGGSGGSGGSGGSGGVLNLEEEYRLHEKPVPSSIDPSWLQLFPTVWAERAGMGLANQVPPVVVELRSGASPVAVRQYPMSKEAREGIRPHIQRFLDLGVLVPCQSPWNTPLLPVKKPGTNDYRPVQDLREINKRVQDIHPTVPNPYNLLSSLPPSHTWYSVLDLKDAFFCLKLHPNSQPLFAFEWRDPEKGNTGQLTWTRLPQGFKNSPTLFNEALHRDLAPFRALNPQVVLLQYVDDLLVAAPTYRDCKEGTQKLLQELSKLGYRVSAKKAQLCQKEVTYLGYLLKEGKRWLTPARKATVMKIPPPTTPRQVREFLGTAGFCRLWIPGFASLAAPLYPLTKPSIPFIWTEEHQKAFDRIKEALLSAPALALPDLTKPFTLYVDERAGVARGVLTQTLGPWRRPVAYLSKKLDPVASGWPTCLKAVAAVALLLKDADKLTLGQNVTVIASHSLESIVRQPPDRWMTNARMTHYQSLLLNERVSFAPPAVLNPATLLPVESEATPVHRCSEILAEETGTRRDLKDQPLPGVPAWYTDGSSFIAEGKRRAGAAIVDGKRTVWASSLPEGTSAQKAELVALTQALRLAEGKDINIYTDSRYAFATAHIHGAIYKQRGWLTSAGKDIKNKEEILALLEAIHLPKRVAIIHCPGHQKGNDPVATGNRRADEAAKQAALSTRVLAETTKPAGKRTADGSEFEKRTADGSEFESPKKKAKVE

SEQ ID NO: 4503 - protein, 2103 aa, synthetic construct
MPAAKRVKLDGGDKKYSIGLDIGTNSVGWAVITDEYKVPSKKFKVLGNTDRHSIKKNLIGALLFDSGETAEATRLKRTARRRYTRRKNRICYLQEIFSNEMAKVDDSFFHRLEESFLVEEDKKHERHPIFGNIVDEVAYHEKYPTIYHLRKKLVDSTDKADLRLIYLALAHMIKFRGHFLIEGDLNPDNSDVDKLFIQLVQTYNQLFEENPINASGVDAKAILSARLSKSRRLENLIAQLPGEKKNGLFGNLIALSLGLTPNFKSNFDLAEDAKLQLSKDTYDDDLDNLLAQIGDQYADLFLAAKNLSDAILLSDILRVNTEITKAPLSASMIKRYDEHHQDLTLLKALVRQQLPEKYKEIFFDQSKNGYAGYIDGGASQEEFYKFIKPILEKMDGTEELLVKLNREDLLRKQRTFDNGSIPHQIHLGELHAILRRQEDFYPFLKDNREKIEKILTFRIPYYVGPLARGNSRFAWMTRKSEETITPWNFEEVVDKGASAQSFIERMTNFDKNLPNEKVLPKHSLLYEYFTVYNELTKVKYVTEGMRKPAFLSGEQKKAIVDLLFKTNRKVTVKQLKEDYFKKIECFDSVEISGVEDRFNASLGTYHDLLKIIKDKDFLDNEENEDILEDIVLTLTLFEDREMIEERLKTYAHLFDDKVMKQLKRRRYTGWGRLSRKLINGIRDKQSGKTILDFLKSDGFANRNFMQLIHDDSLTFKEDIQKAQVSGQGDSLHEHIANLAGSPAIKKGILQTVKVVDELVKVMGRHKPENIVIEMARENQTTQKGQKNSRERMKRIEEGIKELGSQILKEHPVENTQLQNEKLYLYYLQNGRDMYVDQELDINRLSDYDVDHIVPQSFLKDDSIDNKVLTRSDKARGKSDNVPSEEVVKKMKNYWRQLLNAKLITQRKFDNLTKAERGGLSELDKAGFIKRQLVETRQITKHVAQILDSRMNTKYDENDKLIREVKVITLKSKLVSDFRKDFQFYKVREINNYHHAHDAYLNAVVGTALIKKYPKLESEFVYGDYKVYDVRKMIAKSEQEIGKATAKYFFYSNIMNFFKTEITLANGEIRKRPLIETNGETGEIVWDKGRDFATVRKVLSMPQVNIVKKTEVQTGGFSKESILPKRNSDKLIARKKDWDPKKYGGFDSPTVAYSVLVVAKVEKGKSKKLKSVKELLGITIMERSSFEKNPIDFLEAKGYKEVKKDLIIKLPKYSLFELENGRKRMLASAGELQKGNELALPSKYVNFLYLASHYEKLKGSPEDNEQKQLFVEQHKHYLDEIIEQISEFSKRVILADANLDKVLSAYNKHRDKPIREQAENIIHLFTLTNLGAPAAFKYFDTTIDRKRYTSTKEVLDATLIHQSITGLYETRIDLSQLGGDGGGGSGGSGGSGGSGGSGGSGGLGIEDEYRLHETSTEPDVSLGSTWLSDFPQAWAETGGMGLAVRQAPLIIPLKATSTPVSIQQYPMSHEARLGIKPHIQRLLDQGILVPCQSPWNTPLLPVKKPGTNDYRPVQDLREVNKRVEDIHPTVPNPYNLLSGLPPSHQWYTVLDLKDAFFCLRLHPTSQPLFAFEWRDPGMGISGQLTWTRLPQGFKNSPTLFNEALHRDLADFRIQHPDLILLQYVDDILLAATSELDCQQGTRALLQTLGDLGYRASAKKAQICQKQVKYLGYLLREGQRWLTEARKETVMGQPVPKTPRQLREFLGKAGFCRLFIPGFAEMAAPLYPLTKPGTLFSWGPDQQKAYQEIKQALLTAPALGLPDLTKPFELFVDEKQGYAKGVLTQKLGPWRRPVAYLSKKLDPVAAGWPPCLRMVAAIAVLTKDAGKLTMGQPLVILAPHAVEALVKQPPDRWLSNARMTHYQAMLLDTDRVQFGPVVALNPATLLPLPEEGAPHDCLEILAETHGTRPDLTDQPIPDADHTWYTDGSSFLQEGQRKAGAAVTTETEVIWAGALPAGTSAQRAELIALTQALKMAEGKRLNVYTDSRYAFATAHIHGEIYRRRGWLTSEGREIKNKSEILALLKALFLPKRLSIIHCLGHQKGDSAEARGNRLADQAAREAAIKTPPDTSTLLIAGKRTADGSEFEKRTADGSEFESPKKKAKVE

SEQ ID NO: 4504 - protein, 2110 aa, synthetic construct
MPAAKRVKLDGGDKKYSIGLDIGTNSVGWAVITDEYKVPSKKFKVLGNTDRHSIKKNLIGALLFDSGETAEATRLKRTARRRYTRRKNRICYLQEIFSNEMAKVDDSFFHRLEESFLVEEDKKHERHPIFGNIVDEVAYHEKYPTIYHLRKKLVDSTDKADLRLIYLALAHMIKFRGHFLIEGDLNPDNSDVDKLFIQLVQTYNQLFEENPINASGVDAKAILSARLSKSRRLENLIAQLPGEKKNGLFGNLIALSLGLTPNFKSNFDLAEDAKLQLSKDTYDDDLDNLLAQIGDQYADLFLAAKNLSDAILLSDILRVNTEITKAPLSASMIKRYDEHHQDLTLLKALVRQQLPEKYKEIFFDQSKNGYAGYIDGGASQEEFYKFIKPILEKMDGTEELLVKLNREDLLRKQRTFDNGSIPHQIHLGELHAILRRQEDFYPFLKDNREKIEKILTFRIPYYVGPLARGNSRFAWMTRKSEETITPWNFEEVVDKGASAQSFIERMTNFDKNLPNEKVLPKHSLLYEYFTVYNELTKVKYVTEGMRKPAFLSGEQKKAIVDLLFKTNRKVTVKQLKEDYFKKIECFDSVEISGVEDRFNASLGTYHDLLKIIKDKDFLDNEENEDILEDIVLTLTLFEDREMIEERLKTYAHLFDDKVMKQLKRRRYTGWGRLSRKLINGIRDKQSGKTILDFLKSDGFANRNFMQLIHDDSLTFKEDIQKAQVSGQGDSLHEHIANLAGSPAIKKGILQTVKVVDELVKVMGRHKPENIVIEMARENQTTQKGQKNSRERMKRIEEGIKELGSQILKEHPVENTQLQNEKLYLYYLQNGRDMYVDQELDINRLSDYDVDHIVPQSFLKDDSIDNKVLTRSDKARGKSDNVPSEEVVKKMKNYWRQLLNAKLITQRKFDNLTKAERGGLSELDKAGFIKRQLVETRQITKHVAQILDSRMNTKYDENDKLIREVKVITLKSKLVSDFRKDFQFYKVREINNYHHAHDAYLNAVVGTALIKKYPKLESEFVYGDYKVYDVRKMIAKSEQEIGKATAKYFFYSNIMNFFKTEITLANGEIRKRPLIETNGETGEIVWDKGRDFATVRKVLSMPQVNIVKKTEVQTGGFSKESILPKRNSDKLIARKKDWDPKKYGGFDSPTVAYSVLVVAKVEKGKSKKLKSVKELLGITIMERSSFEKNPIDFLEAKGYKEVKKDLIIKLPKYSLFELENGRKRMLASAGELQKGNELALPSKYVNFLYLASHYEKLKGSPEDNEQKQLFVEQHKHYLDEIIEQISEFSKRVILADANLDKVLSAYNKHRDKPIREQAENIIHLFTLTNLGAPAAFKYFDTTIDRKRYTSTKEVLDATLIHQSITGLYETRIDLSQLGGDGGGGGGSGGGGSGGGGSGGGGSGGGGSGGTLNIEDEHRLHETSKEPDVSLGSTWLSDFPQAWAETGGMGLAVRQAPLIIPLKATSTPVSIKQYPMSQEARLGIKPHIQRLLDQGILVPCQSPWNTPLLPVKKPGTNDYRPVQDLREVNKRVEDIHPTVPNPYNLLSGLPPSHQWYTVLDLKDAFFCLRLHPTSQPLFAFEWRDPEMGISGQLTWTRLPQGFKNSPTLFNEALHRDLADFRIQHPDLILLQYVDDLLLAATSELDCQQGTRALLQTLGNLGYRASAKKAQICQKQVKYLGYLLKEGQRWLTEARKETVMGQPTPKTPRQLREFLGKAGFCRLFIPGFAEMAAPLYPLTKPGTLFNWGPDQQKAYQEIKQALLTAPALGLPDLTKPFELFVDEKQGYAKGVLTQKLGPWRRPVAYLSKKLDPVAAGWPPCLRMVAAIAVLTKDAGKLTMGQPLVILAPHAVEALVKQPPDRWLSNARMTHYQALLLDTDRVQFGPVVALNPATLLPLPEEGLQHNCLDILAEAHGTRPDLTDQPLPDADHTWYTDGSSLLQEGQRKAGAAVTTETEVIWAKALPAGTSAQRAELIALTQALKMAEGKKLNVYTDSRYAFATAHIHGEIYRRRGWLTSEGKEIKNKDEILALLKALFLPKRLSIIHCPGHQKGHSAEARGNRMADQAARKAAITETPDTSTLLAGKRTADGSEFEKRTADGSEFESPKKKAKVE

SEQ ID NO: 4505 - protein, 2094 aa, synthetic construct
MPAAKRVKLDGGDKKYSIGLDIGTNSVGWAVITDEYKVPSKKFKVLGNTDRHSIKKNLIGALLFDSGETAEATRLKRTARRRYTRRKNRICYLQEIFSNEMAKVDDSFFHRLEESFLVEEDKKHERHPIFGNIVDEVAYHEKYPTIYHLRKKLVDSTDKADLRLIYLALAHMIKFRGHFLIEGDLNPDNSDVDKLFIQLVQTYNQLFEENPINASGVDAKAILSARLSKSRRLENLIAQLPGEKKNGLFGNLIALSLGLTPNFKSNFDLAEDAKLQLSKDTYDDDLDNLLAQIGDQYADLFLAAKNLSDAILLSDILRVNTEITKAPLSASMIKRYDEHHQDLTLLKALVRQQLPEKYKEIFFDQSKNGYAGYIDGGASQEEFYKFIKPILEKMDGTEELLVKLNREDLLRKQRTFDNGSIPHQIHLGELHAILRRQEDFYPFLKDNREKIEKILTFRIPYYVGPLARGNSRFAWMTRKSEETITPWNFEEVVDKGASAQSFIERMTNFDKNLPNEKVLPKHSLLYEYFTVYNELTKVKYVTEGMRKPAFLSGEQKKAIVDLLFKTNRKVTVKQLKEDYFKKIECFDSVEISGVEDRFNASLGTYHDLLKIIKDKDFLDNEENEDILEDIVLTLTLFEDREMIEERLKTYAHLFDDKVMKQLKRRRYTGWGRLSRKLINGIRDKQSGKTILDFLKSDGFANRNFMQLIHDDSLTFKEDIQKAQVSGQGDSLHEHIANLAGSPAIKKGILQTVKVVDELVKVMGRHKPENIVIEMARENQTTQKGQKNSRERMKRIEEGIKELGSQILKEHPVENTQLQNEKLYLYYLQNGRDMYVDQELDINRLSDYDVDHIVPQSFLKDDSIDNKVLTRSDKARGKSDNVPSEEVVKKMKNYWRQLLNAKLITQRKFDNLTKAERGGLSELDKAGFIKRQLVETRQITKHVAQILDSRMNTKYDENDKLIREVKVITLKSKLVSDFRKDFQFYKVREINNYHHAHDAYLNAVVGTALIKKYPKLESEFVYGDYKVYDVRKMIAKSEQEIGKATAKYFFYSNIMNFFKTEITLANGEIRKRPLIETNGETGEIVWDKGRDFATVRKVLSMPQVNIVKKTEVQTGGFSKESILPKRNSDKLIARKKDWDPKKYGGFDSPTVAYSVLVVAKVEKGKSKKLKSVKELLGITIMERSSFEKNPIDFLEAKGYKEVKKDLIIKLPKYSLFELENGRKRMLASAGELQKGNELALPSKYVNFLYLASHYEKLKGSPEDNEQKQLFVEQHKHYLDEIIEQISEFSKRVILADANLDKVLSAYNKHRDKPIREQAENIIHLFTLTNLGAPAAFKYFDTTIDRKRYTSTKEVLDATLIHQSITGLYETRIDLSQLGGDGGGSSGSSGSSGGTLNIEDEHRLHETSKEPDVSLGSTWLSDFPQAWAETGGMGLAVRQAPLIIPLKATSTPVSIKQYPMSQEARLGIKPHIQRLLDQGILVPCQSPWNTPLLPVKKPGTNDYRPVQDLREVNKRVEDIHPTVPNPYNLLSGLPPSHQWYTVLDLKDAFFCLRLHPTSQPLFAFEWRDPEMGISGQLTWTRLPQGFKNSPTLFNEALHRDLADFRIQHPDLILLQYVDDLLLAATSELDCQQGTRALLQTLGNLGYRASAKKAQICQKQVKYLGYLLKEGQRWLTEARKETVMGQPTPKTPRQLREFLGTAGFCRLWIPGFAEMAAPLYPLTKPGTLFNWGPDQQKAYQEIKQALLTAPALGLPDLTKPFELFVDEKQGYAKGVLTQKLGPWRRPVAYLSKKLDPVAAGWPPCLRMVAAIAVLTKDAGKLTMGQPLVILAPHAVEALVKQPPDRWLSNARMTHYQALLLDTDRVQFGPVVALNPATLLPLPEEGLQHNCLDILAEAHGTRPDLTDQPLPDADHTWYTDGSSLLQEGQRKAGAAVTTETEVIWAKALPAGTSAQRAELIALTQALKMAEGKKLNVYTDSRYAFATAHIHGEIYRRRGWLTSEGKEIKNKDEILALLKALFLPKRLSIIHCPGHQKGHSAEARGNRMADQAARKAAITETPDTSTLLAGKRTADGSEFEKRTADGSEFESPKKKAKVE

SEQ ID NO: 4506 - protein, 2100 aa, synthetic construct
MPAAKRVKLDGGDKKYSIGLDIGTNSVGWAVITDEYKVPSKKFKVLGNTDRHSIKKNLIGALLFDSGETAEATRLKRTARRRYTRRKNRICYLQEIFSNEMAKVDDSFFHRLEESFLVEEDKKHERHPIFGNIVDEVAYHEKYPTIYHLRKKLVDSTDKADLRLIYLALAHMIKFRGHFLIEGDLNPDNSDVDKLFIQLVQTYNQLFEENPINASGVDAKAILSARLSKSRRLENLIAQLPGEKKNGLFGNLIALSLGLTPNFKSNFDLAEDAKLQLSKDTYDDDLDNLLAQIGDQYADLFLAAKNLSDAILLSDILRVNTEITKAPLSASMIKRYDEHHQDLTLLKALVRQQLPEKYKEIFFDQSKNGYAGYIDGGASQEEFYKFIKPILEKMDGTEELLVKLNREDLLRKQRTFDNGSIPHQIHLGELHAILRRQEDFYPFLKDNREKIEKILTFRIPYYVGPLARGNSRFAWMTRKSEETITPWNFEEVVDKGASAQSFIERMTNFDKNLPNEKVLPKHSLLYEYFTVYNELTKVKYVTEGMRKPAFLSGEQKKAIVDLLFKTNRKVTVKQLKEDYFKKIECFDSVEISGVEDRFNASLGTYHDLLKIIKDKDFLDNEENEDILEDIVLTLTLFEDREMIEERLKTYAHLFDDKVMKQLKRRRYTGWGRLSRKLINGIRDKQSGKTILDFLKSDGFANRNFMQLIHDDSLTFKEDIQKAQVSGQGDSLHEHIANLAGSPAIKKGILQTVKVVDELVKVMGRHKPENIVIEMARENQTTQKGQKNSRERMKRIEEGIKELGSQILKEHPVENTQLQNEKLYLYYLQNGRDMYVDQELDINRLSDYDVDHIVPQSFLKDDSIDNKVLTRSDKARGKSDNVPSEEVVKKMKNYWRQLLNAKLITQRKFDNLTKAERGGLSELDKAGFIKRQLVETRQITKHVAQILDSRMNTKYDENDKLIREVKVITLKSKLVSDFRKDFQFYKVREINNYHHAHDAYLNAVVGTALIKKYPKLESEFVYGDYKVYDVRKMIAKSEQEIGKATAKYFFYSNIMNFFKTEITLANGEIRKRPLIETNGETGEIVWDKGRDFATVRKVLSMPQVNIVKKTEVQTGGFSKESILPKRNSDKLIARKKDWDPKKYGGFDSPTVAYSVLVVAKVEKGKSKKLKSVKELLGITIMERSSFEKNPIDFLEAKGYKEVKKDLIIKLPKYSLFELENGRKRMLASAGELQKGNELALPSKYVNFLYLASHYEKLKGSPEDNEQKQLFVEQHKHYLDEIIEQISEFSKRVILADANLDKVLSAYNKHRDKPIREQAENIIHLFTLTNLGAPAAFKYFDTTIDRKRYTSTKEVLDATLIHQSITGLYETRIDLSQLGGDGGEAAAKEAAAKEAAAKGGTLNIEDEYRLHETSKEPDVPLGSTWLSDFPQAWAETGGMGLAVRQAPLIIPLKATSTPVSIKQYPMSQEARLGIKPHIQRLLDQGILVPCQSPWNTPLLPVKKPGTNDYRPVQDLREVNKRVEDIHPTVPNPYNLLSGLPPSHQWYTVLDLKDAFFCLRLHPTSQPLFAFEWRDPEMGISGQLTWTRLPQGFKNSPTLFNEALHRDLADFRIQHPDLILLQYVDDLLLAATSEQDCQRGTRALLQTLGNLGYRASAKKAQICQKQVKYLGYLLKEGQRWLTEARKETVMGQPTPKTPRQLREFLGKAGFCRLFIPGFAEMAAPLYPLTKPGTLFNWGPDQQKAYQEIKQALLTAPALGLPDLTKPFELFVDEKQGYAKGVLTQKLGPWRRPVAYLSKKLDPVAAGWPPCLRMVAAIAVLTKDAGKLTMGQPLVILAPHAVEALVKQPPDRWLSNARMTHYQAMLLDTDRVQFGPVVALNPATLLPLPEKEAPHDCLEILAETHGTRPDLTDQPIPDADYTWYTDGSSFLQEGQRRAGAAVTTETEVIWARALPAGTSAQRAELIALTQALKMAEGKKLNVYTDSRYAFATAHVHGEIYRRRGWLTSEGREIKNKNEILALLKALFLPKRLSIIHCPGHQKGNSAEARGNRMADQAAREAAMKAVLETSTLLAGKRTADGSEFEKRTADGSEFESPKKKAKVE

SEQ ID NO: 4507 - protein, 2110 aa, synthetic construct
MPAAKRVKLDGGDKKYSIGLDIGTNSVGWAVITDEYKVPSKKFKVLGNTDRHSIKKNLIGALLFDSGETAEATRLKRTARRRYTRRKNRICYLQEIFSNEMAKVDDSFFHRLEESFLVEEDKKHERHPIFGNIVDEVAYHEKYPTIYHLRKKLVDSTDKADLRLIYLALAHMIKFRGHFLIEGDLNPDNSDVDKLFIQLVQTYNQLFEENPINASGVDAKAILSARLSKSRRLENLIAQLPGEKKNGLFGNLIALSLGLTPNFKSNFDLAEDAKLQLSKDTYDDDLDNLLAQIGDQYADLFLAAKNLSDAILLSDILRVNTEITKAPLSASMIKRYDEHHQDLTLLKALVRQQLPEKYKEIFFDQSKNGYAGYIDGGASQEEFYKFIKPILEKMDGTEELLVKLNREDLLRKQRTFDNGSIPHQIHLGELHAILRRQEDFYPFLKDNREKIEKILTFRIPYYVGPLARGNSRFAWMTRKSEETITPWNFEEVVDKGASAQSFIERMTNFDKNLPNEKVLPKHSLLYEYFTVYNELTKVKYVTEGMRKPAFLSGEQKKAIVDLLFKTNRKVTVKQLKEDYFKKIECFDSVEISGVEDRFNASLGTYHDLLKIIKDKDFLDNEENEDILEDIVLTLTLFEDREMIEERLKTYAHLFDDKVMKQLKRRRYTGWGRLSRKLINGIRDKQSGKTILDFLKSDGFANRNFMQLIHDDSLTFKEDIQKAQVSGQGDSLHEHIANLAGSPAIKKGILQTVKVVDELVKVMGRHKPENIVIEMARENQTTQKGQKNSRERMKRIEEGIKELGSQILKEHPVENTQLQNEKLYLYYLQNGRDMYVDQELDINRLSDYDVDHIVPQSFLKDDSIDNKVLTRSDKARGKSDNVPSEEVVKKMKNYWRQLLNAKLITQRKFDNLTKAERGGLSELDKAGFIKRQLVETRQITKHVAQILDSRMNTKYDENDKLIREVKVITLKSKLVSDFRKDFQFYKVREINNYHHAHDAYLNAVVGTALIKKYPKLESEFVYGDYKVYDVRKMIAKSEQEIGKATAKYFFYSNIMNFFKTEITLANGEIRKRPLIETNGETGEIVWDKGRDFATVRKVLSMPQVNIVKKTEVQTGGFSKESILPKRNSDKLIARKKDWDPKKYGGFDSPTVAYSVLVVAKVEKGKSKKLKSVKELLGITIMERSSFEKNPIDFLEAKGYKEVKKDLIIKLPKYSLFELENGRKRMLASAGELQKGNELALPSKYVNFLYLASHYEKLKGSPEDNEQKQLFVEQHKHYLDEIIEQISEFSKRVILADANLDKVLSAYNKHRDKPIREQAENIIHLFTLTNLGAPAAFKYFDTTIDRKRYTSTKEVLDATLIHQSITGLYETRIDLSQLGGDGGEAAAKEAAAKEAAAKEAAAKEAAAKGGTLNIEDEYRLHETSKEPDVSLGSTWLSDFPQAWAETGGMGLAVRQAPLIIPLKATSTPVSIKQYPMSQEARLGIKPHIQRLLDQGILVPCQSPWNTPLLPVKKPGTNDYRPVQDLREVNKRVEDIHPTVPNPYNLLSGLPPSHQWYTVLDLKDAFFCLRLHPTSQPLFAFEWRDPEMGISGQLTWTRLPQGFKNSPTLFNEALHRDLAGFRIQHPDLILLQYVDDLLLAATSELDCQQGTRALLQTLGDLGYRASAKKAQICQKQVKYLGYLLKEGQRWLTEARKETVMGQPIPKTPRQLREFLGTAGFCRLWIPGFAEMAAPLYPLTKPGTLFNWGPDQQKAFQEIKQALLTAPALGLPDLTKPFELFVDEKQGYAKGVLTQKLGPWRRPVAYLSKKLDPVAAGWPPCLRMVAAIAVLTKDAGKLTMGQPLVILAPHAVEALVKQPPDRWLSNARMTHYQALLLDTDRVQFGPVVALNPATLLPLPEEGLQHDCLDILAEAHGTRSDLMDQPLPDADHTWYTDGSSFLQEGQRKAGAAVTTETEVIWARALPAGTSAQRAELIALTQALKMAEGKKLNVYTDSRYAFATAHIHGEIYRRRGWLTSEGKEIKNKDEILALLKALFLPKRLSIIHCPGHQKGNSAEARGNRMADQAAREVATRETPETSTLLAGKRTADGSEFEKRTADGSEFESPKKKAKVE

SEQ ID NO: 4508 - protein, 2112 aa, synthetic construct
MPAAKRVKLDGGDKKYSIGLDIGTNSVGWAVITDEYKVPSKKFKVLGNTDRHSIKKNLIGALLFDSGETAEATRLKRTARRRYTRRKNRICYLQEIFSNEMAKVDDSFFHRLEESFLVEEDKKHERHPIFGNIVDEVAYHEKYPTIYHLRKKLVDSTDKADLRLIYLALAHMIKFRGHFLIEGDLNPDNSDVDKLFIQLVQTYNQLFEENPINASGVDAKAILSARLSKSRRLENLIAQLPGEKKNGLFGNLIALSLGLTPNFKSNFDLAEDAKLQLSKDTYDDDLDNLLAQIGDQYADLFLAAKNLSDAILLSDILRVNTEITKAPLSASMIKRYDEHHQDLTLLKALVRQQLPEKYKEIFFDQSKNGYAGYIDGGASQEEFYKFIKPILEKMDGTEELLVKLNREDLLRKQRTFDNGSIPHQIHLGELHAILRRQEDFYPFLKDNREKIEKILTFRIPYYVGPLARGNSRFAWMTRKSEETITPWNFEEVVDKGASAQSFIERMTNFDKNLPNEKVLPKHSLLYEYFTVYNELTKVKYVTEGMRKPAFLSGEQKKAIVDLLFKTNRKVTVKQLKEDYFKKIECFDSVEISGVEDRFNASLGTYHDLLKIIKDKDFLDNEENEDILEDIVLTLTLFEDREMIEERLKTYAHLFDDKVMKQLKRRRYTGWGRLSRKLINGIRDKQSGKTILDFLKSDGFANRNFMQLIHDDSLTFKEDIQKAQVSGQGDSLHEHIANLAGSPAIKKGILQTVKVVDELVKVMGRHKPENIVIEMARENQTTQKGQKNSRERMKRIEEGIKELGSQILKEHPVENTQLQNEKLYLYYLQNGRDMYVDQELDINRLSDYDVDHIVPQSFLKDDSIDNKVLTRSDKARGKSDNVPSEEVVKKMKNYWRQLLNAKLITQRKFDNLTKAERGGLSELDKAGFIKRQLVETRQITKHVAQILDSRMNTKYDENDKLIREVKVITLKSKLVSDFRKDFQFYKVREINNYHHAHDAYLNAVVGTALIKKYPKLESEFVYGDYKVYDVRKMIAKSEQEIGKATAKYFFYSNIMNFFKTEITLANGEIRKRPLIETNGETGEIVWDKGRDFATVRKVLSMPQVNIVKKTEVQTGGFSKESILPKRNSDKLIARKKDWDPKKYGGFDSPTVAYSVLVVAKVEKGKSKKLKSVKELLGITIMERSSFEKNPIDFLEAKGYKEVKKDLIIKLPKYSLFELENGRKRMLASAGELQKGNELALPSKYVNFLYLASHYEKLKGSPEDNEQKQLFVEQHKHYLDEIIEQISEFSKRVILADANLDKVLSAYNKHRDKPIREQAENIIHLFTLTNLGAPAAFKYFDTTIDRKRYTSTKEVLDATLIHQSITGLYETRIDLSQLGGDGGPAPAPAPGGTLNIEDEYRLHETSKEPDVSLGSTWLSDFPQAWAETGGMGLAVRQAPLIIPLKATSTPVSIKQYPMSQEARLGIKPHIQRLLDQGILVPCQSPWNTPLLPVKKPGTNDYRPVQDLREVNKRVEDIHPTVPNPYNLLSGLPPSHQWYTVLDLKDAFFCLRLHPTSQPLFAFEWRDPEMGISGQLTWTRLPQGFKNSPTLFNEALHRDLADFRIQHPDLILLQYVDDLLLAATSELDCQQGTRALLQTLGNLGYRASAKKAQICQKQVKYLGYLLKEGQRWLTEARKETVMGQPTPKTPRQLREFLGKAGFCRLFIPGFAEMAAPLYPLTKPGTLFNWGPDQQKAYQEIKQALLTAPALGLPDLTKPFELFVDEKQGYAKGVLTQKLGPWRRPVAYLSKKLDPVAAGWPPCLRMVAAIAVLTKDAGKLTMGQPLVILAPHAVEALVKQPPDRWLSNARMTHYQALLLDTDRVQFGPVVALNPATLLPLPEEGLQHNCLDILAEAHGTRPDLTDQPLPDADHTWYTDGSSLLQEGQRKAGAAVTTETEVIWAKALPAGTSAQRAELIALTQALKMAEGKKLNVYTDSRYAFATAHIHGEIYRRRGWLTSEGKEIKNKDEILALLKALFLPKRLSIIHCPGHQKGHSAEARGNRMADQAARKAAITETPDTSTLLIENSSPSGGSKRTADGSEFEAGKRTADGSEFEKRTADGSEFESPKKKAKVE

SEQ ID NO: 4509 - protein, 2096 aa, synthetic construct
MPAAKRVKLDGGDKKYSIGLDIGTNSVGWAVITDEYKVPSKKFKVLGNTDRHSIKKNLIGALLFDSGETAEATRLKRTARRRYTRRKNRICYLQEIFSNEMAKVDDSFFHRLEESFLVEEDKKHERHPIFGNIVDEVAYHEKYPTIYHLRKKLVDSTDKADLRLIYLALAHMIKFRGHFLIEGDLNPDNSDVDKLFIQLVQTYNQLFEENPINASGVDAKAILSARLSKSRRLENLIAQLPGEKKNGLFGNLIALSLGLTPNFKSNFDLAEDAKLQLSKDTYDDDLDNLLAQIGDQYADLFLAAKNLSDAILLSDILRVNTEITKAPLSASMIKRYDEHHQDLTLLKALVRQQLPEKYKEIFFDQSKNGYAGYIDGGASQEEFYKFIKPILEKMDGTEELLVKLNREDLLRKQRTFDNGSIPHQIHLGELHAILRRQEDFYPFLKDNREKIEKILTFRIPYYVGPLARGNSRFAWMTRKSEETITPWNFEEVVDKGASAQSFIERMTNFDKNLPNEKVLPKHSLLYEYFTVYNELTKVKYVTEGMRKPAFLSGEQKKAIVDLLFKTNRKVTVKQLKEDYFKKIECFDSVEISGVEDRFNASLGTYHDLLKIIKDKDFLDNEENEDILEDIVLTLTLFEDREMIEERLKTYAHLFDDKVMKQLKRRRYTGWGRLSRKLINGIRDKQSGKTILDFLKSDGFANRNFMQLIHDDSLTFKEDIQKAQVSGQGDSLHEHIANLAGSPAIKKGILQTVKVVDELVKVMGRHKPENIVIEMARENQTTQKGQKNSRERMKRIEEGIKELGSQILKEHPVENTQLQNEKLYLYYLQNGRDMYVDQELDINRLSDYDVDHIVPQSFLKDDSIDNKVLTRSDKARGKSDNVPSEEVVKKMKNYWRQLLNAKLITQRKFDNLTKAERGGLSELDKAGFIKRQLVETRQITKHVAQILDSRMNTKYDENDKLIREVKVITLKSKLVSDFRKDFQFYKVREINNYHHAHDAYLNAVVGTALIKKYPKLESEFVYGDYKVYDVRKMIAKSEQEIGKATAKYFFYSNIMNFFKTEITLANGEIRKRPLIETNGETGEIVWDKGRDFATVRKVLSMPQVNIVKKTEVQTGGFSKESILPKRNSDKLIARKKDWDPKKYGGFDSPTVAYSVLVVAKVEKGKSKKLKSVKELLGITIMERSSFEKNPIDFLEAKGYKEVKKDLIIKLPKYSLFELENGRKRMLASAGELQKGNELALPSKYVNFLYLASHYEKLKGSPEDNEQKQLFVEQHKHYLDEIIEQISEFSKRVILADANLDKVLSAYNKHRDKPIREQAENIIHLFTLTNLGAPAAFKYFDTTIDRKRYTSTKEVLDATLIHQSITGLYETRIDLSQLGGDGGPAPAPAPAPAPAPGGVLNLEEEYRLHEKPVPSSIDPSWLQLFPTVWAERAGMGLANQVPPVVVELRSGASPVAVRQYPMSKEAREGIRPHIQRFLDLGVLVPCQSPWNTPLLPVKKPGTNDYRPVQDLREINKRVQDIHPTVPNPYNLLSSLPPSHTWYSVLDLKDAFFCLKLHPNSQPLFAFEWRDPEKGNTGQLTWTRLPQGFKNSPTLFNEALHRDLAPFRALNPQVVLLQYVDDLLVAAPTYRDCKEGTQKLLQELSKLGYRVSAKKAQLCQKEVTYLGYLLKEGKRWLTPARKATVMKIPPPTTPRQVREFLGTAGFCRLWIPGFASLAAPLYPLTKPSIPFIWTEEHQKAFDRIKEALLSAPALALPDLTKPFTLYVDERAGVARGVLTQTLGPWRRPVAYLSKKLDPVASGWPTCLKAVAAVALLLKDADKLTLGQNVTVIASHSLESIVRQPPDRWMTNARMTHYQSLLLNERVSFAPPAVLNPATLLPVESEATPVHRCSEILAEETGTRRDLKDQPLPGVPAWYTDGSSFIAEGKRRAGAAIVDGKRTVWASSLPEGTSAQKAELVALTQALRLAEGKDINIYTDSRYAFATAHIHGAIYKQRGWLTSAGKDIKNKEEILALLEAIHLPKRVAIIHCPGHQKGNDPVATGNRRADEAAKQAALSTRVLAETTKPAGKRTADGSEFEKRTADGSEFESPKKKAKVE

SEQ ID NO: 4510 - protein, 2098 aa, synthetic construct
MPAAKRVKLDGGDKKYSIGLDIGTNSVGWAVITDEYKVPSKKFKVLGNTDRHSIKKNLIGALLFDSGETAEATRLKRTARRRYTRRKNRICYLQEIFSNEMAKVDDSFFHRLEESFLVEEDKKHERHPIFGNIVDEVAYHEKYPTIYHLRKKLVDSTDKADLRLIYLALAHMIKFRGHFLIEGDLNPDNSDVDKLFIQLVQTYNQLFEENPINASGVDAKAILSARLSKSRRLENLIAQLPGEKKNGLFGNLIALSLGLTPNFKSNFDLAEDAKLQLSKDTYDDDLDNLLAQIGDQYADLFLAAKNLSDAILLSDILRVNTEITKAPLSASMIKRYDEHHQDLTLLKALVRQQLPEKYKEIFFDQSKNGYAGYIDGGASQEEFYKFIKPILEKMDGTEELLVKLNREDLLRKQRTFDNGSIPHQIHLGELHAILRRQEDFYPFLKDNREKIEKILTFRIPYYVGPLARGNSRFAWMTRKSEETITPWNFEEVVDKGASAQSFIERMTNFDKNLPNEKVLPKHSLLYEYFTVYNELTKVKYVTEGMRKPAFLSGEQKKAIVDLLFKTNRKVTVKQLKEDYFKKIECFDSVEISGVEDRFNASLGTYHDLLKIIKDKDFLDNEENEDILEDIVLTLTLFEDREMIEERLKTYAHLFDDKVMKQLKRRRYTGWGRLSRKLINGIRDKQSGKTILDFLKSDGFANRNFMQLIHDDSLTFKEDIQKAQVSGQGDSLHEHIANLAGSPAIKKGILQTVKVVDELVKVMGRHKPENIVIEMARENQTTQKGQKNSRERMKRIEEGIKELGSQILKEHPVENTQLQNEKLYLYYLQNGRDMYVDQELDINRLSDYDVDHIVPQSFLKDDSIDNKVLTRSDKARGKSDNVPSEEVVKKMKNYWRQLLNAKLITQRKFDNLTKAERGGLSELDKAGFIKRQLVETRQITKHVAQILDSRMNTKYDENDKLIREVKVITLKSKLVSDFRKDFQFYKVREINNYHHAHDAYLNAVVGTALIKKYPKLESEFVYGDYKVYDVRKMIAKSEQEIGKATAKYFFYSNIMNFFKTEITLANGEIRKRPLIETNGETGEIVWDKGRDFATVRKVLSMPQVNIVKKTEVQTGGFSKESILPKRNSDKLIARKKDWDPKKYGGFDSPTVAYSVLVVAKVEKGKSKKLKSVKELLGITIMERSSFEKNPIDFLEAKGYKEVKKDLIIKLPKYSLFELENGRKRMLASAGELQKGNELALPSKYVNFLYLASHYEKLKGSPEDNEQKQLFVEQHKHYLDEIIEQISEFSKRVILADANLDKVLSAYNKHRDKPIREQAENIIHLFTLTNLGAPAAFKYFDTTIDRKRYTSTKEVLDATLIHQSITGLYETRIDLSQLGGDGGPAPAPAPAPAPAPGGTLNIEDEYRLHETSKEPDVPLGSTWLSDFPQAWAETGGMGLAVRQAPLIIPLKATSTPVSIKQYPMSQEARLGIKPHIQRLLDQGILVPCQSPWNTPLLPVKKPGTNDYRPVQDLREVNKRVEDIHPTVPNPYNLLSGLPPSHQWYTVLDLKDAFFCLRLHPTSQPLFAFEWRDPEMGISGQLTWTRLPQGFKNSPTLFNEALHRDLADFRIQHPDLILLQYVDDLLLAATSEQDCQRGTRALLQTLGNLGYRASAKKAQICQKQVKYLGYLLKEGQRWLTEARKETVMGQPTPKTPRQLREFLGTAGFCRLWIPGFAEMAAPLYPLTKPGTLFNWGPDQQKAYQEIKQALLTAPALGLPDLTKPFELFVDEKQGYAKGVLTQKLGPWRRPVAYLSKKLDPVAAGWPPCLRMVAAIAVLTKDAGKLTMGQPLVILAPHAVEALVKQPPDRWLSNARMTHYQAMLLDTDRVQFGPVVALNPATLLPLPEKEAPHDCLEILAETHGTRPDLTDQPIPDADYTWYTDGSSFLQEGQRRAGAAVTTETEVIWARALPAGTSAQRAELIALTQALKMAEGKKLNVYTDSRYAFATAHVHGEIYRRRGWLTSEGREIKNKNEILALLKALFLPKRLSIIHCPGHQKGNSAEARGNRMADQAAREAAMKAVLETSTLLAGKRTADGSEFEKRTADGSEFESPKKKAKVE

SEQ ID NO: 4511 - protein, 2091 aa, synthetic construct
MPAAKRVKLDGGDKKYSIGLDIGTNSVGWAVITDEYKVPSKKFKVLGNTDRHSIKKNLIGALLFDSGETAEATRLKRTARRRYTRRKNRICYLQEIFSNEMAKVDDSFFHRLEESFLVEEDKKHERHPIFGNIVDEVAYHEKYPTIYHLRKKLVDSTDKADLRLIYLALAHMIKFRGHFLIEGDLNPDNSDVDKLFIQLVQTYNQLFEENPINASGVDAKAILSARLSKSRRLENLIAQLPGEKKNGLFGNLIALSLGLTPNFKSNFDLAEDAKLQLSKDTYDDDLDNLLAQIGDQYADLFLAAKNLSDAILLSDILRVNTEITKAPLSASMIKRYDEHHQDLTLLKALVRQQLPEKYKEIFFDQSKNGYAGYIDGGASQEEFYKFIKPILEKMDGTEELLVKLNREDLLRKQRTFDNGSIPHQIHLGELHAILRRQEDFYPFLKDNREKIEKILTFRIPYYVGPLARGNSRFAWMTRKSEETITPWNFEEVVDKGASAQSFIERMTNFDKNLPNEKVLPKHSLLYEYFTVYNELTKVKYVTEGMRKPAFLSGEQKKAIVDLLFKTNRKVTVKQLKEDYFKKIECFDSVEISGVEDRFNASLGTYHDLLKIIKDKDFLDNEENEDILEDIVLTLTLFEDREMIEERLKTYAHLFDDKVMKQLKRRRYTGWGRLSRKLINGIRDKQSGKTILDFLKSDGFANRNFMQLIHDDSLTFKEDIQKAQVSGQGDSLHEHIANLAGSPAIKKGILQTVKVVDELVKVMGRHKPENIVIEMARENQTTQKGQKNSRERMKRIEEGIKELGSQILKEHPVENTQLQNEKLYLYYLQNGRDMYVDQELDINRLSDYDVDHIVPQSFLKDDSIDNKVLTRSDKARGKSDNVPSEEVVKKMKNYWRQLLNAKLITQRKFDNLTKAERGGLSELDKAGFIKRQLVETRQITKHVAQILDSRMNTKYDENDKLIREVKVITLKSKLVSDFRKDFQFYKVREINNYHHAHDAYLNAVVGTALIKKYPKLESEFVYGDYKVYDVRKMIAKSEQEIGKATAKYFFYSNIMNFFKTEITLANGEIRKRPLIETNGETGEIVWDKGRDFATVRKVLSMPQVNIVKKTEVQTGGFSKESILPKRNSDKLIARKKDWDPKKYGGFDSPTVAYSVLVVAKVEKGKSKKLKSVKELLGITIMERSSFEKNPIDFLEAKGYKEVKKDLIIKLPKYSLFELENGRKRMLASAGELQKGNELALPSKYVNFLYLASHYEKLKGSPEDNEQKQLFVEQHKHYLDEIIEQISEFSKRVILADANLDKVLSAYNKHRDKPIREQAENIIHLFTLTNLGAPAAFKYFDTTIDRKRYTSTKEVLDATLIHQSITGLYETRIDLSQLGGDGGGGGGGSGGLGIEDEYRLHETSTEPDVSLGSTWLSDFPQAWAETGGMGLAVRQAPLIIPLKATSTPVSIQQYPMSHEARLGIKPHIQRLLDQGILVPCQSPWNTPLLPVKKPGTNDYRPVQDLREVNKRVEDIHPTVPNPYNLLSGLPPSHQWYTVLDLKDAFFCLRLHPTSQPLFAFEWRDPGMGISGQLTWTRLPQGFKNSPTLFNEALHRDLADFRIQHPDLILLQYVDDILLAATSELDCQQGTRALLQTLGDLGYRASAKKAQICQKQVKYLGYLLREGQRWLTEARKETVMGQPVPKTPRQLREFLGKAGFCRLFIPGFAEMAAPLYPLTKPGTLFSWGPDQQKAYQEIKQALLTAPALGLPDLTKPFELFVDEKQGYAKGVLTQKLGPWRRPVAYLSKKLDPVAAGWPPCLRMVAAIAVLTKDAGKLTMGQPLVILAPHAVEALVKQPPDRWLSNARMTHYQAMLLDTDRVQFGPVVALNPATLLPLPEEGAPHDCLEILAETHGTRPDLTDQPIPDADHTWYTDGSSFLQEGQRKAGAAVTTETEVIWAGALPAGTSAQRAELIALTQALKMAEGKRLNVYTDSRYAFATAHIHGEIYRRRGWLTSEGREIKNKSEILALLKALFLPKRLSIIHCLGHQKGDSAEARGNRLADQAAREAAIKTPPDTSTLLIAGKRTADGSEFEKRTADGSEFESPKKKAKVE

SEQ ID NO: 4512 - protein, 2093 aa, synthetic construct
MPAAKRVKLDGGDKKYSIGLDIGTNSVGWAVITDEYKVPSKKFKVLGNTDRHSIKKNLIGALLFDSGETAEATRLKRTARRRYTRRKNRICYLQEIFSNEMAKVDDSFFHRLEESFLVEEDKKHERHPIFGNIVDEVAYHEKYPTIYHLRKKLVDSTDKADLRLIYLALAHMIKFRGHFLIEGDLNPDNSDVDKLFIQLVQTYNQLFEENPINASGVDAKAILSARLSKSRRLENLIAQLPGEKKNGLFGNLIALSLGLTPNFKSNFDLAEDAKLQLSKDTYDDDLDNLLAQIGDQYADLFLAAKNLSDAILLSDILRVNTEITKAPLSASMIKRYDEHHQDLTLLKALVRQQLPEKYKEIFFDQSKNGYAGYIDGGASQEEFYKFIKPILEKMDGTEELLVKLNREDLLRKQRTFDNGSIPHQIHLGELHAILRRQEDFYPFLKDNREKIEKILTFRIPYYVGPLARGNSRFAWMTRKSEETITPWNFEEVVDKGASAQSFIERMTNFDKNLPNEKVLPKHSLLYEYFTVYNELTKVKYVTEGMRKPAFLSGEQKKAIVDLLFKTNRKVTVKQLKEDYFKKIECFDSVEISGVEDRFNASLGTYHDLLKIIKDKDFLDNEENEDILEDIVLTLTLFEDREMIEERLKTYAHLFDDKVMKQLKRRRYTGWGRLSRKLINGIRDKQSGKTILDFLKSDGFANRNFMQLIHDDSLTFKEDIQKAQVSGQGDSLHEHIANLAGSPAIKKGILQTVKVVDELVKVMGRHKPENIVIEMARENQTTQKGQKNSRERMKRIEEGIKELGSQILKEHPVENTQLQNEKLYLYYLQNGRDMYVDQELDINRLSDYDVDHIVPQSFLKDDSIDNKVLTRSDKARGKSDNVPSEEVVKKMKNYWRQLLNAKLITQRKFDNLTKAERGGLSELDKAGFIKRQLVETRQITKHVAQILDSRMNTKYDENDKLIREVKVITLKSKLVSDFRKDFQFYKVREINNYHHAHDAYLNAVVGTALIKKYPKLESEFVYGDYKVYDVRKMIAKSEQEIGKATAKYFFYSNIMNFFKTEITLANGEIRKRPLIETNGETGEIVWDKGRDFATVRKVLSMPQVNIVKKTEVQTGGFSKESILPKRNSDKLIARKKDWDPKKYGGFDSPTVAYSVLVVAKVEKGKSKKLKSVKELLGITIMERSSFEKNPIDFLEAKGYKEVKKDLIIKLPKYSLFELENGRKRMLASAGELQKGNELALPSKYVNFLYLASHYEKLKGSPEDNEQKQLFVEQHKHYLDEIIEQISEFSKRVILADANLDKVLSAYNKHRDKPIREQAENIIHLFTLTNLGAPAAFKYFDTTIDRKRYTSTKEVLDATLIHQSITGLYETRIDLSQLGGDGGEAAAKGSSGGLGIEDEYRLHETSTEPDVSLGSTWLSDFPQAWAETGGMGLAVRQAPLIIPLKATSTPVSIQQYPMSHEARLGIKPHIQRLLDQGILVPCQSPWNTPLLPVKKPGTNDYRPVQDLREVNKRVEDIHPTVPNPYNLLSGLPPSHQWYTVLDLKDAFFCLRLHPTSQPLFAFEWRDPGMGISGQLTWTRLPQGFKNSPTLFNEALHRDLADFRIQHPDLILLQYVDDILLAATSELDCQQGTRALLQTLGDLGYRASAKKAQICQKQVKYLGYLLREGQRWLTEARKETVMGQPVPKTPRQLREFLGKAGFCRLFIPGFAEMAAPLYPLTKPGTLFSWGPDQQKAYQEIKQALLTAPALGLPDLTKPFELFVDEKQGYAKGVLTQKLGPWRRPVAYLSKKLDPVAAGWPPCLRMVAAIAVLTKDAGKLTMGQPLVILAPHAVEALVKQPPDRWLSNARMTHYQAMLLDTDRVQFGPVVALNPATLLPLPEEGAPHDCLEILAETHGTRPDLTDQPIPDADHTWYTDGSSFLQEGQRKAGAAVTTETEVIWAGALPAGTSAQRAELIALTQALKMAEGKRLNVYTDSRYAFATAHIHGEIYRRRGWLTSEGREIKNKSEILALLKALFLPKRLSIIHCLGHQKGDSAEARGNRLADQAAREAAIKTPPDTSTLLIAGKRTADGSEFEKRTADGSEFESPKKKAKVE

SEQ ID NO: 4513 - protein, 2091 aa, synthetic construct
MPAAKRVKLDGGDKKYSIGLDIGTNSVGWAVITDEYKVPSKKFKVLGNTDRHSIKKNLIGALLFDSGETAEATRLKRTARRRYTRRKNRICYLQEIFSNEMAKVDDSFFHRLEESFLVEEDKKHERHPIFGNIVDEVAYHEKYPTIYHLRKKLVDSTDKADLRLIYLALAHMIKFRGHFLIEGDLNPDNSDVDKLFIQLVQTYNQLFEENPINASGVDAKAILSARLSKSRRLENLIAQLPGEKKNGLFGNLIALSLGLTPNFKSNFDLAEDAKLQLSKDTYDDDLDNLLAQIGDQYADLFLAAKNLSDAILLSDILRVNTEITKAPLSASMIKRYDEHHQDLTLLKALVRQQLPEKYKEIFFDQSKNGYAGYIDGGASQEEFYKFIKPILEKMDGTEELLVKLNREDLLRKQRTFDNGSIPHQIHLGELHAILRRQEDFYPFLKDNREKIEKILTFRIPYYVGPLARGNSRFAWMTRKSEETITPWNFEEVVDKGASAQSFIERMTNFDKNLPNEKVLPKHSLLYEYFTVYNELTKVKYVTEGMRKPAFLSGEQKKAIVDLLFKTNRKVTVKQLKEDYFKKIECFDSVEISGVEDRFNASLGTYHDLLKIIKDKDFLDNEENEDILEDIVLTLTLFEDREMIEERLKTYAHLFDDKVMKQLKRRRYTGWGRLSRKLINGIRDKQSGKTILDFLKSDGFANRNFMQLIHDDSLTFKEDIQKAQVSGQGDSLHEHIANLAGSPAIKKGILQTVKVVDELVKVMGRHKPENIVIEMARENQTTQKGQKNSRERMKRIEEGIKELGSQILKEHPVENTQLQNEKLYLYYLQNGRDMYVDQELDINRLSDYDVDHIVPQSFLKDDSIDNKVLTRSDKARGKSDNVPSEEVVKKMKNYWRQLLNAKLITQRKFDNLTKAERGGLSELDKAGFIKRQLVETRQITKHVAQILDSRMNTKYDENDKLIREVKVITLKSKLVSDFRKDFQFYKVREINNYHHAHDAYLNAVVGTALIKKYPKLESEFVYGDYKVYDVRKMIAKSEQEIGKATAKYFFYSNIMNFFKTEITLANGEIRKRPLIETNGETGEIVWDKGRDFATVRKVLSMPQVNIVKKTEVQTGGFSKESILPKRNSDKLIARKKDWDPKKYGGFDSPTVAYSVLVVAKVEKGKSKKLKSVKELLGITIMERSSFEKNPIDFLEAKGYKEVKKDLIIKLPKYSLFELENGRKRMLASAGELQKGNELALPSKYVNFLYLASHYEKLKGSPEDNEQKQLFVEQHKHYLDEIIEQISEFSKRVILADANLDKVLSAYNKHRDKPIREQAENIIHLFTLTNLGAPAAFKYFDTTIDRKRYTSTKEVLDATLIHQSITGLYETRIDLSQLGGDGGPAPGSSGGTLNIEDEHRLHETSKEPDVSLGSTWLSDFPQAWAETGGMGLAVRQAPLIIPLKATSTPVSIKQYPMSQEARLGIKPHIQRLLDQGILVPCQSPWNTPLLPVKKPGTNDYRPVQDLREVNKRVEDIHPTVPNPYNLLSGLPPSHQWYTVLDLKDAFFCLRLHPTSQPLFAFEWRDPEMGISGQLTWTRLPQGFKNSPTLFNEALHRDLADFRIQHPDLILLQYVDDLLLAATSELDCQQGTRALLQTLGNLGYRASAKKAQICQKQVKYLGYLLKEGQRWLTEARKETVMGQPTPKTPRQLREFLGKAGFCRLFIPGFAEMAAPLYPLTKPGTLFNWGPDQQKAYQEIKQALLTAPALGLPDLTKPFELFVDEKQGYAKGVLTQKLGPWRRPVAYLSKKLDPVAAGWPPCLRMVAAIAVLTKDAGKLTMGQPLVILAPHAVEALVKQPPDRWLSNARMTHYQALLLDTDRVQFGPVVALNPATLLPLPEEGLQHNCLDILAEAHGTRPDLTDQPLPDADHTWYTDGSSLLQEGQRKAGAAVTTETEVIWAKALPAGTSAQRAELIALTQALKMAEGKKLNVYTDSRYAFATAHIHGEIYRRRGWLTSEGKEIKNKDEILALLKALFLPKRLSIIHCPGHQKGHSAEARGNRMADQAARKAAITETPDTSTLLAGKRTADGSEFEKRTADGSEFESPKKKAKVE

SEQ ID NO: 4514 - protein, 2091 aa, synthetic construct; identical to SEQ ID NO: 4513

SEQ ID NO: 4515 - protein, 2091 aa, synthetic construct
MPAAKRVKLDGGDKKYSIGLDIGTNSVGWAVITDEYKVPSKKFKVLGNTDRHSIKKNLIGALLFDSGETAEATRLKRTARRRYTRRKNRICYLQEIFSNEMAKVDDSFFHRLEESFLVEEDKKHERHPIFGNIVDEVAYHEKYPTIYHLRKKLVDSTDKADLRLIYLALAHMIKFRGHFLIEGDLNPDNSDVDKLFIQLVQTYNQLFEENPINASGVDAKAILSARLSKSRRLENLIAQLPGEKKNGLFGNLIALSLGLTPNFKSNFDLAEDAKLQLSKDTYDDDLDNLLAQIGDQYADLFLAAKNLSDAILLSDILRVNTEITKAPLSASMIKRYDEHHQDLTLLKALVRQQLPEKYKEIFFDQSKNGYAGYIDGGASQEEFYKFIKPILEKMDGTEELLVKLNREDLLRKQRTFDNGSIPHQIHLGELHAILRRQEDFYPFLKDNREKIEKILTFRIPYYVGPLARGNSRFAWMTRKSEETITPWNFEEVVDKGASAQSFIERMTNFDKNLPNEKVLPKHSLLYEYFTVYNELTKVKYVTEGMRKPAFLSGEQKKAIVDLLFKTNRKVTVKQLKEDYFKKIECFDSVEISGVEDRFNASLGTYHDLLKIIKDKDFLDNEENEDILEDIVLTLTLFEDREMIEERLKTYAHLFDDKVMKQLKRRRYTGWGRLSRKLINGIRDKQSGKTILDFLKSDGFANRNFMQLIHDDSLTFKEDIQKAQVSGQGDSLHEHIANLAGSPAIKKGILQTVKVVDELVKVMGRHKPENIVIEMARENQTTQKGQKNSRERMKRIEEGIKELGSQILKEHPVENTQLQNEKLYLYYLQNGRDMYVDQELDINRLSDYDVDHIVPQSFLKDDSIDNKVLTRSDKARGKSDNVPSEEVVKKMKNYWRQLLNAKLITQRKFDNLTKAERGGLSELDKAGFIKRQLVETRQITKHVAQILDSRMNTKYDENDKLIREVKVITLKSKLVSDFRKDFQFYKVREINNYHHAHDAYLNAVVGTALIKKYPKLESEFVYGDYKVYDVRKMIAKSEQEIGKATAKYFFYSNIMNFFKTEITLANGEIRKRPLIETNGETGEIVWDKGRDFATVRKVLSMPQVNIVKKTEVQTGGFSKESILPKRNSDKLIARKKDWDPKKYGGFDSPTVAYSVLVVAKVEKGKSKKLKSVKELLGITIMERSSFEKNPIDFLEAKGYKEVKKDLIIKLPKYSLFELENGRKRMLASAGELQKGNELALPSKYVNFLYLASHYEKLKGSPEDNEQKQLFVEQHKHYLDEIIEQISEFSKRVILADANLDKVLSAYNKHRDKPIREQAENIIHLFTLTNLGAPAAFKYFDTTIDRKRYTSTKEVLDATLIHQSITGLYETRIDLSQLGGDGGEAAAKPAPGGVLNLEEEYRLHEKPVPSSIDPSWLQLFPTVWAERAGMGLANQVPPVVVELRSGASPVAVRQYPMSKEAREGIRPHIQRFLDLGVLVPCQSPWNTPLLPVKKPGTNDYRPVQDLREINKRVQDIHPTVPNPYNLLSSLPPSHTWYSVLDLKDAFFCLKLHPNSQPLFAFEWRDPEKGNTGQLTWTRLPQGFKNSPTLFNEALHRDLAPFRALNPQVVLLQYVDDLLVAAPTYRDCKEGTQKLLQELSKLGYRVSAKKAQLCQKEVTYLGYLLKEGKRWLTPARKATVMKIPPPTTPRQVREFLGKAGFCRLFIPGFASLAAPLYPLTKPSIPFIWTEEHQKAFDRIKEALLSAPALALPDLTKPFTLYVDERAGVARGVLTQTLGPWRRPVAYLSKKLDPVASGWPTCLKAVAAVALLLKDADKLTLGQNVTVIASHSLESIVRQPPDRWMTNARMTHYQSLLLNERVSFAPPAVLNPATLLPVESEATPVHRCSEILAEETGTRRDLKDQPLPGVPAWYTDGSSFIAEGKRRAGAAIVDGKRTVWASSLPEGTSAQKAELVALTQALRLAEGKDINIYTDSRYAFATAHIHGAIYKQRGWLTSAGKDIKNKEEILALLEAIHLPKRVAIIHCPGHQKGNDPVATGNRRADEAAKQAALSTRVLAETTKPAGKRTADGSEFEKRTADGSEFESPKKKAKVE

SEQ ID NO: 4516 - protein, 2093 aa, synthetic construct
MPAAKRVKLDGGDKKYSIGLDIGTNSVGWAVITDEYKVPSKKFKVLGNTDRHSIKKNLIGALLFDSGETAEATRLKRTARRRYTRRKNRICYLQEIFSNEMAKVDDSFFHRLEESFLVEEDKKHERHPIFGNIVDEVAYHEKYPTIYHLRKKLVDSTDKADLRLIYLALAHMIKFRGHFLIEGDLNPDNSDVDKLFIQLVQTYNQLFEENPINASGVDAKAILSARLSKSRRLENLIAQLPGEKKNGLFGNLIALSLGLTPNFKSNFDLAEDAKLQLSKDTYDDDLDNLLAQIGDQYADLFLAAKNLSDAILLSDILRVNTEITKAPLSASMIKRYDEHHQDLTLLKALVRQQLPEKYKEIFFDQSKNGYAGYIDGGASQEEFYKFIKPILEKMDGTEELLVKLNREDLLRKQRTFDNGSIPHQIHLGELHAILRRQEDFYPFLKDNREKIEKILTFRIPYYVGPLARGNSRFAWMTRKSEETITPWNFEEVVDKGASAQSFIERMTNFDKNLPNEKVLPKHSLLYEYFTVYNELTKVKYVTEGMRKPAFLSGEQKKAIVDLLFKTNRKVTVKQLKEDYFKKIECFDSVEISGVEDRFNASLGTYHDLLKIIKDKDFLDNEENEDILEDIVLTLTLFEDREMIEERLKTYAHLFDDKVMKQLKRRRYTGWGRLSRKLINGIRDKQSGKTILDFLKSDGFANRNFMQLIHDDSLTFKEDIQKAQVSGQGDSLHEHIANLAGSPAIKKGILQTVKVVDELVKVMGRHKPENIVIEMARENQTTQKGQKNSRERMKRIEEGIKELGSQILKEHPVENTQLQNEKLYLYYLQNGRDMYVDQELDINRLSDYDVDHIVPQSFLKDDSIDNKVLTRSDKARGKSDNVPSEEVVKKMKNYWRQLLNAKLITQRKFDNLTKAERGGLSELDKAGFIKRQLVETRQITKHVAQILDSRMNTKYDENDKLIREVKVITLKSKLVSDFRKDFQFYKVREINNYHHAHDAYLNAVVGTALIKKYPKLESEFVYGDYKVYDVRKMIAKSEQEIGKATAKYFFYSNIMNFFKTEITLANGEIRKRPLIETNGETGEIVWDKGRDFATVRKVLSMPQVNIVKKTEVQTGGFSKESILPKRNSDKLIARKKDWDPKKYGGFDSPTVAYSVLVVAKVEKGKSKKLKSVKELLGITIMERSSFEKNPIDFLEAKGYKEVKKDLIIKLPKYSLFELENGRKRMLASAGELQKGNELALPSKYVNFLYLASHYEKLKGSPEDNEQKQLFVEQHKHYLDEIIEQISEFSKRVILADANLDKVLSAYNKHRDKPIREQAENIIHLFTLTNLGAPAAFKYFDTTIDRKRYTSTKEVLDATLIHQSITGLYETRIDLSQLGGDGGPAPEAAAKGGLGIEDEYRLHETSTEPDVSLGSTWLSDFPQAWAETGGMGLAVRQAPLIIPLKATSTPVSIQQYPMSHEARLGIKPHIQRLLDQGILVPCQSPWNTPLLPVKKPGTNDYRPVQDLREVNKRVEDIHPTVPNPYNLLSGLPPSHQWYTVLDLKDAFFCLRLHPTSQPLFAFEWRDPGMGISGQLTWTRLPQGFKNSPTLFNEALHRDLADFRIQHPDLILLQYVDDILLAATSELDCQQGTRALLQTLGDLGYRASAKKAQICQKQVKYLGYLLREGQRWLTEARKETVMGQPVPKTPRQLREFLGKAGFCRLFIPGFAEMAAPLYPLTKPGTLFSWGPDQQKAYQEIKQALLTAPALGLPDLTKPFELFVDEKQGYAKGVLTQKLGPWRRPVAYLSKKLDPVAAGWPPCLRMVAAIAVLTKDAGKLTMGQPLVILAPHAVEALVKQPPDRWLSNARMTHYQAMLLDTDRVQFGPVVALNPATLLPLPEEGAPHDCLEILAETHGTRPDLTDQPIPDADHTWYTDGSSFLQEGQRKAGAAVTTETEVIWAGALPAGTSAQRAELIALTQALKMAEGKRLNVYTDSRYAFATAHIHGEIYRRRGWLTSEGREIKNKSEILALLKALFLPKRLSIIHCLGHQKGDSAEARGNRLADQAAREAAIKTPPDTSTLLIAGKRTADGSEFEKRTADGSEFESPKKKAKVE

SEQ ID NO: 4517 - protein, 2094 aa, synthetic construct
MPAAKRVKLDGGDKKYSIGLDIGTNSVGWAVITDEYKVPSKKFKVLGNTDRHSIKKNLIGALLFDSGETAEATRLKRTARRRYTRRKNRICYLQEIFSNEMAKVDDSFFHRLEESFLVEEDKKHERHPIFGNIVDEVAYHEKYPTIYHLRKKLVDSTDKADLRLIYLALAHMIKFRGHFLIEGDLNPDNSDVDKLFIQLVQTYNQLFEENPINASGVDAKAILSARLSKSRRLENLIAQLPGEKKNGLFGNLIALSLGLTPNFKSNFDLAEDAKLQLSKDTYDDDLDNLLAQIGDQYADLFLAAKNLSDAILLSDILRVNTEITKAPLSASMIKRYDEHHQDLTLLKALVRQQLPEKYKEIFFDQSKNGYAGYIDGGASQEEFYKFIKPILEKMDGTEELLVKLNREDLLRKQRTFDNGSIPHQIHLGELHAILRRQEDFYPFLKDNREKIEKILTFRIPYYVGPLARGNSRFAWMTRKSEETITPWNFEEVVDKGASAQSFIERMTNFDKNLPNEKVLPKHSLLYEYFTVYNELTKVKYVTEGMRKPAFLSGEQKKAIVDLLFKTNRKVTVKQLKEDYFKKIECFDSVEISGVEDRFNASLGTYHDLLKIIKDKDFLDNEENEDILEDIVLTLTLFEDREMIEERLKTYAHLFDDKVMKQLKRRRYTGWGRLSRKLINGIRDKQSGKTILDFLKSDGFANRNFMQLIHDDSLTFKEDIQKAQVSGQGDSLHEHIANLAGSPAIKKGILQTVKVVDELVKVMGRHKPENIVIEMARENQTTQKGQKNSRERMKRIEEGIKELGSQILKEHPVENTQLQNEKLYLYYLQNGRDMYVDQELDINRLSDYDVDHIVPQSFLKDDSIDNKVLTRSDKARGKSDNVPSEEVVKKMKNYWRQLLNAKLITQRKFDNLTKAERGGLSELDKAGFIKRQLVETRQITKHVAQILDSRMNTKYDENDKLIREVKVITLKSKLVSDFRKDFQFYKVREINNYHHAHDAYLNAVVGTALIKKYPKLESEFVYGDYKVYDVRKMIAKSEQEIGKATAKYFFYSNIMNFFKTEITLANGEIRKRPLIETNGETGEIVWDKGRDFATVRKVLSMPQVNIVKKTEVQTGGFSKESILPKRNSDKLIARKKDWDPKKYGGFDSPTVAYSVLVVAKVEKGKSKKLKSVKELLGITIMERSSFEKNPIDFLEAKGYKEVKKDLIIKLPKYSLFELENGRKRMLASAGELQKGNELALPSKYVNFLYLASHYEKLKGSPEDNEQKQLFVEQHKHYLDEIIEQISEFSKRVILADANLDKVLSAYNKHRDKPIREQAENIIHLFTLTNLGAPAAFKYFDTTIDRKRYTSTKEVLDATLIHQSITGLYETRIDLSQLGGDGGGSSGGGGGSGGLGIEDEYRLHETSTEPDVSLGSTWLSDFPQAWAETGGMGLAVRQAPLIIPLKATSTPVSIQQYPMSHEARLGIKPHIQRLLDQGILVPCQSPWNTPLLPVKKPGTNDYRPVQDLREVNKRVEDIHPTVPNPYNLLSGLPPSHQWYTVLDLKDAFFCLRLHPTSQPLFAFEWRDPGMGISGQLTWTRLPQGFKNSPTLFNEALHRDLADFRIQHPDLILLQYVDDILLAATSELDCQQGTRALLQTLGDLGYRASAKKAQICQKQVKYLGYLLREGQRWLTEARKETVMGQPVPKTPRQLREFLGKAGFCRLFIPGFAEMAAPLYPLTKPGTLFSWGPDQQKAYQEIKQALLTAPALGLPDLTKPFELFVDEKQGYAKGVLTQKLGPWRRPVAYLSKKLDPVAAGWPPCLRMVAAIAVLTKDAGKLTMGQPLVILAPHAVEALVKQPPDRWLSNARMTHYQAMLLDTDRVQFGPVVALNPATLLPLPEEGAPHDCLEILAETHGTRPDLTDQPIPDADHTWYTDGSSFLQEGQRKAGAAVTTETEVIWAGALPAGTSAQRAELIALTQALKMAEGKRLNVYTDSRYAFATAHIHGEIYRRRGWLTSEGREIKNKSEILALLKALFLPKRLSIIHCLGHQKGDSAEARGNRLADQAAREAAIKTPPDTSTLLIAGKRTADGSEFEKRTADGSEFESPKKKAKVE

SEQ ID NO: 4518 - protein, 2094 aa, synthetic construct
MPAAKRVKLDGGDKKYSIGLDIGTNSVGWAVITDEYKVPSKKFKVLGNTDRHSIKKNLIGALLFDSGETAEATRLKRTARRRYTRRKNRICYLQEIFSNEMAKVDDSFFHRLEESFLVEEDKKHERHPIFGNIVDEVAYHEKYPTIYHLRKKLVDSTDKADLRLIYLALAHMIKFRGHFLIEGDLNPDNSDVDKLFIQLVQTYNQLFEENPINASGVDAKAILSARLSKSRRLENLIAQLPGEKKNGLFGNLIALSLGLTPNFKSNFDLAEDAKLQLSKDTYDDDLDNLLAQIGDQYADLFLAAKNLSDAILLSDILRVNTEITKAPLSASMIKRYDEHHQDLTLLKALVRQQLPEKYKEIFFDQSKNGYAGYIDGGASQEEFYKFIKPILEKMDGTEELLVKLNREDLLRKQRTFDNGSIPHQIHLGELHAILRRQEDFYPFLKDNREKIEKILTFRIPYYVGPLARGNSRFAWMTRKSEETITPWNFEEVVDKGASAQSFIERMTNFDKNLPNEKVLPKHSLLYEYFTVYNELTKVKYVTEGMRKPAFLSGEQKKAIVDLLFKTNRKVTVKQLKEDYFKKIECFDSVEISGVEDRFNASLGTYHDLLKIIKDKDFLDNEENEDILEDIVLTLTLFEDREMIEERLKTYAHLFDDKVMKQLKRRRYTGWGRLSRKLINGIRDKQSGKTILDFLKSDGFANRNFMQLIHDDSLTFKEDIQKAQVSGQGDSLHEHIANLAGSPAIKKGILQTVKVVDELVKVMGRHKPENIVIEMARENQTTQKGQKNSRERMKRIEEGIKELGSQILKEHPVENTQLQNEKLYLYYLQNGRDMYVDQELDINRLSDYDVDHIVPQSFLKDDSIDNKVLTRSDKARGKSDNVPSEEVVKKMKNYWRQLLNAKLITQRKFDNLTKAERGGLSELDKAGFIKRQLVETRQITKHVAQILDSRMNTKYDENDKLIREVKVITLKSKLVSDFRKDFQFYKVREINNYHHAHDAYLNAVVGTALIKKYPKLESEFVYGDYKVYDVRKMIAKSEQEIGKATAKYFFYSNIMNFFKTEITLANGEIRKRPLIETNGETGEIVWDKGRDFATVRKVLSMPQVNIVKKTEVQTGGFSKESILPKRNSDKLIARKKDWDPKKYGGFDSPTVAYSVLVVAKVEKGKSKKLKSVKELLGITIMERSSFEKNPIDFLEAKGYKEVKKDLIIKLPKYSLFELENGRKRMLASAGELQKGNELALPSKYVNFLYLASHYEKLKGSPEDNEQKQLFVEQHKHYLDEIIEQISEFSKRVILADANLDKVLSAYNKHRDKPIREQAENIIHLFTLTNLGAPAAFKYFDTTIDRKRYTSTKEVLDATLIHQSITGLYETRIDLSQLGGDGGGSSGGGGGSGGTLNIEDEYRLHETSKEPDVPLGSTWLSDFPQAWAETGGMGLAVRQAPLIIPLKATSTPVSIKQYPMSQEARLGIKPHIQRLLDQGILVPCQSPWNTPLLPVKKPGTNDYRPVQDLREVNKRVEDIHPTVPNPYNLLSGLPPSHQWYTVLDLKDAFFCLRLHPTSQPLFAFEWRDPEMGISGQLTWTRLPQGFKNSPTLFNEALHRDLADFRIQHPDLILLQYVDDLLLAATSEQDCQRGTRALLQTLGNLGYRASAKKAQICQKQVKYLGYLLKEGQRWLTEARKETVMGQPTPKTPRQLREFLGKAGFCRLFIPGFAEMAAPLYPLTKPGTLFNWGPDQQKAYQEIKQALLTAPALGLPDLTKPFELFVDEKQGYAKGVLTQKLGPWRRPVAYLSKKLDPVAAGWPPCLRMVAAIAVLTKDAGKLTMGQPLVILAPHAVEALVKQPPDRWLSNARMTHYQAMLLDTDRVQFGPVVALNPATLLPLPEKEAPHDCLEILAETHGTRPDLTDQPIPDADYTWYTDGSSFLQEGQRRAGAAVTTETEVIWARALPAGTSAQRAELIALTQALKMAEGKKLNVYTDSRYAFATAHVHGEIYRRRGWLTSEGREIKNKNEILALLKALFLPKRLSIIHCPGHQKGNSAEARGNRMADQAAREAAMKAVLETSTLLAGKRTADGSEFEKRTADGSEFESPKKKAKVE

SEQ ID NO: 4519 - protein, 2096 aa, synthetic construct
MPAAKRVKLDGGDKKYSIGLDIGTNSVGWAVITDEYKVPSKKFKVLGNTDRHSIKKNLIGALLFDSGETAEATRLKRTARRRYTRRKNRICYLQEIFSNEMAKVDDSFFHRLEESFLVEEDKKHERHPIFGNIVDEVAYHEKYPTIYHLRKKLVDSTDKADLRLIYLALAHMIKFRGHFLIEGDLNPDNSDVDKLFIQLVQTYNQLFEENPINASGVDAKAILSARLSKSRRLENLIAQLPGEKKNGLFGNLIALSLGLTPNFKSNFDLAEDAKLQLSKDTYDDDLDNLLAQIGDQYADLFLAAKNLSDAILLSDILRVNTEITKAPLSASMIKRYDEHHQDLTLLKALVRQQLPEKYKEIFFDQSKNGYAGYIDGGASQEEFYKFIKPILEKMDGTEELLVKLNREDLLRKQRTFDNGSIPHQIHLGELHAILRRQEDFYPFLKDNREKIEKILTFRIPYYVGPLARGNSRFAWMTRKSEETITPWNFEEVVDKGASAQSFIERMTNFDKNLPNEKVLPKHSLLYEYFTVYNELTKVKYVTEGMRKPAFLSGEQKKAIVDLLFKTNRKVTVKQLKEDYFKKIECFDSVEISGVEDRFNASLGTYHDLLKIIKDKDFLDNEENEDILEDIVLTLTLFEDREMIEERLKTYAHLFDDKVMKQLKRRRYTGWGRLSRKLINGIRDKQSGKTILDFLKSDGFANRNFMQLIHDDSLTFKEDIQKAQVSGQGDSLHEHIANLAGSPAIKKGILQTVKVVDELVKVMGRHKPENIVIEMARENQTTQKGQKNSRERMKRIEEGIKELGSQILKEHPVENTQLQNEKLYLYYLQNGRDMYVDQELDINRLSDYDVDHIVPQSFLKDDSIDNKVLTRSDKARGKSDNVPSEEVVKKMKNYWRQLLNAKLITQRKFDNLTKAERGGLSELDKAGFIKRQLVETRQITKHVAQILDSRMNTKYDENDKLIREVKVITLKSKLVSDFRKDFQFYKVREINNYHHAHDAYLNAVVGTALIKKYPKLESEFVYGDYKVYDVRKMIAKSEQEIGKATAKYFFYSNIMNFFKTEITLANGEIRKRPLIETNGETGEIVWDKGRDFATVRKVLSMPQVNIVKKTEVQTGGFSKESILPKRNSDKLIARKKDWDPKKYGGFDSPTVAYSVLVVAKVEKGKSKKLKSVKELLGITIMERSSFEKNPIDFLEAKGYKEVKKDLIIKLPKYSLFELENGRKRMLASAGELQKGNELALPSKYVNFLYLASHYEKLKGSPEDNEQKQLFVEQHKHYLDEIIEQISEFSKRVILADANLDKVLSAYNKHRDKPIREQAENIIHLFTLTNLGAPAAFKYFDTTIDRKRYTSTKEVLDATLIHQSITGLYETRIDLSQLGGDGGGGGGGSEAAAKGGTLNIEDEYRLHETSKEPDVPLGSTWLSDFPQAWAETGGMGLAVRQAPLIIPLKATSTPVSIKQYPMSQEARLGIKPHIQRLLDQGILVPCQSPWNTPLLPVKKPGTNDYRPVQDLREVNKRVEDIHPTVPNPYNLLSGLPPSHQWYTVLDLKDAFFCLRLHPTSQPLFAFEWRDPEMGISGQLTWTRLPQGFKNSPTLFNEALHRDLADFRIQHPDLILLQYVDDLLLAATSEQDCQRGTRALLQTLGNLGYRASAKKAQICQKQVKYLGYLLKEGQRWLTEARKETVMGQPTPKTPRQLREFLGKAGFCRLFIPGFAEMAAPLYPLTKPGTLFNWGPDQQKAYQEIKQALLTAPALGLPDLTKPFELFVDEKQGYAKGVLTQKLGPWRRPVAYLSKKLDPVAAGWPPCLRMVAAIAVLTKDAGKLTMGQPLVILAPHAVEALVKQPPDRWLSNARMTHYQAMLLDTDRVQFGPVVALNPATLLPLPEKEAPHDCLEILAETHGTRPDLTDQPIPDADYTWYTDGSSFLQEGQRRAGAAVTTETEVIWARALPAGTSAQRAELIALTQALKMAEGKKLNVYTDSRYAFATAHVHGEIYRRRGWLTSEGREIKNKNEILALLKALFLPKRLSIIHCPGHQKGNSAEARGNRMADQAAREAAMKAVLETSTLLAGKRTADGSEFEKRTADGSEFESPKKKAKVE

SEQ ID NO: 4520 - protein, 2094 aa, synthetic construct
MPAAKRVKLDGGDKKYSIGLDIGTNSVGWAVITDEYKVPSKKFKVLGNTDRHSIKKNLIGALLFDSGETAEATRLKRTARRRYTRRKNRICYLQEIFSNEMAKVDDSFFHRLEESFLVEEDKKHERHPIFGNIVDEVAYHEKYPTIYHLRKKLVDSTDKADLRLIYLALAHMIKFRGHFLIEGDLNPDNSDVDKLFIQLVQTYNQLFEENPINASGVDAKAILSARLSKSRRLENLIAQLPGEKKNGLFGNLIALSLGLTPNFKSNFDLAEDAKLQLSKDTYDDDLDNLLAQIGDQYADLFLAAKNLSDAILLSDILRVNTEITKAPLSASMIKRYDEHHQDLTLLKALVRQQLPEKYKEIFFDQSKNGYAGYIDGGASQEEFYKFIKPILEKMDGTEELLVKLNREDLLRKQRTFDNGSIPHQIHLGELHAILRRQEDFYPFLKDNREKIEKILTFRIPYYVGPLARGNSRFAWMTRKSEETITPWNFEEVVDKGASAQSFIERMTNFDKNLPNEKVLPKHSLLYEYFTVYNELTKVKYVTEGMRKPAFLSGEQKKAIVDLLFKTNRKVTVKQLKEDYFKKIECFDSVEISGVEDRFNASLGTYHDLLKIIKDKDFLDNEENEDILEDIVLTLTLFEDREMIEERLKTYAHLFDDKVMKQLKRRRYTGWGRLSRKLINGIRDKQSGKTILDFLKSDGFANRNFMQLIHDDSLTFKEDIQKAQVSGQGDSLHEHIANLAGSPAIKKGILQTVKVVDELVKVMGRHKPENIVIEMARENQTTQKGQKNSRERMKRIEEGIKELGSQILKEHPVENTQLQNEKLYLYYLQNGRDMYVDQELDINRLSDYDVDHIVPQSFLKDDSIDNKVLTRSDKARGKSDNVPSEEVVKKMKNYWRQLLNAKLITQRKFDNLTKAERGGLSELDKAGFIKRQLVETRQITKHVAQILDSRMNTKYDENDKLIREVKVITLKSKLVSDFRKDFQFYKVREINNYHHAHDAYLNAVVGTALIKKYPKLESEFVYGDYKVYDVRKMIAKSEQEIGKATAKYFFYSNIMNFFKTEITLANGEIRKRPLIETNGETGEIVWDKGRDFATVRKVLSMPQVNIVKKTEVQTGGFSKESILPKRNSDKLIARKKDWDPKKYGGFDSPTVAYSVLVVAKVEKGKSKKLKSVKELLGITIMERSSFEKNPIDFLEAKGYKEVKKDLIIKLPKYSLFELENGRKRMLASAGELQKGNELALPSKYVNFLYLASHYEKLKGSPEDNEQKQLFVEQHKHYLDEIIEQISEFSKRVILADANLDKVLSAYNKHRDKPIREQAENIIHLFTLTNLGAPAAFKYFDTTIDRKRYTSTKEVLDATLIHQSITGLYETRIDLSQLGGDGGGGGGGSPAPGGTLNLEDEYRLYETSAEPEVSPGSTWLSDFPQAWAETGGMGLAVRQAPLIIPLKATSTPVSIKQYPMSQEAKLGIKPHIQRLLDQGILVPCQSPWNTPLLPVKKPGTNDYRPVQDLREVNKRVEDIHPTVPNPYNLLSGLPPSHRWYTVLDLKDAFFCLRLHPTSQPLFAFEWRDPGMGISGQLTWTRLPQGFKNSPTLFNEALHRDLADFRIQHPDLILLQYVDDILLAATSELDCQQGTRALLLTLGNLGYRASAKKAQLCQKQVKYLGYLLKEGQRWLTEARKETVMGQPTPKTPRQLREFLGKAGFCRLFIPGFAEMAAPLYPLTKPGTLFNWGPDQQKAYQEIKQALLTAPALGLPDLTKPFELFVDEKQGYAKGVLTQKLGPWRRPVAYLSKKLDPVAAGWPPCLRMVAAIAVLRKDAGKLTMGQPLVILAPHAVEALVKQPPDRWLSNARMTHYQAMLLDTDRVQFGPVVALNPATLLPLPEEGAPHDCLEILAETHGTRPDLTDQPIPDADHTWYTDGSSFLQEGQRKAGAAVTTETEVIWARALPAGTSAQRAELIALTQALKMAEGKRLNVYTDSRYAFATAHIHGEIYRRRGWLTSEGREIKNKSEILALLKALFLPKRLSIIHCLGHQKGDSAEARGNRLADQAAREAAIKTPPDTSTLLAGKRTADGSEFEKRTADGSEFESPKKKAKVE

SEQ ID NO: 4521 - protein, 2094 aa, synthetic construct
MPAAKRVKLDGGDKKYSIGLDIGTNSVGWAVITDEYKVPSKKFKVLGNTDRHSIKKNLIGALLFDSGETAEATRLKRTARRRYTRRKNRICYLQEIFSNEMAKVDDSFFHRLEESFLVEEDKKHERHPIFGNIVDEVAYHEKYPTIYHLRKKLVDSTDKADLRLIYLALAHMIKFRGHFLIEGDLNPDNSDVDKLFIQLVQTYNQLFEENPINASGVDAKAILSARLSKSRRLENLIAQLPGEKKNGLFGNLIALSLGLTPNFKSNFDLAEDAKLQLSKDTYDDDLDNLLAQIGDQYADLFLAAKNLSDAILLSDILRVNTEITKAPLSASMIKRYDEHHQDLTLLKALVRQQLPEKYKEIFFDQSKNGYAGYIDGGASQEEFYKFIKPILEKMDGTEELLVKLNREDLLRKQRTFDNGSIPHQIHLGELHAILRRQEDFYPFLKDNREKIEKILTFRIPYYVGPLARGNSRFAWMTRKSEETITPWNFEEVVDKGASAQSFIERMTNFDKNLPNEKVLPKHSLLYEYFTVYNELTKVKYVTEGMRKPAFLSGEQKKAIVDLLFKTNRKVTVKQLKEDYFKKIECFDSVEISGVEDRFNASLGTYHDLLKIIKDKDFLDNEENEDILEDIVLTLTLFEDREMIEERLKTYAHLFDDKVMKQLKRRRYTGWGRLSRKLINGIRDKQSGKTILDFLKSDGFANRNFMQLIHDDSLTFKEDIQKAQVSGQGDSLHEHIANLAGSPAIKKGILQTVKVVDELVKVMGRHKPENIVIEMARENQTTQKGQKNSRERMKRIEEGIKELGSQILKEHPVENTQLQNEKLYLYYLQNGRDMYVDQELDINRLSDYDVDHIVPQSFLKDDSIDNKVLTRSDKARGKSDNVPSEEVVKKMKNYWRQLLNAKLITQRKFDNLTKAERGGLSELDKAGFIKRQLVETRQITKHVAQILDSRMNTKYDENDKLIREVKVITLKSKLVSDFRKDFQFYKVREINNYHHAHDAYLNAVVGTALIKKYPKLESEFVYGDYKVYDVRKMIAKSEQEIGKATAKYFFYSNIMNFFKTEITLANGEIRKRPLIETNGETGEIVWDKGRDFATVRKVLSMPQVNIVKKTEVQTGGFSKESILPKRNSDKLIARKKDWDPKKYGGFDSPTVAYSVLVVAKVEKGKSKKLKSVKELLGITIMERSSFEKNPIDFLEAKGYKEVKKDLIIKLPKYSLFELENGRKRMLASAGELQKGNELALPSKYVNFLYLASHYEKLKGSPEDNEQKQLFVEQHKHYLDEIIEQISEFSKRVILADANLDKVLSAYNKHRDKPIREQAENIIHLFTLTNLGAPAAFKYFDTTIDRKRYTSTKEVLDATLIHQSITGLYETRIDLSQLGGDGGPAPGGGGGSGGTLNIEDEHRLHETSKEPDVSLGSTWLSDFPQAWAETGGMGLAVRQAPLIIPLKATSTPVSIKQYPMSQEARLGIKPHIQRLLDQGILVPCQSPWNTPLLPVKKPGTNDYRPVQDLREVNKRVEDIHPTVPNPYNLLSGLPPSHQWYTVLDLKDAFFCLRLHPTSQPLFAFEWRDPEMGISGQLTWTRLPQGFKNSPTLFNEALHRDLADFRIQHPDLILLQYVDDLLLAATSELDCQQGTRALLQTLGNLGYRASAKKAQICQKQVKYLGYLLKEGQRWLTEARKETVMGQPTPKTPRQLREFLGKAGFCRLFIPGFAEMAAPLYPLTKPGTLFNWGPDQQKAYQEIKQALLTAPALGLPDLTKPFELFVDEKQGYAKGVLTQKLGPWRRPVAYLSKKLDPVAAGWPPCLRMVAAIAVLTKDAGKLTMGQPLVILAPHAVEALVKQPPDRWLSNARMTHYQALLLDTDRVQFGPVVALNPATLLPLPEEGLQHNCLDILAEAHGTRPDLTDQPLPDADHTWYTDGSSLLQEGQRKAGAAVTTETEVIWAKALPAGTSAQRAELIALTQALKMAEGKKLNVYTDSRYAFATAHIHGEIYRRRGWLTSEGKEIKNKDEILALLKALFLPKRLSIIHCPGHQKGHSAEARGNRMADQAARKAAITETPDTSTLLAGKRTADGSEFEKRTADGSEFESPKKKAKVE

SEQ ID NO: 4522 - protein, 2096 aa, synthetic construct
MPAAKRVKLDGGDKKYSIGLDIGTNSVGWAVITDEYKVPSKKFKVLGNTDRHSIKKNLIGALLFDSGETAEATRLKRTARRRYTRRKNRICYLQEIFSNEMAKVDDSFFHRLEESFLVEEDKKHERHPIFGNIVDEVAYHEKYPTIYHLRKKLVDSTDKADLRLIYLALAHMIKFRGHFLIEGDLNPDNSDVDKLFIQLVQTYNQLFEENPINASGVDAKAILSARLSKSRRLENLIAQLPGEKKNGLFGNLIALSLGLTPNFKSNFDLAEDAKLQLSKDTYDDDLDNLLAQIGDQYADLFLAAKNLSDAILLSDILRVNTEITKAPLSASMIKRYDEHHQDLTLLKALVRQQLPEKYKEIFFDQSKNGYAGYIDGGASQEEFYKFIKPILEKMDGTEELLVKLNREDLLRKQRTFDNGSIPHQIHLGELHAILRRQEDFYPFLKDNREKIEKILTFRIPYYVGPLARGNSRFAWMTRKSEETITPWNFEEVVDKGASAQSFIERMTNFDKNLPNEKVLPKHSLLYEYFTVYNELTKVKYVTEGMRKPAFLSGEQKKAIVDLLFKTNRKVTVKQLKEDYFKKIECFDSVEISGVEDRFNASLGTYHDLLKIIKDKDFLDNEENEDILEDIVLTLTLFEDREMIEERLKTYAHLFDDKVMKQLKRRRYTGWGRLSRKLINGIRDKQSGKTILDFLKSDGFANRNFMQLIHDDSLTFKEDIQKAQVSGQGDSLHEHIANLAGSPAIKKGILQTVKVVDELVKVMGRHKPENIVIEMARENQTTQKGQKNSRERMKRIEEGIKELGSQILKEHPVENTQLQNEKLYLYYLQNGRDMYVDQELDINRLSDYDVDHIVPQSFLKDDSIDNKVLTRSDKARGKSDNVPSEEVVKKMKNYWRQLLNAKLITQRKFDNLTKAERGGLSELDKAGFIKRQLVETRQITKHVAQILDSRMNTKYDENDKLIREVKVITLKSKLVSDFRKDFQFYKVREINNYHHAHDAYLNAVVGTALIKKYPKLESEFVYGDYKVYDVRKMIAKSEQEIGKATAKYFFYSNIMNFFKTEITLANGEIRKRPLIETNGETGEIVWDKGRDFATVRKVLSMPQVNIVKKTEVQTGGFSKESILPKRNSDKLIARKKDWDPKKYGGFDSPTVAYSVLVVAKVEKGKSKKLKSVKELLGITIMERSSFEKNPIDFLEAKGYKEVKKDLIIKLPKYSLFELENGRKRMLASAGELQKGNELALPSKYVNFLYLASHYEKLKGSPEDNEQKQLFVEQHKHYLDEIIEQISEFSKRVILADANLDKVLSAYNKHRDKPIREQAENIIHLFTLTNLGAPAAFKYFDTTIDRKRYTSTKEVLDATLIHQSITGLYETRIDLSQLGGDGGGGSEAAAKGSSGGTLNIEDEYRLHETSKEPDVPLGSTWLSDFPQAWAETGGMGLAVRQAPLIIPLKATSTPVSIKQYPMSQEARLGIKPHIQRLLDQGILVPCQSPWNTPLLPVKKPGTNDYRPVQDLREVNKRVEDIHPTVPNPYNLLSGLPPSHQWYTVLDLKDAFFCLRLHPTSQPLFAFEWRDPEMGISGQLTWTRLPQGFKNSPTLFNEALHRDLADFRIQHPDLILLQYVDDLLLAATSEQDCQRGTRALLQTLGNLGYRASAKKAQICQKQVKYLGYLLKEGQRWLTEARKETVMGQPTPKTPRQLREFLGKAGFCRLFIPGFAEMAAPLYPLTKPGTLFNWGPDQQKAYQEIKQALLTAPALGLPDLTKPFELFVDEKQGYAKGVLTQKLGPWRRPVAYLSKKLDPVAAGWPPCLRMVAAIAVLTKDAGKLTMGQPLVILAPHAVEALVKQPPDRWLSNARMTHYQAMLLDTDRVQFGPVVALNPATLLPLPEKEAPHDCLEILAETHGTRPDLTDQPIPDADYTWYTDGSSFLQEGQRRAGAAVTTETEVIWARALPAGTSAQRAELIALTQALKMAEGKKLNVYTDSRYAFATAHVHGEIYRRRGWLTSEGREIKNKNEILALLKALFLPKRLSIIHCPGHQKGNSAEARGNRMADQAAREAAMKAVLETSTLLAGKRTADGSEFEKRTADGSEFESPKKKAKVE

SEQ ID NO: 4523 - protein, 2096 aa, synthetic construct
MPAAKRVKLDGGDKKYSIGLDIGTNSVGWAVITDEYKVPSKKFKVLGNTDRHSIKKNLIGALLFDSGETAEATRLKRTARRRYTRRKNRICYLQEIFSNEMAKVDDSFFHRLEESFLVEEDKKHERHPIFGNIVDEVAYHEKYPTIYHLRKKLVDSTDKADLRLIYLALAHMIKFRGHFLIEGDLNPDNSDVDKLFIQLVQTYNQLFEENPINASGVDAKAILSARLSKSRRLENLIAQLPGEKKNGLFGNLIALSLGLTPNFKSNFDLAEDAKLQLSKDTYDDDLDNLLAQIGDQYADLFLAAKNLSDAILLSDILRVNTEITKAPLSASMIKRYDEHHQDLTLLKALVRQQLPEKYKEIFFDQSKNGYAGYIDGGASQEEFYKFIKPILEKMDGTEELLVKLNREDLLRKQRTFDNGSIPHQIHLGELHAILRRQEDFYPFLKDNREKIEKILTFRIPYYVGPLARGNSRFAWMTRKSEETITPWNFEEVVDKGASAQSFIERMTNFDKNLPNEKVLPKHSLLYEYFTVYNELTKVKYVTEGMRKPAFLSGEQKKAIVDLLFKTNRKVTVKQLKEDYFKKIECFDSVEISGVEDRFNASLGTYHDLLKIIKDKDFLDNEENEDILEDIVLTLTLFEDREMIEERLKTYAHLFDDKVMKQLKRRRYTGWGRLSRKLINGIRDKQSGKTILDFLKSDGFANRNFMQLIHDDSLTFKEDIQKAQVSGQGDSLHEHIANLAGSPAIKKGILQTVKVVDELVKVMGRHKPENIVIEMARENQTTQKGQKNSRERMKRIEEGIKELGSQILKEHPVENTQLQNEKLYLYYLQNGRDMYVDQELDINRLSDYDVDHIVPQSFLKDDSIDNKVLTRSDKARGKSDNVPSEEVVKKMKNYWRQLLNAKLITQRKFDNLTKAERGGLSELDKAGFIKRQLVETRQITKHVAQILDSRMNTKYDENDKLIREVKVITLKSKLVSDFRKDFQFYKVREINNYHHAHDAYLNAVVGTALIKKYPKLESEFVYGDYKVYDVRKMIAKSEQEIGKATAKYFFYSNIMNFFKTEITLANGEIRKRPLIETNGETGEIVWDKGRDFATVRKVLSMPQVNIVKKTEVQTGGFSKESILPKRNSDKLIARKKDWDPKKYGGFDSPTVAYSVLVVAKVEKGKSKKLKSVKELLGITIMERSSFEKNPIDFLEAKGYKEVKKDLIIKLPKYSLFELENGRKRMLASAGELQKGNELALPSKYVNFLYLASHYEKLKGSPEDNEQKQLFVEQHKHYLDEIIEQISEFSKRVILADANLDKVLSAYNKHRDKPIREQAENIIHLFTLTNLGAPAAFKYFDTTIDRKRYTSTKEVLDATLIHQSITGLYETRIDLSQLGGDGGEAAAKGGSGSSGGTLNIEDEYRLHETSKEPDVPLGSTWLSDFPQAWAETGGMGLAVRQAPLIIPLKATSTPVSIKQYPMSQEARLGIKPHIQRLLDQGILVPCQSPWNTPLLPVKKPGTNDYRPVQDLREVNKRVEDIHPTVPNPYNLLSGLPPSHQWYTVLDLKDAFFCLRLHPTSQPLFAFEWRDPEMGISGQLTWTRLPQGFKNSPTLFNEALHRDLADFRIQHPDLILLQYVDDLLLAATSEQDCQRGTRALLQTLGNLGYRASAKKAQICQKQVKYLGYLLKEGQRWLTEARKETVMGQPTPKTPRQLREFLGTAGFCRLWIPGFAEMAAPLYPLTKPGTLFNWGPDQQKAYQEIKQALLTAPALGLPDLTKPFELFVDEKQGYAKGVLTQKLGPWRRPVAYLSKKLDPVAAGWPPCLRMVAAIAVLTKDAGKLTMGQPLVILAPHAVEALVKQPPDRWLSNARMTHYQAMLLDTDRVQFGPVVALNPATLLPLPEKEAPHDCLEILAETHGTRPDLTDQPIPDADYTWYTDGSSFLQEGQRRAGAAVTTETEVIWARALPAGTSAQRAELIALTQALKMAEGKKLNVYTDSRYAFATAHVHGEIYRRRGWLTSEGREIKNKNEILALLKALFLPKRLSIIHCPGHQKGNSAEARGNRMADQAAREAAMKAVLETSTLLAGKRTADGSEFEKRTADGSEFESPKKKAKVE

SEQ ID NO: 4524 - protein, 2096 aa, synthetic construct
MPAAKRVKLDGGDKKYSIGLDIGTNSVGWAVITDEYKVPSKKFKVLGNTDRHSIKKNLIGALLFDSGETAEATRLKRTARRRYTRRKNRICYLQEIFSNEMAKVDDSFFHRLEESFLVEEDKKHERHPIFGNIVDEVAYHEKYPTIYHLRKKLVDSTDKADLRLIYLALAHMIKFRGHFLIEGDLNPDNSDVDKLFIQLVQTYNQLFEENPINASGVDAKAILSARLSKSRRLENLIAQLPGEKKNGLFGNLIALSLGLTPNFKSNFDLAEDAKLQLSKDTYDDDLDNLLAQIGDQYADLFLAAKNLSDAILLSDILRVNTEITKAPLSASMIKRYDEHHQDLTLLKALVRQQLPEKYKEIFFDQSKNGYAGYIDGGASQEEFYKFIKPILEKMDGTEELLVKLNREDLLRKQRTFDNGSIPHQIHLGELHAILRRQEDFYPFLKDNREKIEKILTFRIPYYVGPLARGNSRFAWMTRKSEETITPWNFEEVVDKGASAQSFIERMTNFDKNLPNEKVLPKHSLLYEYFTVYNELTKVKYVTEGMRKPAFLSGEQKKAIVDLLFKTNRKVTVKQLKEDYFKKIECFDSVEISGVEDRFNASLGTYHDLLKIIKDKDFLDNEENEDILEDIVLTLTLFEDREMIEERLKTYAHLFDDKVMKQLKRRRYTGWGRLSRKLINGIRDKQSGKTILDFLKSDGFANRNFMQLIHDDSLTFKEDIQKAQVSGQGDSLHEHIANLAGSPAIKKGILQTVKVVDELVKVMGRHKPENIVIEMARENQTTQKGQKNSRERMKRIEEGIKELGSQILKEHPVENTQLQNEKLYLYYLQNGRDMYVDQELDINRLSDYDVDHIVPQSFLKDDSIDNKVLTRSDKARGKSDNVPSEEVVKKMKNYWRQLLNAKLITQRKFDNLTKAERGGLSELDKAGFIKRQLVETRQITKHVAQILDSRMNTKYDENDKLIREVKVITLKSKLVSDFRKDFQFYKVREINNYHHAHDAYLNAVVGTALIKKYPKLESEFVYGDYKVYDVRKMIAKSEQEIGKATAKYFFYSNIMNFFKTEITLANGEIRKRPLIETNGETGEIVWDKGRDFATVRKVLSMPQVNIVKKTEVQTGGFSKESILPKRNSDKLIARKKDWDPKKYGGFDSPTVAYSVLVVAKVEKGKSKKLKSVKELLGITIMERSSFEKNPIDFLEAKGYKEVKKDLIIKLPKYSLFELENGRKRMLASAGELQKGNELALPSKYVNFLYLASHYEKLKGSPEDNEQKQLFVEQHKHYLDEIIEQISEFSKRVILADANLDKVLSAYNKHRDKPIREQAENIIHLFTLTNLGAPAAFKYFDTTIDRKRYTSTKEVLDATLIHQSITGLYETRIDLSQLGGDGGEAAAKGSSGGSGGTLNIEDEYRLHETSKEPDVPLGSTWLSDFPQAWAETGGMGLAVRQAPLIIPLKATSTPVSIKQYPMSQEARLGIKPHIQRLLDQGILVPCQSPWNTPLLPVKKPGTNDYRPVQDLREVNKRVEDIHPTVPNPYNLLSGLPPSHQWYTVLDLKDAFFCLRLHPTSQPLFAFEWRDPEMGISGQLTWTRLPQGFKNSPTLFNEALHRDLADFRIQHPDLILLQYVDDLLLAATSEQDCQRGTRALLQTLGNLGYRASAKKAQICQKQVKYLGYLLKEGQRWLTEARKETVMGQPTPKTPRQLREFLGTAGFCRLWIPGFAEMAAPLYPLTKPGTLFNWGPDQQKAYQEIKQALLTAPALGLPDLTKPFELFVDEKQGYAKGVLTQKLGPWRRPVAYLSKKLDPVAAGWPPCLRMVAAIAVLTKDAGKLTMGQPLVILAPHAVEALVKQPPDRWLSNARMTHYQAMLLDTDRVQFGPVVALNPATLLPLPEKEAPHDCLEILAETHGTRPDLTDQPIPDADYTWYTDGSSFLQEGQRRAGAAVTTETEVIWARALPAGTSAQRAELIALTQALKMAEGKKLNVYTDSRYAFATAHVHGEIYRRRGWLTSEGREIKNKNEILALLKALFLPKRLSIIHCPGHQKGNSAEARGNRMADQAAREAAMKAVLETSTLLAGKRTADGSEFEKRTADGSEFESPKKKAKVE

SEQ ID NO: 4525 - protein, 2094 aa, synthetic construct
MPAAKRVKLDGGDKKYSIGLDIGTNSVGWAVITDEYKVPSKKFKVLGNTDRHSIKKNLIGALLFDSGETAEATRLKRTARRRYTRRKNRICYLQEIFSNEMAKVDDSFFHRLEESFLVEEDKKHERHPIFGNIVDEVAYHEKYPTIYHLRKKLVDSTDKADLRLIYLALAHMIKFRGHFLIEGDLNPDNSDVDKLFIQLVQTYNQLFEENPINASGVDAKAILSARLSKSRRLENLIAQLPGEKKNGLFGNLIALSLGLTPNFKSNFDLAEDAKLQLSKDTYDDDLDNLLAQIGDQYADLFLAAKNLSDAILLSDILRVNTEITKAPLSASMIKRYDEHHQDLTLLKALVRQQLPEKYKEIFFDQSKNGYAGYIDGGASQEEFYKFIKPILEKMDGTEELLVKLNREDLLRKQRTFDNGSIPHQIHLGELHAILRRQEDFYPFLKDNREKIEKILTFRIPYYVGPLARGNSRFAWMTRKSEETITPWNFEEVVDKGASAQSFIERMTNFDKNLPNEKVLPKHSLLYEYFTVYNELTKVKYVTEGMRKPAFLSGEQKKAIVDLLFKTNRKVTVKQLKEDYFKKIECFDSVEISGVEDRFNASLGTYHDLLKIIKDKDFLDNEENEDILEDIVLTLTLFEDREMIEERLKTYAHLFDDKVMKQLKRRRYTGWGRLSRKLINGIRDKQSGKTILDFLKSDGFANRNFMQLIHDDSLTFKEDIQKAQVSGQGDSLHEHIANLAGSPAIKKGILQTVKVVDELVKVMGRHKPENIVIEMARENQTTQKGQKNSRERMKRIEEGIKELGSQILKEHPVENTQLQNEKLYLYYLQNGRDMYVDQELDINRLSDYDVDHIVPQSFLKDDSIDNKVLTRSDKARGKSDNVPSEEVVKKMKNYWRQLLNAKLITQRKFDNLTKAERGGLSELDKAGFIKRQLVETRQITKHVAQILDSRMNTKYDENDKLIREVKVITLKSKLVSDFRKDFQFYKVREINNYHHAHDAYLNAVVGTALIKKYPKLESEFVYGDYKVYDVRKMIAKSEQEIGKATAKYFFYSNIMNFFKTEITLANGEIRKRPLIETNGETGEIVWDKGRDFATVRKVLSMPQVNIVKKTEVQTGGFSKESILPKRNSDKLIARKKDWDPKKYGGFDSPTVAYSVLVVAKVEKGKSKKLKSVKELLGITIMERSSFEKNPIDFLEAKGYKEVKKDLIIKLPKYSLFELENGRKRMLASAGELQKGNELALPSKYVNFLYLASHYEKLKGSPEDNEQKQLFVEQHKHYLDEIIEQISEFSKRVILADANLDKVLSAYNKHRDKPIREQAENIIHLFTLTNLGAPAAFKYFDTTIDRKRYTSTKEVLDATLIHQSITGLYETRIDLSQLGGDGGGGSPAPGSSGGTLNIEDEYRLHETSKEPDVPLGSTWLSDFPQAWAETGGMGLAVRQAPLIIPLKATSTPVSIKQYPMSQEARLGIKPHIQRLLDQGILVPCQSPWNTPLLPVKKPGTNDYRPVQDLREVNKRVEDIHPTVPNPYNLLSGLPPSHQWYTVLDLKDAFFCLRLHPTSQPLFAFEWRDPEMGISGQLTWTRLPQGFKNSPTLFNEALHRDLADFRIQHPDLILLQYVDDLLLAATSEQDCQRGTRALLQTLGNLGYRASAKKAQICQKQVKYLGYLLKEGQRWLTEARKETVMGQPTPKTPRQLREFLGKAGFCRLFIPGFAEMAAPLYPLTKPGTLFNWGPDQQKAYQEIKQALLTAPALGLPDLTKPFELFVDEKQGYAKGVLTQKLGPWRRPVAYLSKKLDPVAAGWPPCLRMVAAIAVLTKDAGKLTMGQPLVILAPHAVEALVKQPPDRWLSNARMTHYQAMLLDTDRVQFGPVVALNPATLLPLPEKEAPHDCLEILAETHGTRPDLTDQPIPDADYTWYTDGSSFLQEGQRRAGAAVTTETEVIWARALPAGTSAQRAELIALTQALKMAEGKKLNVYTDSRYAFATAHVHGEIYRRRGWLTSEGREIKNKNEILALLKALFLPKRLSIIHCPGHQKGNSAEARGNRMADQAAREAAMKAVLETSTLLAGKRTADGSEFEKRTADGSEFESPKKKAKVE

SEQ ID NO: 4526 - protein, 2125 aa, synthetic construct
MPAAKRVKLDGGDKKYSIGLDIGTNSVGWAVITDEYKVPSKKFKVLGNTDRHSIKKNLIGALLFDSGETAEATRLKRTARRRYTRRKNRICYLQEIFSNEMAKVDDSFFHRLEESFLVEEDKKHERHPIFGNIVDEVAYHEKYPTIYHLRKKLVDSTDKADLRLIYLALAHMIKFRGHFLIEGDLNPDNSDVDKLFIQLVQTYNQLFEENPINASGVDAKAILSARLSKSRRLENLIAQLPGEKKNGLFGNLIALSLGLTPNFKSNFDLAEDAKLQLSKDTYDDDLDNLLAQIGDQYADLFLAAKNLSDAILLSDILRVNTEITKAPLSASMIKRYDEHHQDLTLLKALVRQQLPEKYKEIFFDQSKNGYAGYIDGGASQEEFYKFIKPILEKMDGTEELLVKLNREDLLRKQRTFDNGSIPHQIHLGELHAILRRQEDFYPFLKDNREKIEKILTFRIPYYVGPLARGNSRFAWMTRKSEETITPWNFEEVVDKGASAQSFIERMTNFDKNLPNEKVLPKHSLLYEYFTVYNELTKVKYVTEGMRKPAFLSGEQKKAIVDLLFKTNRKVTVKQLKEDYFKKIECFDSVEISGVEDRFNASLGTYHDLLKIIKDKDFLDNEENEDILEDIVLTLTLFEDREMIEERLKTYAHLFDDKVMKQLKRRRYTGWGRLSRKLINGIRDKQSGKTILDFLKSDGFANRNFMQLIHDDSLTFKEDIQKAQVSGQGDSLHEHIANLAGSPAIKKGILQTVKVVDELVKVMGRHKPENIVIEMARENQTTQKGQKNSRERMKRIEEGIKELGSQILKEHPVENTQLQNEKLYLYYLQNGRDMYVDQELDINRLSDYDVDHIVPQSFLKDDSIDNKVLTRSDKARGKSDNVPSEEVVKKMKNYWRQLLNAKLITQRKFDNLTKAERGGLSELDKAGFIKRQLVETRQITKHVAQILDSRMNTKYDENDKLIREVKVITLKSKLVSDFRKDFQFYKVREINNYHHAHDAYLNAVVGTALIKKYPKLESEFVYGDYKVYDVRKMIAKSEQEIGKATAKYFFYSNIMNFFKTEITLANGEIRKRPLIETNGETGEIVWDKGRDFATVRKVLSMPQVNIVKKTEVQTGGFSKESILPKRNSDKLIARKKDWDPKKYGGFDSPTVAYSVLVVAKVEKGKSKKLKSVKELLGITIMERSSFEKNPIDFLEAKGYKEVKKDLIIKLPKYSLFELENGRKRMLASAGELQKGNELALPSKYVNFLYLASHYEKLKGSPEDNEQKQLFVEQHKHYLDEIIEQISEFSKRVILADANLDKVLSAYNKHRDKPIREQAENIIHLFTLTNLGAPAAFKYFDTTIDRKRYTSTKEVLDATLIHQSITGLYETRIDLSQLGGDGGGSSPAPGGSGGLLGRDLLTKLKAQIQFSTEGPQVTWEDRPAMCLVLNLEEEYRLHEKPVPPSIDPSWLQLFPMVWAEKAGMGLANQVPPVVVELKSDASPVAVRQYPMSKEAREGIRPHIQRFLDLGILVPCQSPWNTPLLPVKKPGTNDYRPVQDLREVNKRVQDIHPTVPNPYNLLSSLPPSHTWYSVLDLKDAFFCLKLHPNSQPLFAFEWRDPEKGNTGQLTWTRLPQGFKNSPTLFNEALHRDLASFRALNPQVVMLQYVDDLLVAAPTYRDCKEGTRRLLQELSKLGYRVSAKKAQLCREEVTYLGYLLKGGKRWLTPARKATVMKIPTPTTPRQVREFLGTAGFCRLWIPGFASLAAPLYPLTRPKVPFTWTEAHQEAFGRIKEALLSAPALALPDLTKPFALYVDEKEGVARGVLTQTLGPWRRPVAYLSKKLDPVASGWPTCLKAIAAVALLLKDADKLTLGQNVLVIAPHNLESIVRQPPDRWMTNARMTHYQSLLLNERVSFAPPAILNPATLLPVESDDTPIHICSEILAEETGTRPDLRDQPLPGVPAWYTDGSSFIMDGRRQAGAAIVDNKRTVWASNLPEGTSAQKAELIALTQALRLAEGKSINIYTDSRYAFATAHVHGAIYKQRGWLTSAGKDIKNKEEILALLEAIHLPKRVAIIHCPGHQRGTDPVATGNRKADEAAKQAAQSTRILTETTKNAGKRTADGSEFEKRTADGSEFESPKKKAKVE

SEQ ID NO: 4527 - protein, 2096 aa, synthetic construct
MPAAKRVKLDGGDKKYSIGLDIGTNSVGWAVITDEYKVPSKKFKVLGNTDRHSIKKNLIGALLFDSGETAEATRLKRTARRRYTRRKNRICYLQEIFSNEMAKVDDSFFHRLEESFLVEEDKKHERHPIFGNIVDEVAYHEKYPTIYHLRKKLVDSTDKADLRLIYLALAHMIKFRGHFLIEGDLNPDNSDVDKLFIQLVQTYNQLFEENPINASGVDAKAILSARLSKSRRLENLIAQLPGEKKNGLFGNLIALSLGLTPNFKSNFDLAEDAKLQLSKDTYDDDLDNLLAQIGDQYADLFLAAKNLSDAILLSDILRVNTEITKAPLSASMIKRYDEHHQDLTLLKALVRQQLPEKYKEIFFDQSKNGYAGYIDGGASQEEFYKFIKPILEKMDGTEELLVKLNREDLLRKQRTFDNGSIPHQIHLGELHAILRRQEDFYPFLKDNREKIEKILTFRIPYYVGPLARGNSRFAWMTRKSEETITPWNFEEVVDKGASAQSFIERMTNFDKNLPNEKVLPKHSLLYEYFTVYNELTKVKYVTEGMRKPAFLSGEQKKAIVDLLFKTNRKVTVKQLKEDYFKKIECFDSVEISGVEDRFNASLGTYHDLLKIIKDKDFLDNEENEDILEDIVLTLTLFEDREMIEERLKTYAHLFDDKVMKQLKRRRYTGWGRLSRKLINGIRDKQSGKTILDFLKSDGFANRNFMQLIHDDSLTFKEDIQKAQVSGQGDSLHEHIANLAGSPAIKKGILQTVKVVDELVKVMGRHKPENIVIEMARENQTTQKGQKNSRERMKRIEEGIKELGSQILKEHPVENTQLQNEKLYLYYLQNGRDMYVDQELDINRLSDYDVDHIVPQSFLKDDSIDNKVLTRSDKARGKSDNVPSEEVVKKMKNYWRQLLNAKLITQRKFDNLTKAERGGLSELDKAGFIKRQLVETRQITKHVAQILDSRMNTKYDENDKLIREVKVITLKSKLVSDFRKDFQFYKVREINNYHHAHDAYLNAVVGTALIKKYPKLESEFVYGDYKVYDVRKMIAKSEQEIGKATAKYFFYSNIMNFFKTEITLANGEIRKRPLIETNGETGEIVWDKGRDFATVRKVLSMPQVNIVKKTEVQTGGFSKESILPKRNSDKLIARKKDWDPKKYGGFDSPTVAYSVLVVAKVEKGKSKKLKSVKELLGITIMERSSFEKNPIDFLEAKGYKEVKKDLIIKLPKYSLFELENGRKRMLASAGELQKGNELALPSKYVNFLYLASHYEKLKGSPEDNEQKQLFVEQHKHYLDEIIEQISEFSKRVILADANLDKVLSAYNKHRDKPIREQAENIIHLFTLTNLGAPAAFKYFDTTIDRKRYTSTKEVLDATLIHQSITGLYETRIDLSQLGGDGGEAAAKPAPGGSGGTLNIEDEYRLHETSKEPDVPLGSTWLSDFPQAWAETGGMGLAVRQAPLIIPLKATSTPVSIKQYPMSQEARLGIKPHIQRLLDQGILVPCQSPWNTPLLPVKKPGTNDYRPVQDLREVNKRVEDIHPTVPNPYNLLSGLPPSHQWYTVLDLKDAFFCLRLHPTSQPLFAFEWRDPEMGISGQLTWTRLPQGFKNSPTLFNEALHRDLADFRIQHPDLILLQYVDDLLLAATSEQDCQRGTRALLQTLGNLGYRASAKKAQICQKQVKYLGYLLKEGQRWLTEARKETVMGQPTPKTPRQLREFLGKAGFCRLFIPGFAEMAAPLYPLTKPGTLFNWGPDQQKAYQEIKQALLTAPALGLPDLTKPFELFVDEKQGYAKGVLTQKLGPWRRPVAYLSKKLDPVAAGWPPCLRMVAAIAVLTKDAGKLTMGQPLVILAPHAVEALVKQPPDRWLSNARMTHYQAMLLDTDRVQFGPVVALNPATLLPLPEKEAPHDCLEILAETHGTRPDLTDQPIPDADYTWYTDGSSFLQEGQRRAGAAVTTETEVIWARALPAGTSAQRAELIALTQALKMAEGKKLNVYTDSRYAFATAHVHGEIYRRRGWLTSEGREIKNKNEILALLKALFLPKRLSIIHCPGHQKGNSAEARGNRMADQAAREAAMKAVLETSTLLAGKRTADGSEFEKRTADGSEFESPKKKAKVE

SEQ ID NO: 4528 - protein, 2096 aa, synthetic construct
MPAAKRVKLDGGDKKYSIGLDIGTNSVGWAVITDEYKVPSKKFKVLGNTDRHSIKKNLIGALLFDSGETAEATRLKRTARRRYTRRKNRICYLQEIFSNEMAKVDDSFFHRLEESFLVEEDKKHERHPIFGNIVDEVAYHEKYPTIYHLRKKLVDSTDKADLRLIYLALAHMIKFRGHFLIEGDLNPDNSDVDKLFIQLVQTYNQLFEENPINASGVDAKAILSARLSKSRRLENLIAQLPGEKKNGLFGNLIALSLGLTPNFKSNFDLAEDAKLQLSKDTYDDDLDNLLAQIGDQYADLFLAAKNLSDAILLSDILRVNTEITKAPLSASMIKRYDEHHQDLTLLKALVRQQLPEKYKEIFFDQSKNGYAGYIDGGASQEEFYKFIKPILEKMDGTEELLVKLNREDLLRKQRTFDNGSIPHQIHLGELHAILRRQEDFYPFLKDNREKIEKILTFRIPYYVGPLARGNSRFAWMTRKSEETITPWNFEEVVDKGASAQSFIERMTNFDKNLPNEKVLPKHSLLYEYFTVYNELTKVKYVTEGMRKPAFLSGEQKKAIVDLLFKTNRKVTVKQLKEDYFKKIECFDSVEISGVEDRFNASLGTYHDLLKIIKDKDFLDNEENEDILEDIVLTLTLFEDREMIEERLKTYAHLFDDKVMKQLKRRRYTGWGRLSRKLINGIRDKQSGKTILDFLKSDGFANRNFMQLIHDDSLTFKEDIQKAQVSGQGDSLHEHIANLAGSPAIKKGILQTVKVVDELVKVMGRHKPENIVIEMARENQTTQKGQKNSRERMKRIEEGIKELGSQILKEHPVENTQLQNEKLYLYYLQNGRDMYVDQELDINRLSDYDVDHIVPQSFLKDDSIDNKVLTRSDKARGKSDNVPSEEVVKKMKNYWRQLLNAKLITQRKFDNLTKAERGGLSELDKAGFIKRQLVETRQITKHVAQILDSRMNTKYDENDKLIREVKVITLKSKLVSDFRKDFQFYKVREINNYHHAHDAYLNAVVGTALIKKYPKLESEFVYGDYKVYDVRKMIAKSEQEIGKATAKYFFYSNIMNFFKTEITLANGEIRKRPLIETNGETGEIVWDKGRDFATVRKVLSMPQVNIVKKTEVQTGGFSKESILPKRNSDKLIARKKDWDPKKYGGFDSPTVAYSVLVVAKVEKGKSKKLKSVKELLGITIMERSSFEKNPIDFLEAKGYKEVKKDLIIKLPKYSLFELENGRKRMLASAGELQKGNELALPSKYVNFLYLASHYEKLKGSPEDNEQKQLFVEQHKHYLDEIIEQISEFSKRVILADANLDKVLSAYNKHRDKPIREQAENIIHLFTLTNLGAPAAFKYFDTTIDRKRYTSTKEVLDATLIHQSITGLYETRIDLSQLGGDGGPAPEAAAKGGSGGTLNLEDEYRLYETSAEPEVSPGSTWLSDFPQAWAETGGMGLAVRQAPLIIPLKATSTPVSIKQYPMSQEAKLGIKPHIQRLLDQGILVPCQSPWNTPLLPVKKPGTNDYRPVQDLREVNKRVEDIHPTVPNPYNLLSGLPPSHRWYTVLDLKDAFFCLRLHPTSQPLFAFEWRDPGMGISGQLTWTRLPQGFKNSPTLFNEALHRDLADFRIQHPDLILLQYVDDILLAATSELDCQQGTRALLLTLGNLGYRASAKKAQLCQKQVKYLGYLLKEGQRWLTEARKETVMGQPTPKTPRQLREFLGKAGFCRLFIPGFAEMAAPLYPLTKPGTLFNWGPDQQKAYQEIKQALLTAPALGLPDLTKPFELFVDEKQGYAKGVLTQKLGPWRRPVAYLSKKLDPVAAGWPPCLRMVAAIAVLRKDAGKLTMGQPLVILAPHAVEALVKQPPDRWLSNARMTHYQAMLLDTDRVQFGPVVALNPATLLPLPEEGAPHDCLEILAETHGTRPDLTDQPIPDADHTWYTDGSSFLQEGQRKAGAAVTTETEVIWARALPAGTSAQRAELIALTQALKMAEGKRLNVYTDSRYAFATAHIHGEIYRRRGWLTSEGREIKNKSEILALLKALFLPKRLSIIHCLGHQKGDSAEARGNRLADQAAREAAIKTPPDTSTLLAGKRTADGSEFEKRTADGSEFESPKKKAKVE

SEQ ID NO: 4529 - protein, 2088 aa, synthetic construct
MPAAKRVKLDGGDKKYSIGLDIGTNSVGWAVITDEYKVPSKKFKVLGNTDRHSIKKNLIGALLFDSGETAEATRLKRTARRRYTRRKNRICYLQEIFSNEMAKVDDSFFHRLEESFLVEEDKKHERHPIFGNIVDEVAYHEKYPTIYHLRKKLVDSTDKADLRLIYLALAHMIKFRGHFLIEGDLNPDNSDVDKLFIQLVQTYNQLFEENPINASGVDAKAILSARLSKSRRLENLIAQLPGEKKNGLFGNLIALSLGLTPNFKSNFDLAEDAKLQLSKDTYDDDLDNLLAQIGDQYADLFLAAKNLSDAILLSDILRVNTEITKAPLSASMIKRYDEHHQDLTLLKALVRQQLPEKYKEIFFDQSKNGYAGYIDGGASQEEFYKFIKPILEKMDGTEELLVKLNREDLLRKQRTFDNGSIPHQIHLGELHAILRRQEDFYPFLKDNREKIEKILTFRIPYYVGPLARGNSRFAWMTRKSEETITPWNFEEVVDKGASAQSFIERMTNFDKNLPNEKVLPKHSLLYEYFTVYNELTKVKYVTEGMRKPAFLSGEQKKAIVDLLFKTNRKVTVKQLKEDYFKKIECFDSVEISGVEDRFNASLGTYHDLLKIIKDKDFLDNEENEDILEDIVLTLTLFEDREMIEERLKTYAHLFDDKVMKQLKRRRYTGWGRLSRKLINGIRDKQSGKTILDFLKSDGFANRNFMQLIHDDSLTFKEDIQKAQVSGQGDSLHEHIANLAGSPAIKKGILQTVKVVDELVKVMGRHKPENIVIEMARENQTTQKGQKNSRERMKRIEEGIKELGSQILKEHPVENTQLQNEKLYLYYLQNGRDMYVDQELDINRLSDYDVDHIVPQSFLKDDSIDNKVLTRSDKARGKSDNVPSEEVVKKMKNYWRQLLNAKLITQRKFDNLTKAERGGLSELDKAGFIKRQLVETRQITKHVAQILDSRMNTKYDENDKLIREVKVITLKSKLVSDFRKDFQFYKVREINNYHHAHDAYLNAVVGTALIKKYPKLESEFVYGDYKVYDVRKMIAKSEQEIGKATAKYFFYSNIMNFFKTEITLANGEIRKRPLIETNGETGEIVWDKGRDFATVRKVLSMPQVNIVKKTEVQTGGFSKESILPKRNSDKLIARKKDWDPKKYGGFDSPTVAYSVLVVAKVEKGKSKKLKSVKELLGITIMERSSFEKNPIDFLEAKGYKEVKKDLIIKLPKYSLFELENGRKRMLASAGELQKGNELALPSKYVNFLYLASHYEKLKGSPEDNEQKQLFVEQHKHYLDEIIEQISEFSKRVILADANLDKVLSAYNKHRDKPIREQAENIIHLFTLTNLGAPAAFKYFDTTIDRKRYTSTKEVLDATLIHQSITGLYETRIDLSQLGGDGGPAPEAAAKGGSGGLDDEYRLYSPLVKPDQNIQFWLEQFPQAWAETAGMGLAKQVPPQVIQLKASATPVSVRQYPLSKEAQEGIRPHVQRLIQQGILVPVQSPWNTPLLPVRKPGTNDYRPVQDLREVNKRVQDIHPTVPNPYNLLCALPPQRSWYTVLDLKDAFFCLRLHPTSQPLFAFEWRDPGTGRTGQLTWTRLPQGFKNSPTIFNEALHRDLANFRIQHPQVTLLQYVDDLLLAGATKQDCLEGTKALLLELSDLGYRASAKKAQICRREVTYLGYSLRDGQRWLTEARKKTVVQIPAPTTAKQVREFLGKAGFCRLFIPGFATLAAPLYPLTKPKGEFSWAPEHQKAFDAIKKALLSAPALALPDVTKPFTLYVDERKGVARGVLTQTLGPWRRPVAYLSKKLDPVASGWPVCLKAIAAVAILVKDADKLTLGQNITVIAPHALENIVRQPPDRWMTNARMTHYQSLLLTERVTFAPPAALNPATLLPEETDEPVTHDCHQLLIEETGVRKDLTDIPLTGEVLTWFTDGSSYVVEGKRMAGAAVVDGTRTIWASSLPEGTSAQKAELMALTQALRLAEGKSINIYTDSRYAFATAHVHGAIYKQRGWLTSAGREIKNKEEILSLLEALHLPKRLAIIHCPGHQKAKDPISRGNQMADRVAKQAAQGVNLLPAGKRTADGSEFEKRTADGSEFESPKKKAKVE

SEQ ID NO: 4530 - protein, 2096 aa, synthetic construct
MPAAKRVKLDGGDKKYSIGLDIGTNSVGWAVITDEYKVPSKKFKVLGNTDRHSIKKNLIGALLFDSGETAEATRLKRTARRRYTRRKNRICYLQEIFSNEMAKVDDSFFHRLEESFLVEEDKKHERHPIFGNIVDEVAYHEKYPTIYHLRKKLVDSTDKADLRLIYLALAHMIKFRGHFLIEGDLNPDNSDVDKLFIQLVQTYNQLFEENPINASGVDAKAILSARLSKSRRLENLIAQLPGEKKNGLFGNLIALSLGLTPNFKSNFDLAEDAKLQLSKDTYDDDLDNLLAQIGDQYADLFLAAKNLSDAILLSDILRVNTEITKAPLSASMIKRYDEHHQDLTLLKALVRQQLPEKYKEIFFDQSKNGYAGYIDGGASQEEFYKFIKPILEKMDGTEELLVKLNREDLLRKQRTFDNGSIPHQIHLGELHAILRRQEDFYPFLKDNREKIEKILTFRIPYYVGPLARGNSRFAWMTRKSEETITPWNFEEVVDKGASAQSFIERMTNFDKNLPNEKVLPKHSLLYEYFTVYNELTKVKYVTEGMRKPAFLSGEQKKAIVDLLFKTNRKVTVKQLKEDYFKKIECFDSVEISGVEDRFNASLGTYHDLLKIIKDKDFLDNEENEDILEDIVLTLTLFEDREMIEERLKTYAHLFDDKVMKQLKRRRYTGWGRLSRKLINGIRDKQSGKTILDFLKSDGFANRNFMQLIHDDSLTFKEDIQKAQVSGQGDSLHEHIANLAGSPAIKKGILQTVKVVDELVKVMGRHKPENIVIEMARENQTTQKGQKNSRERMKRIEEGIKELGSQILKEHPVENTQLQNEKLYLYYLQNGRDMYVDQELDINRLSDYDVDHIVPQSFLKDDSIDNKVLTRSDKARGKSDNVPSEEVVKKMKNYWRQLLNAKLITQRKFDNLTKAERGGLSELDKAGFIKRQLVETRQITKHVAQILDSRMNTKYDENDKLIREVKVITLKSKLVSDFRKDFQFYKVREINNYHHAHDAYLNAVVGTALIKKYPKLESEFVYGDYKVYDVRKMIAKSEQEIGKATAKYFFYSNIMNFFKTEITLANGEIRKRPLIETNGETGEIVWDKGRDFATVRKVLSMPQVNIVKKTEVQTGGFSKESILPKRNSDKLIARKKDWDPKKYGGFDSPTVAYSVLVVAKVEKGKSKKLKSVKELLGITIMERSSFEKNPIDFLEAKGYKEVKKDLIIKLPKYSLFELENGRKRMLASAGELQKGNELALPSKYVNFLYLASHYEKLKGSPEDNEQKQLFVEQHKHYLDEIIEQISEFSKRVILADANLDKVLSAYNKHRDKPIREQAENIIHLFTLTNLGAPAAFKYFDTTIDRKRYTSTKEVLDATLIHQSITGLYETRIDLSQLGGDGGGGGEAAAKGSSGGTLNIEDEHRLHETSKEPDVSLGSTWLSDFPQAWAETGGMGLAVRQAPLIIPLKATSTPVSIKQYPMSQEARLGIKPHIQRLLDQGILVPCQSPWNTPLLPVKKPGTNDYRPVQDLREVNKRVEDIHPTVPNPYNLLSGLPPSHQWYTVLDLKDAFFCLRLHPTSQPLFAFEWRDPEMGISGQLTWTRLPQGFKNSPTLFNEALHRDLADFRIQHPDLILLQYVDDLLLAATSELDCQQGTRALLQTLGNLGYRASAKKAQICQKQVKYLGYLLKEGQRWLTEARKETVMGQPTPKTPRQLREFLGTAGFCRLWIPGFAEMAAPLYPLTKPGTLFNWGPDQQKAYQEIKQALLTAPALGLPDLTKPFELFVDEKQGYAKGVLTQKLGPWRRPVAYLSKKLDPVAAGWPPCLRMVAAIAVLTKDAGKLTMGQPLVILAPHAVEALVKQPPDRWLSNARMTHYQALLLDTDRVQFGPVVALNPATLLPLPEEGLQHNCLDILAEAHGTRPDLTDQPLPDADHTWYTDGSSLLQEGQRKAGAAVTTETEVIWAKALPAGTSAQRAELIALTQALKMAEGKKLNVYTDSRYAFATAHIHGEIYRRRGWLTSEGKEIKNKDEILALLKALFLPKRLSIIHCPGHQKGHSAEARGNRMADQAARKAAITETPDTSTLLAGKRTADGSEFEKRTADGSEFESPKKKAKVE

SEQ ID NO: 4531 - protein, 2094 aa, synthetic construct
MPAAKRVKLDGGDKKYSIGLDIGTNSVGWAVITDEYKVPSKKFKVLGNTDRHSIKKNLIGALLFDSGETAEATRLKRTARRRYTRRKNRICYLQEIFSNEMAKVDDSFFHRLEESFLVEEDKKHERHPIFGNIVDEVAYHEKYPTIYHLRKKLVDSTDKADLRLIYLALAHMIKFRGHFLIEGDLNPDNSDVDKLFIQLVQTYNQLFEENPINASGVDAKAILSARLSKSRRLENLIAQLPGEKKNGLFGNLIALSLGLTPNFKSNFDLAEDAKLQLSKDTYDDDLDNLLAQIGDQYADLFLAAKNLSDAILLSDILRVNTEITKAPLSASMIKRYDEHHQDLTLLKALVRQQLPEKYKEIFFDQSKNGYAGYIDGGASQEEFYKFIKPILEKMDGTEELLVKLNREDLLRKQRTFDNGSIPHQIHLGELHAILRRQEDFYPFLKDNREKIEKILTFRIPYYVGPLARGNSRFAWMTRKSEETITPWNFEEVVDKGASAQSFIERMTNFDKNLPNEKVLPKHSLLYEYFTVYNELTKVKYVTEGMRKPAFLSGEQKKAIVDLLFKTNRKVTVKQLKEDYFKKIECFDSVEISGVEDRFNASLGTYHDLLKIIKDKDFLDNEENEDILEDIVLTLTLFEDREMIEERLKTYAHLFDDKVMKQLKRRRYTGWGRLSRKLINGIRDKQSGKTILDFLKSDGFANRNFMQLIHDDSLTFKEDIQKAQVSGQGDSLHEHIANLAGSPAIKKGILQTVKVVDELVKVMGRHKPENIVIEMARENQTTQKGQKNSRERMKRIEEGIKELGSQILKEHPVENTQLQNEKLYLYYLQNGRDMYVDQELDINRLSDYDVDHIVPQSFLKDDSIDNKVLTRSDKARGKSDNVPSEEVVKKMKNYWRQLLNAKLITQRKFDNLTKAERGGLSELDKAGFIKRQLVETRQITKHVAQILDSRMNTKYDENDKLIREVKVITLKSKLVSDFRKDFQFYKVREINNYHHAHDAYLNAVVGTALIKKYPKLESEFVYGDYKVYDVRKMIAKSEQEIGKATAKYFFYSNIMNFFKTEITLANGEIRKRPLIETNGETGEIVWDKGRDFATVRKVLSMPQVNIVKKTEVQTGGFSKESILPKRNSDKLIARKKDWDPKKYGGFDSPTVAYSVLVVAKVEKGKSKKLKSVKELLGITIMERSSFEKNPIDFLEAKGYKEVKKDLIIKLPKYSLFELENGRKRMLASAGELQKGNELALPSKYVNFLYLASHYEKLKGSPEDNEQKQLFVEQHKHYLDEIIEQISEFSKRVILADANLDKVLSAYNKHRDKPIREQAENIIHLFTLTNLGAPAAFKYFDTTIDRKRYTSTKEVLDATLIHQSITGLYETRIDLSQLGGDGGEAAAKGGGGSSGGVLNLEEEYRLHEKPVPSSIDPSWLQLFPTVWAERAGMGLANQVPPVVVELRSGASPVAVRQYPMSKEAREGIRPHIQRFLDLGVLVPCQSPWNTPLLPVKKPGTNDYRPVQDLREINKRVQDIHPTVPNPYNLLSSLPPSHTWYSVLDLKDAFFCLKLHPNSQPLFAFEWRDPEKGNTGQLTWTRLPQGFKNSPTLFNEALHRDLAPFRALNPQVVLLQYVDDLLVAAPTYRDCKEGTQKLLQELSKLGYRVSAKKAQLCQKEVTYLGYLLKEGKRWLTPARKATVMKIPPPTTPRQVREFLGKAGFCRLFIPGFASLAAPLYPLTKPSIPFIWTEEHQKAFDRIKEALLSAPALALPDLTKPFTLYVDERAGVARGVLTQTLGPWRRPVAYLSKKLDPVASGWPTCLKAVAAVALLLKDADKLTLGQNVTVIASHSLESIVRQPPDRWMTNARMTHYQSLLLNERVSFAPPAVLNPATLLPVESEATPVHRCSEILAEETGTRRDLKDQPLPGVPAWYTDGSSFIAEGKRRAGAAIVDGKRTVWASSLPEGTSAQKAELVALTQALRLAEGKDINIYTDSRYAFATAHIHGAIYKQRGWLTSAGKDIKNKEEILALLEAIHLPKRVAIIHCPGHQKGNDPVATGNRRADEAAKQAALSTRVLAETTKPAGKRTADGSEFEKRTADGSEFESPKKKAKVE

SEQ ID NO: 4532 - protein, 2088 aa, synthetic construct
MPAAKRVKLDGGDKKYSIGLDIGTNSVGWAVITDEYKVPSKKFKVLGNTDRHSIKKNLIGALLFDSGETAEATRLKRTARRRYTRRKNRICYLQEIFSNEMAKVDDSFFHRLEESFLVEEDKKHERHPIFGNIVDEVAYHEKYPTIYHLRKKLVDSTDKADLRLIYLALAHMIKFRGHFLIEGDLNPDNSDVDKLFIQLVQTYNQLFEENPINASGVDAKAILSARLSKSRRLENLIAQLPGEKKNGLFGNLIALSLGLTPNFKSNFDLAEDAKLQLSKDTYDDDLDNLLAQIGDQYADLFLAAKNLSDAILLSDILRVNTEITKAPLSASMIKRYDEHHQDLTLLKALVRQQLPEKYKEIFFDQSKNGYAGYIDGGASQEEFYKFIKPILEKMDGTEELLVKLNREDLLRKQRTFDNGSIPHQIHLGELHAILRRQEDFYPFLKDNREKIEKILTFRIPYYVGPLARGNSRFAWMTRKSEETITPWNFEEVVDKGASAQSFIERMTNFDKNLPNEKVLPKHSLLYEYFTVYNELTKVKYVTEGMRKPAFLSGEQKKAIVDLLFKTNRKVTVKQLKEDYFKKIECFDSVEISGVEDRFNASLGTYHDLLKIIKDKDFLDNEENEDILEDIVLTLTLFEDREMIEERLKTYAHLFDDKVMKQLKRRRYTGWGRLSRKLINGIRDKQSGKTILDFLKSDGFANRNFMQLIHDDSLTFKEDIQKAQVSGQGDSLHEHIANLAGSPAIKKGILQTVKVVDELVKVMGRHKPENIVIEMARENQTTQKGQKNSRERMKRIEEGIKELGSQILKEHPVENTQLQNEKLYLYYLQNGRDMYVDQELDINRLSDYDVDHIVPQSFLKDDSIDNKVLTRSDKARGKSDNVPSEEVVKKMKNYWRQLLNAKLITQRKFDNLTKAERGGLSELDKAGFIKRQLVETRQITKHVAQILDSRMNTKYDENDKLIREVKVITLKSKLVSDFRKDFQFYKVREINNYHHAHDAYLNAVVGTALIKKYPKLESEFVYGDYKVYDVRKMIAKSEQEIGKATAKYFFYSNIMNFFKTEITLANGEIRKRPLIETNGETGEIVWDKGRDFATVRKVLSMPQVNIVKKTEVQTGGFSKESILPKRNSDKLIARKKDWDPKKYGGFDSPTVAYSVLVVAKVEKGKSKKLKSVKELLGITIMERSSFEKNPIDFLEAKGYKEVKKDLIIKLPKYSLFELENGRKRMLASAGELQKGNELALPSKYVNFLYLASHYEKLKGSPEDNEQKQLFVEQHKHYLDEIIEQISEFSKRVILADANLDKVLSAYNKHRDKPIREQAENIIHLFTLTNLGAPAAFKYFDTTIDRKRYTSTKEVLDATLIHQSITGLYETRIDLSQLGGDGGGSSGGGPAPGGTLQLDDEYRLYSPLVKPDQNIQFWLEQFPQAWAETAGMGLAKQVPPQVIQLKASATPVSVRQYPLSKEAQEGIRPHVQRLIQQGILVPVQSPWNTPLLPVRKPGTNDYRPVQDLREVNKRVQDIHPTVPNPYNLLCALPPQRSWYTVLDLKDAFFCLRLHPTSQPLFAFEWRDPGTGRTGQLTWTRLPQGFKNSPTIFNEALHRDLANFRIQHPQVTLLQYVDDLLLAGATKQDCLEGTKALLLELSDLGYRASAKKAQICRREVTYLGYSLRDGQRWLTEARKKTVVQIPAPTTAKQVREFLGTAGFCRLWIPGFATLAAPLYPLTKPKGEFSWAPEHQKAFDAIKKALLSAPALALPDVTKPFTLYVDERKGVARGVLTQTLGPWRRPVAYLSKKLDPVASGWPVCLKAIAAVAILVKDADKLTLGQNITVIAPHALENIVRQPPDRWMTNARMTHYQSLLLTERVTFAPPAALNPATLLPEETDEPVTHDCHQLLIEETGVRKDLTDIPLTGEVLTWFTDGSSYVVEGKRMAGAAVVDGTRTIWASSLPEGTSAQKAELMALTQALRLAEGKSINIYTDSRYAFATAHVHGAIYKQRGWLTSAGREIKNKEEILSLLEALHLPKRLAIIHCPGHQKAKDPISRGNQMADRVAKQAAQGVNLLAGKRTADGSEFEKRTADGSEFESPKKKAKVE

SEQ ID NO: 4533 - protein, 2094 aa, synthetic construct
MPAAKRVKLDGGDKKYSIGLDIGTNSVGWAVITDEYKVPSKKFKVLGNTDRHSIKKNLIGALLFDSGETAEATRLKRTARRRYTRRKNRICYLQEIFSNEMAKVDDSFFHRLEESFLVEEDKKHERHPIFGNIVDEVAYHEKYPTIYHLRKKLVDSTDKADLRLIYLALAHMIKFRGHFLIEGDLNPDNSDVDKLFIQLVQTYNQLFEENPINASGVDAKAILSARLSKSRRLENLIAQLPGEKKNGLFGNLIALSLGLTPNFKSNFDLAEDAKLQLSKDTYDDDLDNLLAQIGDQYADLFLAAKNLSDAILLSDILRVNTEITKAPLSASMIKRYDEHHQDLTLLKALVRQQLPEKYKEIFFDQSKNGYAGYIDGGASQEEFYKFIKPILEKMDGTEELLVKLNREDLLRKQRTFDNGSIPHQIHLGELHAILRRQEDFYPFLKDNREKIEKILTFRIPYYVGPLARGNSRFAWMTRKSEETITPWNFEEVVDKGASAQSFIERMTNFDKNLPNEKVLPKHSLLYEYFTVYNELTKVKYVTEGMRKPAFLSGEQKKAIVDLLFKTNRKVTVKQLKEDYFKKIECFDSVEISGVEDRFNASLGTYHDLLKIIKDKDFLDNEENEDILEDIVLTLTLFEDREMIEERLKTYAHLFDDKVMKQLKRRRYTGWGRLSRKLINGIRDKQSGKTILDFLKSDGFANRNFMQLIHDDSLTFKEDIQKAQVSGQGDSLHEHIANLAGSPAIKKGILQTVKVVDELVKVMGRHKPENIVIEMARENQTTQKGQKNSRERMKRIEEGIKELGSQILKEHPVENTQLQNEKLYLYYLQNGRDMYVDQELDINRLSDYDVDHIVPQSFLKDDSIDNKVLTRSDKARGKSDNVPSEEVVKKMKNYWRQLLNAKLITQRKFDNLTKAERGGLSELDKAGFIKRQLVETRQITKHVAQILDSRMNTKYDENDKLIREVKVITLKSKLVSDFRKDFQFYKVREINNYHHAHDAYLNAVVGTALIKKYPKLESEFVYGDYKVYDVRKMIAKSEQEIGKATAKYFFYSNIMNFFKTEITLANGEIRKRPLIETNGETGEIVWDKGRDFATVRKVLSMPQVNIVKKTEVQTGGFSKESILPKRNSDKLIARKKDWDPKKYGGFDSPTVAYSVLVVAKVEKGKSKKLKSVKELLGITIMERSSFEKNPIDFLEAKGYKEVKKDLIIKLPKYSLFELENGRKRMLASAGELQKGNELALPSKYVNFLYLASHYEKLKGSPEDNEQKQLFVEQHKHYLDEIIEQISEFSKRVILADANLDKVLSAYNKHRDKPIREQAENIIHLFTLTNLGAPAAFKYFDTTIDRKRYTSTKEVLDATLIHQSITGLYETRIDLSQLGGDGGPAPGSSGGGGGTLNLEDEYRLYETSAEPEVSPGSTWLSDFPQAWAETGGMGLAVRQAPLIIPLKATSTPVSIKQYPMSQEAKLGIKPHIQRLLDQGILVPCQSPWNTPLLPVKKPGTNDYRPVQDLREVNKRVEDIHPTVPNPYNLLSGLPPSHRWYTVLDLKDAFFCLRLHPTSQPLFAFEWRDPGMGISGQLTWTRLPQGFKNSPTLFNEALHRDLADFRIQHPDLILLQYVDDILLAATSELDCQQGTRALLLTLGNLGYRASAKKAQLCQKQVKYLGYLLKEGQRWLTEARKETVMGQPTPKTPRQLREFLGKAGFCRLFIPGFAEMAAPLYPLTKPGTLFNWGPDQQKAYQEIKQALLTAPALGLPDLTKPFELFVDEKQGYAKGVLTQKLGPWRRPVAYLSKKLDPVAAGWPPCLRMVAAIAVLRKDAGKLTMGQPLVILAPHAVEALVKQPPDRWLSNARMTHYQAMLLDTDRVQFGPVVALNPATLLPLPEEGAPHDCLEILAETHGTRPDLTDQPIPDADHTWYTDGSSFLQEGQRKAGAAVTTETEVIWARALPAGTSAQRAELIALTQALKMAEGKRLNVYTDSRYAFATAHIHGEIYRRRGWLTSEGREIKNKSEILALLKALFLPKRLSIIHCLGHQKGDSAEARGNRLADQAAREAAIKTPPDTSTLLAGKRTADGSEFEKRTADGSEFESPKKKAKVE

SEQ ID NO: 4534 - protein, 2096 aa, synthetic construct
MPAAKRVKLDGGDKKYSIGLDIGTNSVGWAVITDEYKVPSKKFKVLGNTDRHSIKKNLIGALLFDSGETAEATRLKRTARRRYTRRKNRICYLQEIFSNEMAKVDDSFFHRLEESFLVEEDKKHERHPIFGNIVDEVAYHEKYPTIYHLRKKLVDSTDKADLRLIYLALAHMIKFRGHFLIEGDLNPDNSDVDKLFIQLVQTYNQLFEENPINASGVDAKAILSARLSKSRRLENLIAQLPGEKKNGLFGNLIALSLGLTPNFKSNFDLAEDAKLQLSKDTYDDDLDNLLAQIGDQYADLFLAAKNLSDAILLSDILRVNTEITKAPLSASMIKRYDEHHQDLTLLKALVRQQLPEKYKEIFFDQSKNGYAGYIDGGASQEEFYKFIKPILEKMDGTEELLVKLNREDLLRKQRTFDNGSIPHQIHLGELHAILRRQEDFYPFLKDNREKIEKILTFRIPYYVGPLARGNSRFAWMTRKSEETITPWNFEEVVDKGASAQSFIERMTNFDKNLPNEKVLPKHSLLYEYFTVYNELTKVKYVTEGMRKPAFLSGEQKKAIVDLLFKTNRKVTVKQLKEDYFKKIECFDSVEISGVEDRFNASLGTYHDLLKIIKDKDFLDNEENEDILEDIVLTLTLFEDREMIEERLKTYAHLFDDKVMKQLKRRRYTGWGRLSRKLINGIRDKQSGKTILDFLKSDGFANRNFMQLIHDDSLTFKEDIQKAQVSGQGDSLHEHIANLAGSPAIKKGILQTVKVVDELVKVMGRHKPENIVIEMARENQTTQKGQKNSRERMKRIEEGIKELGSQILKEHPVENTQLQNEKLYLYYLQNGRDMYVDQELDINRLSDYDVDHIVPQSFLKDDSIDNKVLTRSDKARGKSDNVPSEEVVKKMKNYWRQLLNAKLITQRKFDNLTKAERGGLSELDKAGFIKRQLVETRQITKHVAQILDSRMNTKYDENDKLIREVKVITLKSKLVSDFRKDFQFYKVREINNYHHAHDAYLNAVVGTALIKKYPKLESEFVYGDYKVYDVRKMIAKSEQEIGKATAKYFFYSNIMNFFKTEITLANGEIRKRPLIETNGETGEIVWDKGRDFATVRKVLSMPQVNIVKKTEVQTGGFSKESILPKRNSDKLIARKKDWDPKKYGGFDSPTVAYSVLVVAKVEKGKSKKLKSVKELLGITIMERSSFEKNPIDFLEAKGYKEVKKDLIIKLPKYSLFELENGRKRMLASAGELQKGNELALPSKYVNFLYLASHYEKLKGSPEDNEQKQLFVEQHKHYLDEIIEQISEFSKRVILADANLDKVLSAYNKHRDKPIREQAENIIHLFTLTNLGAPAAFKYFDTTIDRKRYTSTKEVLDATLIHQSITGLYETRIDLSQLGGDGGGGGPAPEAAAKGGTLNIEDEHRLHETSKEPDVSLGSTWLSDFPQAWAETGGMGLAVRQAPLIIPLKATSTPVSIKQYPMSQEARLGIKPHIQRLLDQGILVPCQSPWNTPLLPVKKPGTNDYRPVQDLREVNKRVEDIHPTVPNPYNLLSGLPPSHQWYTVLDLKDAFFCLRLHPTSQPLFAFEWRDPEMGISGQLTWTRLPQGFKNSPTLFNEALHRDLADFRIQHPDLILLQYVDDLLLAATSELDCQQGTRALLQTLGNLGYRASAKKAQICQKQVKYLGYLLKEGQRWLTEARKETVMGQPTPKTPRQLREFLGTAGFCRLWIPGFAEMAAPLYPLTKPGTLFNWGPDQQKAYQEIKQALLTAPALGLPDLTKPFELFVDEKQGYAKGVLTQKLGPWRRPVAYLSKKLDPVAAGWPPCLRMVAAIAVLTKDAGKLTMGQPLVILAPHAVEALVKQPPDRWLSNARMTHYQALLLDTDRVQFGPVVALNPATLLPLPEEGLQHNCLDILAEAHGTRPDLTDQPLPDADHTWYTDGSSLLQEGQRKAGAAVTTETEVIWAKALPAGTSAQRAELIALTQALKMAEGKKLNVYTDSRYAFATAHIHGEIYRRRGWLTSEGKEIKNKDEILALLKALFLPKRLSIIHCPGHQKGHSAEARGNRMADQAARKAAITETPDTSTLLAGKRTADGSEFEKRTADGSEFESPKKKAKVE

SEQ ID NO: 4535 - protein, 2096 aa, synthetic construct
MPAAKRVKLDGGDKKYSIGLDIGTNSVGWAVITDEYKVPSKKFKVLGNTDRHSIKKNLIGALLFDSGETAEATRLKRTARRRYTRRKNRICYLQEIFSNEMAKVDDSFFHRLEESFLVEEDKKHERHPIFGNIVDEVAYHEKYPTIYHLRKKLVDSTDKADLRLIYLALAHMIKFRGHFLIEGDLNPDNSDVDKLFIQLVQTYNQLFEENPINASGVDAKAILSARLSKSRRLENLIAQLPGEKKNGLFGNLIALSLGLTPNFKSNFDLAEDAKLQLSKDTYDDDLDNLLAQIGDQYADLFLAAKNLSDAILLSDILRVNTEITKAPLSASMIKRYDEHHQDLTLLKALVRQQLPEKYKEIFFDQSKNGYAGYIDGGASQEEFYKFIKPILEKMDGTEELLVKLNREDLLRKQRTFDNGSIPHQIHLGELHAILRRQEDFYPFLKDNREKIEKILTFRIPYYVGPLARGNSRFAWMTRKSEETITPWNFEEVVDKGASAQSFIERMTNFDKNLPNEKVLPKHSLLYEYFTVYNELTKVKYVTEGMRKPAFLSGEQKKAIVDLLFKTNRKVTVKQLKEDYFKKIECFDSVEISGVEDRFNASLGTYHDLLKIIKDKDFLDNEENEDILEDIVLTLTLFEDREMIEERLKTYAHLFDDKVMKQLKRRRYTGWGRLSRKLINGIRDKQSGKTILDFLKSDGFANRNFMQLIHDDSLTFKEDIQKAQVSGQGDSLHEHIANLAGSPAIKKGILQTVKVVDELVKVMGRHKPENIVIEMARENQTTQKGQKNSRERMKRIEEGIKELGSQILKEHPVENTQLQNEKLYLYYLQNGRDMYVDQELDINRLSDYDVDHIVPQSFLKDDSIDNKVLTRSDKARGKSDNVPSEEVVKKMKNYWRQLLNAKLITQRKFDNLTKAERGGLSELDKAGFIKRQLVETRQITKHVAQILDSRMNTKYDENDKLIREVKVITLKSKLVSDFRKDFQFYKVREINNYHHAHDAYLNAVVGTALIKKYPKLESEFVYGDYKVYDVRKMIAKSEQEIGKATAKYFFYSNIMNFFKTEITLANGEIRKRPLIETNGETGEIVWDKGRDFATVRKVLSMPQVNIVKKTEVQTGGFSKESILPKRNSDKLIARKKDWDPKKYGGFDSPTVAYSVLVVAKVEKGKSKKLKSVKELLGITIMERSSFEKNPIDFLEAKGYKEVKKDLIIKLPKYSLFELENGRKRMLASAGELQKGNELALPSKYVNFLYLASHYEKLKGSPEDNEQKQLFVEQHKHYLDEIIEQISEFSKRVILADANLDKVLSAYNKHRDKPIREQAENIIHLFTLTNLGAPAAFKYFDTTIDRKRYTSTKEVLDATLIHQSITGLYETRIDLSQLGGDGGEAAAKGGGPAPGGTLNIEDEHRLHETSKEPDVSLGSTWLSDFPQAWAETGGMGLAVRQAPLIIPLKATSTPVSIKQYPMSQEARLGIKPHIQRLLDQGILVPCQSPWNTPLLPVKKPGTNDYRPVQDLREVNKRVEDIHPTVPNPYNLLSGLPPSHQWYTVLDLKDAFFCLRLHPTSQPLFAFEWRDPEMGISGQLTWTRLPQGFKNSPTLFNEALHRDLADFRIQHPDLILLQYVDDLLLAATSELDCQQGTRALLQTLGNLGYRASAKKAQICQKQVKYLGYLLKEGQRWLTEARKETVMGQPTPKTPRQLREFLGTAGFCRLWIPGFAEMAAPLYPLTKPGTLFNWGPDQQKAYQEIKQALLTAPALGLPDLTKPFELFVDEKQGYAKGVLTQKLGPWRRPVAYLSKKLDPVAAGWPPCLRMVAAIAVLTKDAGKLTMGQPLVILAPHAVEALVKQPPDRWLSNARMTHYQALLLDTDRVQFGPVVALNPATLLPLPEEGLQHNCLDILAEAHGTRPDLTDQPLPDADHTWYTDGSSLLQEGQRKAGAAVTTETEVIWAKALPAGTSAQRAELIALTQALKMAEGKKLNVYTDSRYAFATAHIHGEIYRRRGWLTSEGKEIKNKDEILALLKALFLPKRLSIIHCPGHQKGHSAEARGNRMADQAARKAAITETPDTSTLLAGKRTADGSEFEKRTADGSEFESPKKKAKVE

SEQ ID NO: 4536 - protein, 2096 aa, synthetic construct
MPAAKRVKLDGGDKKYSIGLDIGTNSVGWAVITDEYKVPSKKFKVLGNTDRHSIKKNLIGALLFDSGETAEATRLKRTARRRYTRRKNRICYLQEIFSNEMAKVDDSFFHRLEESFLVEEDKKHERHPIFGNIVDEVAYHEKYPTIYHLRKKLVDSTDKADLRLIYLALAHMIKFRGHFLIEGDLNPDNSDVDKLFIQLVQTYNQLFEENPINASGVDAKAILSARLSKSRRLENLIAQLPGEKKNGLFGNLIALSLGLTPNFKSNFDLAEDAKLQLSKDTYDDDLDNLLAQIGDQYADLFLAAKNLSDAILLSDILRVNTEITKAPLSASMIKRYDEHHQDLTLLKALVRQQLPEKYKEIFFDQSKNGYAGYIDGGASQEEFYKFIKPILEKMDGTEELLVKLNREDLLRKQRTFDNGSIPHQIHLGELHAILRRQEDFYPFLKDNREKIEKILTFRIPYYVGPLARGNSRFAWMTRKSEETITPWNFEEVVDKGASAQSFIERMTNFDKNLPNEKVLPKHSLLYEYFTVYNELTKVKYVTEGMRKPAFLSGEQKKAIVDLLFKTNRKVTVKQLKEDYFKKIECFDSVEISGVEDRFNASLGTYHDLLKIIKDKDFLDNEENEDILEDIVLTLTLFEDREMIEERLKTYAHLFDDKVMKQLKRRRYTGWGRLSRKLINGIRDKQSGKTILDFLKSDGFANRNFMQLIHDDSLTFKEDIQKAQVSGQGDSLHEHIANLAGSPAIKKGILQTVKVVDELVKVMGRHKPENIVIEMARENQTTQKGQKNSRERMKRIEEGIKELGSQILKEHPVENTQLQNEKLYLYYLQNGRDMYVDQELDINRLSDYDVDHIVPQSFLKDDSIDNKVLTRSDKARGKSDNVPSEEVVKKMKNYWRQLLNAKLITQRKFDNLTKAERGGLSELDKAGFIKRQLVETRQITKHVAQILDSRMNTKYDENDKLIREVKVITLKSKLVSDFRKDFQFYKVREINNYHHAHDAYLNAVVGTALIKKYPKLESEFVYGDYKVYDVRKMIAKSEQEIGKATAKYFFYSNIMNFFKTEITLANGEIRKRPLIETNGETGEIVWDKGRDFATVRKVLSMPQVNIVKKTEVQTGGFSKESILPKRNSDKLIARKKDWDPKKYGGFDSPTVAYSVLVVAKVEKGKSKKLKSVKELLGITIMERSSFEKNPIDFLEAKGYKEVKKDLIIKLPKYSLFELENGRKRMLASAGELQKGNELALPSKYVNFLYLASHYEKLKGSPEDNEQKQLFVEQHKHYLDEIIEQISEFSKRVILADANLDKVLSAYNKHRDKPIREQAENIIHLFTLTNLGAPAAFKYFDTTIDRKRYTSTKEVLDATLIHQSITGLYETRIDLSQLGGDGGEAAAKPAPGGGGGTLNIEDEYRLHETSKEPDVSLGSTWLSDFPQAWAETGGMGLAVRQAPLIIPLKATSTPVSIKQYPMSQEARLGIKPHIQRLLDQGILVPCQSPWNTPLLPVKKPGTNDYRPVQDLREVNKRVEDIHPTVPNPYNLLSGLPPSHQWYTVLDLKDAFFCLRLHPTSQPLFAFEWRDPEMGISGQLTWTRLPQGFKNSPTLFNEALHRDLAGFRIQHPDLILLQYVDDLLLAATSELDCQQGTRALLQTLGDLGYRASAKKAQICQKQVKYLGYLLKEGQRWLTEARKETVMGQPIPKTPRQLREFLGKAGFCRLFIPGFAEMAAPLYPLTKPGTLFNWGPDQQKAFQEIKQALLTAPALGLPDLTKPFELFVDEKQGYAKGVLTQKLGPWRRPVAYLSKKLDPVAAGWPPCLRMVAAIAVLTKDAGKLTMGQPLVILAPHAVEALVKQPPDRWLSNARMTHYQALLLDTDRVQFGPVVALNPATLLPLPEEGLQHDCLDILAEAHGTRSDLMDQPLPDADHTWYTDGSSFLQEGQRKAGAAVTTETEVIWARALPAGTSAQRAELIALTQALKMAEGKKLNVYTDSRYAFATAHIHGEIYRRRGWLTSEGKEIKNKDEILALLKALFLPKRLSIIHCPGHQKGNSAEARGNRMADQAAREVATRETPETSTLLAGKRTADGSEFEKRTADGSEFESPKKKAKVE

SEQ ID NO: 4537 - protein, 2127 aa, synthetic construct
MPAAKRVKLDGGDKKYSIGLDIGTNSVGWAVITDEYKVPSKKFKVLGNTDRHSIKKNLIGALLFDSGETAEATRLKRTARRRYTRRKNRICYLQEIFSNEMAKVDDSFFHRLEESFLVEEDKKHERHPIFGNIVDEVAYHEKYPTIYHLRKKLVDSTDKADLRLIYLALAHMIKFRGHFLIEGDLNPDNSDVDKLFIQLVQTYNQLFEENPINASGVDAKAILSARLSKSRRLENLIAQLPGEKKNGLFGNLIALSLGLTPNFKSNFDLAEDAKLQLSKDTYDDDLDNLLAQIGDQYADLFLAAKNLSDAILLSDILRVNTEITKAPLSASMIKRYDEHHQDLTLLKALVRQQLPEKYKEIFFDQSKNGYAGYIDGGASQEEFYKFIKPILEKMDGTEELLVKLNREDLLRKQRTFDNGSIPHQIHLGELHAILRRQEDFYPFLKDNREKIEKILTFRIPYYVGPLARGNSRFAWMTRKSEETITPWNFEEVVDKGASAQSFIERMTNFDKNLPNEKVLPKHSLLYEYFTVYNELTKVKYVTEGMRKPAFLSGEQKKAIVDLLFKTNRKVTVKQLKEDYFKKIECFDSVEISGVEDRFNASLGTYHDLLKIIKDKDFLDNEENEDILEDIVLTLTLFEDREMIEERLKTYAHLFDDKVMKQLKRRRYTGWGRLSRKLINGIRDKQSGKTILDFLKSDGFANRNFMQLIHDDSLTFKEDIQKAQVSGQGDSLHEHIANLAGSPAIKKGILQTVKVVDELVKVMGRHKPENIVIEMARENQTTQKGQKNSRERMKRIEEGIKELGSQILKEHPVENTQLQNEKLYLYYLQNGRDMYVDQELDINRLSDYDVDHIVPQSFLKDDSIDNKVLTRSDKARGKSDNVPSEEVVKKMKNYWRQLLNAKLITQRKFDNLTKAERGGLSELDKAGFIKRQLVETRQITKHVAQILDSRMNTKYDENDKLIREVKVITLKSKLVSDFRKDFQFYKVREINNYHHAHDAYLNAVVGTALIKKYPKLESEFVYGDYKVYDVRKMIAKSEQEIGKATAKYFFYSNIMNFFKTEITLANGEIRKRPLIETNGETGEIVWDKGRDFATVRKVLSMPQVNIVKKTEVQTGGFSKESILPKRNSDKLIARKKDWDPKKYGGFDSPTVAYSVLVVAKVEKGKSKKLKSVKELLGITIMERSSFEKNPIDFLEAKGYKEVKKDLIIKLPKYSLFELENGRKRMLASAGELQKGNELALPSKYVNFLYLASHYEKLKGSPEDNEQKQLFVEQHKHYLDEIIEQISEFSKRVILADANLDKVLSAYNKHRDKPIREQAENIIHLFTLTNLGAPAAFKYFDTTIDRKRYTSTKEVLDATLIHQSITGLYETRIDLSQLGGDGGPAPEAAAKGGGGGLLGRDLLTKLKAQIQFSTEGPQVTWEDRPAMCLVLNLEEEYRLHEKPVPPSIDPSWLQLFPMVWAEKAGMGLANQVPPVVVELKSDASPVAVRQYPMSKEAREGIRPHIQRFLDLGILVPCQSPWNTPLLPVKKPGTNDYRPVQDLREVNKRVQDIHPTVPNPYNLLSSLPPSHTWYSVLDLKDAFFCLKLHPNSQPLFAFEWRDPEKGNTGQLTWTRLPQGFKNSPTLFNEALHRDLASFRALNPQVVMLQYVDDLLVAAPTYRDCKEGTRRLLQELSKLGYRVSAKKAQLCREEVTYLGYLLKGGKRWLTPARKATVMKIPTPTTPRQVREFLGTAGFCRLWIPGFASLAAPLYPLTRPKVPFTWTEAHQEAFGRIKEALLSAPALALPDLTKPFALYVDEKEGVARGVLTQTLGPWRRPVAYLSKKLDPVASGWPTCLKAIAAVALLLKDADKLTLGQNVLVIAPHNLESIVRQPPDRWMTNARMTHYQSLLLNERVSFAPPAILNPATLLPVESDDTPIHICSEILAEETGTRPDLRDQPLPGVPAWYTDGSSFIMDGRRQAGAAIVDNKRTVWASNLPEGTSAQKAELIALTQALRLAEGKSINIYTDSRYAFATAHVHGAIYKQRGWLTSAGKDIKNKEEILALLEAIHLPKRVAIIHCPGHQRGTDPVATGNRKADEAAKQAAQSTRILTETTKNAGKRTADGSEFEKRTADGSEFESPKKKAKVE

SEQ ID NO: 4538 - protein, 2096 aa, synthetic construct
MPAAKRVKLDGGDKKYSIGLDIGTNSVGWAVITDEYKVPSKKFKVLGNTDRHSIKKNLIGALLFDSGETAEATRLKRTARRRYTRRKNRICYLQEIFSNEMAKVDDSFFHRLEESFLVEEDKKHERHPIFGNIVDEVAYHEKYPTIYHLRKKLVDSTDKADLRLIYLALAHMIKFRGHFLIEGDLNPDNSDVDKLFIQLVQTYNQLFEENPINASGVDAKAILSARLSKSRRLENLIAQLPGEKKNGLFGNLIALSLGLTPNFKSNFDLAEDAKLQLSKDTYDDDLDNLLAQIGDQYADLFLAAKNLSDAILLSDILRVNTEITKAPLSASMIKRYDEHHQDLTLLKALVRQQLPEKYKEIFFDQSKNGYAGYIDGGASQEEFYKFIKPILEKMDGTEELLVKLNREDLLRKQRTFDNGSIPHQIHLGELHAILRRQEDFYPFLKDNREKIEKILTFRIPYYVGPLARGNSRFAWMTRKSEETITPWNFEEVVDKGASAQSFIERMTNFDKNLPNEKVLPKHSLLYEYFTVYNELTKVKYVTEGMRKPAFLSGEQKKAIVDLLFKTNRKVTVKQLKEDYFKKIECFDSVEISGVEDRFNASLGTYHDLLKIIKDKDFLDNEENEDILEDIVLTLTLFEDREMIEERLKTYAHLFDDKVMKQLKRRRYTGWGRLSRKLINGIRDKQSGKTILDFLKSDGFANRNFMQLIHDDSLTFKEDIQKAQVSGQGDSLHEHIANLAGSPAIKKGILQTVKVVDELVKVMGRHKPENIVIEMARENQTTQKGQKNSRERMKRIEEGIKELGSQILKEHPVENTQLQNEKLYLYYLQNGRDMYVDQELDINRLSDYDVDHIVPQSFLKDDSIDNKVLTRSDKARGKSDNVPSEEVVKKMKNYWRQLLNAKLITQRKFDNLTKAERGGLSELDKAGFIKRQLVETRQITKHVAQILDSRMNTKYDENDKLIREVKVITLKSKLVSDFRKDFQFYKVREINNYHHAHDAYLNAVVGTALIKKYPKLESEFVYGDYKVYDVRKMIAKSEQEIGKATAKYFFYSNIMNFFKTEITLANGEIRKRPLIETNGETGEIVWDKGRDFATVRKVLSMPQVNIVKKTEVQTGGFSKESILPKRNSDKLIARKKDWDPKKYGGFDSPTVAYSVLVVAKVEKGKSKKLKSVKELLGITIMERSSFEKNPIDFLEAKGYKEVKKDLIIKLPKYSLFELENGRKRMLASAGELQKGNELALPSKYVNFLYLASHYEKLKGSPEDNEQKQLFVEQHKHYLDEIIEQISEFSKRVILADANLDKVLSAYNKHRDKPIREQAENIIHLFTLTNLGAPAAFKYFDTTIDRKRYTSTKEVLDATLIHQSITGLYETRIDLSQLGGDGGGSSEAAAKPAPGGTLNIEDEYRLHETSKEPDVPLGSTWLSDFPQAWAETGGMGLAVRQAPLIIPLKATSTPVSIKQYPMSQEARLGIKPHIQRLLDQGILVPCQSPWNTPLLPVKKPGTNDYRPVQDLREVNKRVEDIHPTVPNPYNLLSGLPPSHQWYTVLDLKDAFFCLRLHPTSQPLFAFEWRDPEMGISGQLTWTRLPQGFKNSPTLFNEALHRDLADFRIQHPDLILLQYVDDLLLAATSEQDCQRGTRALLQTLGNLGYRASAKKAQICQKQVKYLGYLLKEGQRWLTEARKETVMGQPTPKTPRQLREFLGTAGFCRLWIPGFAEMAAPLYPLTKPGTLFNWGPDQQKAYQEIKQALLTAPALGLPDLTKPFELFVDEKQGYAKGVLTQKLGPWRRPVAYLSKKLDPVAAGWPPCLRMVAAIAVLTKDAGKLTMGQPLVILAPHAVEALVKQPPDRWLSNARMTHYQAMLLDTDRVQFGPVVALNPATLLPLPEKEAPHDCLEILAETHGTRPDLTDQPIPDADYTWYTDGSSFLQEGQRRAGAAVTTETEVIWARALPAGTSAQRAELIALTQALKMAEGKKLNVYTDSRYAFATAHVHGEIYRRRGWLTSEGREIKNKNEILALLKALFLPKRLSIIHCPGHQKGNSAEARGNRMADQAAREAAMKAVLETSTLLAGKRTADGSEFEKRTADGSEFESPKKKAKVE

SEQ ID NO: 4539 - protein, 2098 aa, synthetic construct
MPAAKRVKLDGGDKKYSIGLDIGTNSVGWAVITDEYKVPSKKFKVLGNTDRHSIKKNLIGALLFDSGETAEATRLKRTARRRYTRRKNRICYLQEIFSNEMAKVDDSFFHRLEESFLVEEDKKHERHPIFGNIVDEVAYHEKYPTIYHLRKKLVDSTDKADLRLIYLALAHMIKFRGHFLIEGDLNPDNSDVDKLFIQLVQTYNQLFEENPINASGVDAKAILSARLSKSRRLENLIAQLPGEKKNGLFGNLIALSLGLTPNFKSNFDLAEDAKLQLSKDTYDDDLDNLLAQIGDQYADLFLAAKNLSDAILLSDILRVNTEITKAPLSASMIKRYDEHHQDLTLLKALVRQQLPEKYKEIFFDQSKNGYAGYIDGGASQEEFYKFIKPILEKMDGTEELLVKLNREDLLRKQRTFDNGSIPHQIHLGELHAILRRQEDFYPFLKDNREKIEKILTFRIPYYVGPLARGNSRFAWMTRKSEETITPWNFEEVVDKGASAQSFIERMTNFDKNLPNEKVLPKHSLLYEYFTVYNELTKVKYVTEGMRKPAFLSGEQKKAIVDLLFKTNRKVTVKQLKEDYFKKIECFDSVEISGVEDRFNASLGTYHDLLKIIKDKDFLDNEENEDILEDIVLTLTLFEDREMIEERLKTYAHLFDDKVMKQLKRRRYTGWGRLSRKLINGIRDKQSGKTILDFLKSDGFANRNFMQLIHDDSLTFKEDIQKAQVSGQGDSLHEHIANLAGSPAIKKGILQTVKVVDELVKVMGRHKPENIVIEMARENQTTQKGQKNSRERMKRIEEGIKELGSQILKEHPVENTQLQNEKLYLYYLQNGRDMYVDQELDINRLSDYDVDHIVPQSFLKDDSIDNKVLTRSDKARGKSDNVPSEEVVKKMKNYWRQLLNAKLITQRKFDNLTKAERGGLSELDKAGFIKRQLVETRQITKHVAQILDSRMNTKYDENDKLIREVKVITLKSKLVSDFRKDFQFYKVREINNYHHAHDAYLNAVVGTALIKKYPKLESEFVYGDYKVYDVRKMIAKSEQEIGKATAKYFFYSNIMNFFKTEITLANGEIRKRPLIETNGETGEIVWDKGRDFATVRKVLSMPQVNIVKKTEVQTGGFSKESILPKRNSDKLIARKKDWDPKKYGGFDSPTVAYSVLVVAKVEKGKSKKLKSVKELLGITIMERSSFEKNPIDFLEAKGYKEVKKDLIIKLPKYSLFELENGRKRMLASAGELQKGNELALPSKYVNFLYLASHYEKLKGSPEDNEQKQLFVEQHKHYLDEIIEQISEFSKRVILADANLDKVLSAYNKHRDKPIREQAENIIHLFTLTNLGAPAAFKYFDTTIDRKRYTSTKEVLDATLIHQSITGLYETRIDLSQLGGDGGGSSPAPEAAAKGGTAPLEEEYRLFLEAPIQNVTLLEQWKREIPKVWAEINPPGLASTQAPIHVQLLSTALPVRVRQYPITLEAKRSLRETIRKFRAAGILRPVHSPWNTPLLPVRKSGTSEYRMVQDLREVNKRVETIHPTVPNPYTLLSLLPPDRIWYSVLDLKDAFFCIPLAPESQLIFAFEWADAEEGESGQLTWTRLPQGFKNSPTLFNEALNRDLQGFRLDHPSVSLLQYVDDLLIAADTQAACLSATRDLLMTLAELGYRVSGKKAQLCQEEVTYLGFKIHKGSRSLSNSRTQAILQIPVPKTKRQVREFLGKIGYCRLFIPGFAELAQPLYAATRPGNDPLVWGEKEEEAFQSLKLALTQPPALALPSLDKPFQLFVEETSGAAKGVLTQALGPWKRPVAYLSKRLDPVAAGWPRCLRAIAAAALLTREASKLTFGQDIEITSSHNLESLLRSPPDKWLTNARITQYQVLLLDPPRVRFKQTAALNPATLLPETDDTLPIHHCLDTLDSLTSTRPDLTDQPLAQAEATLFTDGSSYIRDGKRYAGAAVVTLDSVIWAEPLPIGTSAQKAELIALTKALEWSKDKSVNIYTDSRYAFATLHVHGMIYRERGWLTAGGKAIKNAPEILALLTAVWLPKRVAVMHCKGHQKDDAPTSTGNRRADEVAREVAIRPLSTQATISAGKRTADGSEFEKRTADGSEFESPKKKAKVE

SEQ ID NO: 4540 - protein, 2131 aa, synthetic construct
MPAAKRVKLDGGDKKYSIGLDIGTNSVGWAVITDEYKVPSKKFKVLGNTDRHSIKKNLIGALLFDSGETAEATRLKRTARRRYTRRKNRICYLQEIFSNEMAKVDDSFFHRLEESFLVEEDKKHERHPIFGNIVDEVAYHEKYPTIYHLRKKLVDSTDKADLRLIYLALAHMIKFRGHFLIEGDLNPDNSDVDKLFIQLVQTYNQLFEENPINASGVDAKAILSARLSKSRRLENLIAQLPGEKKNGLFGNLIALSLGLTPNFKSNFDLAEDAKLQLSKDTYDDDLDNLLAQIGDQYADLFLAAKNLSDAILLSDILRVNTEITKAPLSASMIKRYDEHHQDLTLLKALVRQQLPEKYKEIFFDQSKNGYAGYIDGGASQEEFYKFIKPILEKMDGTEELLVKLNREDLLRKQRTFDNGSIPHQIHLGELHAILRRQEDFYPFLKDNREKIEKILTFRIPYYVGPLARGNSRFAWMTRKSEETITPWNFEEVVDKGASAQSFIERMTNFDKNLPNEKVLPKHSLLYEYFTVYNELTKVKYVTEGMRKPAFLSGEQKKAIVDLLFKTNRKVTVKQLKEDYFKKIECFDSVEISGVEDRFNASLGTYHDLLKIIKDKDFLDNEENEDILEDIVLTLTLFEDREMIEERLKTYAHLFDDKVMKQLKRRRYTGWGRLSRKLINGIRDKQSGKTILDFLKSDGFANRNFMQLIHDDSLTFKEDIQKAQVSGQGDSLHEHIANLAGSPAIKKGILQTVKVVDELVKVMGRHKPENIVIEMARENQTTQKGQKNSRERMKRIEEGIKELGSQILKEHPVENTQLQNEKLYLYYLQNGRDMYVDQELDINRLSDYDVDHIVPQSFLKDDSIDNKVLTRSDKARGKSDNVPSEEVVKKMKNYWRQLLNAKLITQRKFDNLTKAERGGLSELDKAGFIKRQLVETRQITKHVAQILDSRMNTKYDENDKLIREVKVITLKSKLVSDFRKDFQFYKVREINNYHHAHDAYLNAVVGTALIKKYPKLESEFVYGDYKVYDVRKMIAKSEQEIGKATAKYFFYSNIMNFFKTEITLANGEIRKRPLIETNGETGEIVWDKGRDFATVRKVLSMPQVNIVKKTEVQTGGFSKESILPKRNSDKLIARKKDWDPKKYGGFDSPTVAYSVLVVAKVEKGKSKKLKSVKELLGITIMERSSFEKNPIDFLEAKGYKEVKKDLIIKLPKYSLFELENGRKRMLASAGELQKGNELALPSKYVNFLYLASHYEKLKGSPEDNEQKQLFVEQHKHYLDEIIEQISEFSKRVILADANLDKVLSAYNKHRDKPIREQAENIIHLFTLTNLGAPAAFKYFDTTIDRKRYTSTKEVLDATLIHQSITGLYETRIDLSQLGGDGGAEAAAKEAAAKEAAAKEAAAKALEAEAAAKEAAAKEAAAKEAAAKAGGTLNIEDEYRLHETSKGPDVPLGSTWLSDFPQAWAETGGMGLAVRQAPLIIPLKATSTPVSIKQYPMSQEARLGIKPHIQRLLDQGILVPCQSPWNTPLLPVKKPGTNDYRPVQDLREVNKRVEDIHPTVPNPYNLLSGLPPSHQWYTVLDLKDAFFCLRLHPTSQSLFAFEWRDPEMGISGQLTWTRLPQGFKNSPTLFNEALHRDLADFRIQHPDLILLQYVDDLLLAATSELDCQQGTRALLQTLGDLGYRASAKKAQICQKQVKYLGYLLKEGQRWLTEARKETVMGQPTPKTPRQLREFLGTAGFCRLWIPGFAEMAAPLYPLTKPGTLFEWGPDQQKAYQEIKQALLTAPALGLPDLTKPFELFVDEKQGYAKGVLTQKLGPWRRPVAYLSKKLDPVAAGWPPCLRMVAAIAVLTKDAGKLTMGQPLVILAPHAVEALVKQPPDRWLSNARMTHYQALLLDTDRVQFGPIVALNPATLLPLPEEGLQHDCLDILAEAHGTRPDLTDQPLPDADHTWYTDGSSFLQEGQRKAGAAVTTETEVVWAKALPAGTSAQRAELIALTQALKMAEGKKLNVYTDSRYAFATAHIHGEIYRRRGWLTSEGKEIKNKDEILALLKALFLPKRLSIIHCPGHQKGNRAEARGNRMADQAAREVATRETPETSTLLAGKRTADGSEFEKRTADGSEFESPKKKAKVE

SEQ ID NO: 4541 - protein, 2122 aa, synthetic construct
MPAAKRVKLDGGDKKYSIGLDIGTNSVGWAVITDEYKVPSKKFKVLGNTDRHSIKKNLIGALLFDSGETAEATRLKRTARRRYTRRKNRICYLQEIFSNEMAKVDDSFFHRLEESFLVEEDKKHERHPIFGNIVDEVAYHEKYPTIYHLRKKLVDSTDKADLRLIYLALAHMIKFRGHFLIEGDLNPDNSDVDKLFIQLVQTYNQLFEENPINASGVDAKAILSARLSKSRRLENLIAQLPGEKKNGLFGNLIALSLGLTPNFKSNFDLAEDAKLQLSKDTYDDDLDNLLAQIGDQYADLFLAAKNLSDAILLSDILRVNTEITKAPLSASMIKRYDEHHQDLTLLKALVRQQLPEKYKEIFFDQSKNGYAGYIDGGASQEEFYKFIKPILEKMDGTEELLVKLNREDLLRKQRTFDNGSIPHQIHLGELHAILRRQEDFYPFLKDNREKIEKILTFRIPYYVGPLARGNSRFAWMTRKSEETITPWNFEEVVDKGASAQSFIERMTNFDKNLPNEKVLPKHSLLYEYFTVYNELTKVKYVTEGMRKPAFLSGEQKKAIVDLLFKTNRKVTVKQLKEDYFKKIECFDSVEISGVEDRFNASLGTYHDLLKIIKDKDFLDNEENEDILEDIVLTLTLFEDREMIEERLKTYAHLFDDKVMKQLKRRRYTGWGRLSRKLINGIRDKQSGKTILDFLKSDGFANRNFMQLIHDDSLTFKEDIQKAQVSGQGDSLHEHIANLAGSPAIKKGILQTVKVVDELVKVMGRHKPENIVIEMARENQTTQKGQKNSRERMKRIEEGIKELGSQILKEHPVENTQLQNEKLYLYYLQNGRDMYVDQELDINRLSDYDVDHIVPQSFLKDDSIDNKVLTRSDKARGKSDNVPSEEVVKKMKNYWRQLLNAKLITQRKFDNLTKAERGGLSELDKAGFIKRQLVETRQITKHVAQILDSRMNTKYDENDKLIREVKVITLKSKLVSDFRKDFQFYKVREINNYHHAHDAYLNAVVGTALIKKYPKLESEFVYGDYKVYDVRKMIAKSEQEIGKATAKYFFYSNIMNFFKTEITLANGEIRKRPLIETNGETGEIVWDKGRDFATVRKVLSMPQVNIVKKTEVQTGGFSKESILPKRNSDKLIARKKDWDPKKYGGFDSPTVAYSVLVVAKVEKGKSKKLKSVKELLGITIMERSSFEKNPIDFLEAKGYKEVKKDLIIKLPKYSLFELENGRKRMLASAGELQKGNELALPSKYVNFLYLASHYEKLKGSPEDNEQKQLFVEQHKHYLDEIIEQISEFSKRVILADANLDKVLSAYNKHRDKPIREQAENIIHLFTLTNLGAPAAFKYFDTTIDRKRYTSTKEVLDATLIHQSITGLYETRIDLSQLGGDGGAEAAAKEAAAKEAAAKEAAAKALEAEAAAKEAAAKEAAAKEAAAKAGGIPWLMKKPLQLTTLVPLQEYEERLLKQTMLTGSYKEKLQSLFLKYDALWQHWENQVGHRRIKPHHIATGTVNPRPQKQYPINPKAKASIQTVINDLLKQGVLIQQNSIMNTPVYPVPKPDGKWRMVLDYREVNKTIPLIAAQNQHSAGILSSIFRGKYKTTLDLSNGFWAHSITPESYWLTAFTWLGQQYCWTRLPQGFLNSPALFNADVVDLLKEVPNVQVYVDDIYISHDDPREHLEQLEKVFSLLLNAGYVVSLKKSEIAQHEVEFLGFNITKEGRGLTETFKQKLLNITPPRDLKQLQSILGKLNFARNFIPNFSELVKPLYNIIATAPGKYITWTTDNSQQLQNIISMLNSAENLEERNPEVRLIMKVNTSPSAGYIRFYNEFAKRPIMYLNYVYTKAEVKFTNTEKLLTTIHKGLIKALDLGMGQEILVYSPIVSMTKIQKTPLPERKALPIRWITWMSYLEDPRIQFHYDKTLPELQQVPTVTDDIIAKIKHPSEFSMVFYTDGSAIKHPNVNKSHNAGMGIAQVQFKPEFTVINTWSIPLGDHTAQLAEVAAVEFACKKALKIDGPVLIVTDSFYVAESVNKELPYWQSNGFFNNKKKPLKHVSKWKSIADCIQLKPDIIIIHEKGHQPTASTFHTEGNNLADKLATQGSYVVNAGKRTADGSEFEKRTADGSEFESPKKKAKVE

SEQ ID NO: 4542-4600 - skipped (59 entries)

SEQ ID NO: 4601 - DNA, 16 bp, synthetic construct
  source 1..16: mol_type = other DNA
gcgcgctcgctcgctc

SEQ ID NO: 4602-4643 - skipped (42 entries)

SEQ ID NO: 4644 - protein, 9 aa, synthetic construct
PAAKRVKLD

SEQ ID NO: 4645-4648 - skipped (4 entries)

SEQ ID NO: 4649 - protein, 29 aa, synthetic construct
KRTADGSEFEKRTADGSEFESPKKKAKVE

SEQ ID NO: 4650 - protein, 10 aa, synthetic construct
KRTADGSEFE

SEQ ID NO: 4651 - protein, 19 aa, synthetic construct
KRTADGSEFESPKKKAKVE

SEQ ID NO: 4652-5001 - skipped (350 entries)

SEQ ID NO: 5002 - protein, 672 aa, Murine leukemia virus
TLNIEDEYRLHETSKEPDVSLGSTWLSDFPQAWAETGGMGLAVRQAPLIIPLKATSTPVSIKQYPMSQEARLGIKPHIQRLLDQGILVPCQSPWNTPLLPVKKPGTNDYRPVQDLREVNKRVEDIHPTVPNPYNLLSGLPPSHQWYTVLDLKDAFFCLRLHPTSQPLFAFEWRDPEMGISGQLTWTRLPQGFKNSPTLFDEALHRDLADFRIQHPDLILLQYVDDLLLAATSELDCQQGTRALLQTLGNLGYRASAKKAQICQKQVKYLGYLLKEGQRWLTEARKETVMGQPTPKTPRQLREFLGTAGFCRLWIPGFAEMAAPLYPLTKTGTLFNWGPDQQKAYQEIKQALLTAPALGLPDLTKPFELFVDEKQGYAKGVLTQKLGPWRRPVAYLSKKLDPVAAGWPPCLRMVAAIAVLTKDAGKLTMGQPLVILAPHAVEALVKQPPDRWLSNARMTHYQALLLDTDRVQFGPVVALNPATLLPLPEEGLQHNCLDILAEAHGTRPDLTDQPLPDADHTWYTDGSSLLQEGQRKAGAAVTTETEVIWAKALPAGTSAQRAELIALTQALKMAEGKKLNVYTDSRYAFATAHIHGEIYRRRGLLTSEGKEIKNKDEILALLKALFLPKRLSIIHCPGHQKGHSAEARGNRMADQAARKAAITETPDTSTLLI

SEQ ID NO: 5003 - protein, 671 aa, Murine leukemia virus
TLNIEDEHRLHETSKEPDVSLGSTWLSDFPQAWAETGGMGLAVRQAPLIIPLKATSTPVSIKQYPMSQEARLGIKPHIQRLLDQGILVPCQSPWNTPLLPVKKPGTNDYRPVQDLREVNKRVEDIHPTVPNPYNLLSGLPPSHQWYTVLDLKDAFFCLRLHPTSQPLFAFEWRDPEMGISGQLTWTRLPQGFKNSPTLFDEALHRDLADFRIQHPDLILLQYVDDLLLAATSELDCQQGTRALLQTLGNLGYRASAKKAQICQKQVKYLGYLLKEGQRWLTEARKETVMGQPTPKTPRQLREFLGTAGFCRLWIPGFAEMAAPLYPLTKTGTLFNWGPDQQKAYQEIKQALLTAPALGLPDLTKPFELFVDEKQGYAKGVLTQKLGPWRRPVAYLSKKLDPVAAGWPPCLRMVAAIAVLTKDAGKLTMGQPLVILAPHAVEALVKQPPDRWLSNARMTHYQALLLDTDRVQFGPVVALNPATLLPLPEEGLQHNCLDILAEAHGTRPDLTDQPLPDADHTWYTDGSSLLQEGQRKAGAAVTTETEVIWAKALPAGTSAQRAELIALTQALKMAEGKKLNVYTDSRYAFATAHIHGEIYRRRGLLTSEGKEIKNKDEILALLKALFLPKRLSIIHCPGHQKGHSAEARGNRMADQAARKAAITETPDTSTLL

SEQ ID NO: 5004 - protein, 660 aa, Murine leukemia virus
TLNIEDEHRLHETSKEPDVSLGSTWLSDFPQAWAETGGMGLAVRQAPLIIPLKATSTPVSIKQYPMSQEARLGIKPHIQRLLDQGILVPCQSPWNTPLLPVKKPGTNDYRPVQDLREVNKRVEDIHPTVPNPYNLLSGLPPSHQWYTVLDLKDAFFCLRLHPTSQPLFAFEWRDPEMGISGQLTWTRLPQGFKNSPTLFDEALHRDLADFRIQHPDLILLQYVDDLLLAATSELDCQQGTRALLQTLGNLGYRASAKKAQICQKQVKYLGYLLKEGQRWLTEARKETVMGQPTPKTPRQLREFLGTAGFCRLWIPGFAEMAAPLYPLTKTGTLFNWGPDQQKAYQEIKQALLTAPALGLPDLTKPFELFVDEKQGYAKGVLTQKLGPWRRPVAYLSKKLDPVAAGWPPCLRMVAAIAVLTKDAGKLTMGQPLVILAPHAVEALVKQPPDRWLSNARMTHYQALLLDTDRVQFGPVVALNPATLLPLPEEGLQHNCLDILAEAHGTRPDLTDQPLPDADHTWYTDGSSLLQEGQRKAGAAVTTETEVIWAKALPAGTSAQRAELIALTQALKMAEGKKLNVYTDSRYAFATAHIHGEIYRRRGLLTSEGKEIKNKDEILALLKALFLPKRLSIIHCPGHQKGHSAEARGNRMADQAARKAA

SEQ ID NO: 5005 - protein, 672 aa, synthetic construct
TLNIEDEYRLHETSKEPDVSLGSTWLSDFPQAWAETGGMGLAVRQAPLIIPLKATSTPVSIKQYPMSQEARLGIKPHIQRLLDQGILVPCQSPWNTPLLPVKKPGTNDYRPVQDLREVNKRVEDIHPTVPNPYNLLSGLPPSHQWYTVLDLKDAFFCLRLHPTSQPLFAFEWRDPEMGISGQLTWTRLPQGFKNSPTLFNEALHRDLADFRIQHPDLILLQYVDDLLLAATSELDCQQGTRALLQTLGNLGYRASAKKAQICQKQVKYLGYLLKEGQRWLTEARKETVMGQPTPKTPRQLREFLGKAGFCRLFIPGFAEMAAPLYPLTKPGTLFNWGPDQQKAYQEIKQALLTAPALGLPDLTKPFELFVDEKQGYAKGVLTQKLGPWRRPVAYLSKKLDPVAAGWPPCLRMVAAIAVLTKDAGKLTMGQPLVILAPHAVEALVKQPPDRWLSNARMTHYQALLLDTDRVQFGPVVALNPATLLPLPEEGLQHNCLDILAEAHGTRPDLTDQPLPDADHTWYTDGSSLLQEGQRKAGAAVTTETEVIWAKALPAGTSAQRAELIALTQALKMAEGKKLNVYTDSRYAFATAHIHGEIYRRRGWLTSEGKEIKNKDEILALLKALFLPKRLSIIHCPGHQKGHSAEARGNRMADQAARKAAITETPDTSTLLI

SEQ ID NO: 5006 - protein, 33 aa, synthetic construct
SGGSSGGSSGSETPGTSESATPESSGGSSGGSS

SEQ ID NO: 5007 - protein, 1369 aa, unidentified
SMDKKYSIGLAIGTNSVGWAVITDDYKVPSKKFKVLGNTDRHSIKKNLIGALLFDSGETAEATRLKRTARRRYTRRKNRICYLQEIFSNEMAKVDDSFFHRLEESFLVEEDKKHERHPIFGNIVDEVAYHEKYPTIYHLRKKLVDSTDKADLRLIYLALAHMIKFRGHFLIEGDLNPDNSDVDKLFIQLVQTYNQLFEENPINASGVDAKAILSARLSKSRRLENLIAQLPGEKKNGLFGNLIALSLGLTPNFKSNFDLAEDAKLQLSKDTYDDDLDNLLAQIGDQYADLFLAAKNLSDAILLSDILRVNTEITKAPLSASMIKRYDEHHQDLTLLKALVRQQLPEKYKEIFFDQSKNGYAGYIDGGASQEEFYKFIKPILEKMDGTEELLVKLNREDLLRKQRTFDNGSIPHQIHLGELHAILRRQEDFYPFLKDNREKIEKILTFRIPYYVGPLARGNSRFAWMTRKSEETITPWNFEEVVDKGASAQSFIERMTNFDKNLPNEKVLPKHSLLYEYFTVYNELTKVKYVTEGMRKPAFLSGEQKKAIVDLLFKTNRKVTVKQLKEDYFKKIECFDSVEISGVEDRFNASLGTYHDLLKIIKDKDFLDNEENEDILEDIVLTLTLFEDREMIEERLKTYAHLFDDKVMKQLKRRRYTGWGRLSRKLINGIRDKQSGKTILDFLKSDGFANRNFMQLIHDDSLTFKEDIQKAQVSGQGDSLHEHIANLAGSPAIKKGILQTVKVVDELVKVMGRHKPENIVIEMARENQTTQKGQKNSRERMKRIEEGIKELGSQILKEHPVENTQLQNEKLYLYYLQNGRDMYVDQELDINRLSDYDVDAIVPQSFLKDDSIDNKVLTRSDKNRGKSDNVPSEEVVKKMKNYWRQLLNAKLITQRKFDNLTKAERGGLSELDKAGFIKRQLVETRQITKHVAQILDSRMNTKYDENDKLIREVKVITLKSKLVSDFRKDFQFYKVREINNYHHAHDAYLNAVVGTALIKKYPKLESEFVYGDYKVYDVRKMIAKSEQEIGKATAKYFFYSNIMNFFKTEITLANGEIRKRPLIETNGETGEIVWDKGRDFATVRKVLSMPQVNIVKKTEVQTGGFSKESILPKRNSDKLIARKKDWDPKKYGGFDSPTVAYSVLVVAKVEKGKSKKLKSVKELLGITIMERSSFEKNPIDFLEAKGYKEVKKDLIIKLPKYSLFELENGRKRMLASAGELQKGNELALPSKYVNFLYLASHYEKLKGSPEDNEQKQLFVEQHKHYLDEIIEQISEFSKRVILADANLDKVLSAYNKHRDKPIREQAENIIHLFTLTNLGAPAAFKYFDTTIDRKRYTSTKEVLDATLIHQSITGLYETRIDLSQLGGD

SEQ ID NO: 5008 - DNA, 76 bp, synthetic construct
  source 1..76: mol_type = other DNA
gttttagagctagaaatagcaagttaaaataaggctagtccgttatcaacttgaaaaagtgggaccgagtcggtcc

SEQ ID NO: 5009 - protein, 30 aa, synthetic construct
MDSLLMNRRKFLYQFKNVRWAKGRRETYLC

SEQ ID NO: 5010 - protein, 28 aa, synthetic construct
PKKRKVEGADKRTADGSEFESPKKKRKV

SEQ ID NO: 5011 - protein, 22 aa, synthetic construct
RKSGKIAAIWKRPRKPKKKRKV

SEQ ID NO: 5012 - protein, 18 aa, synthetic construct
KRTADGSEFESPKKKRKV

SEQ ID NO: 5013 - protein, 17 aa, synthetic construct
KKTELQTTNAENKTKKL

SEQ ID NO: 5014 - protein, 19 aa, synthetic construct
KRGINDRNFWRGENGRKTR

SEQ ID NO: 5015 - protein, 16 aa, synthetic construct
KRPAATKKAGQAKKKK

SEQ ID NO: 5016 - protein, 29 aa, synthetic construct
PKKKRKVEGADKRTADGSEFESPKKKRKV

SEQ ID NO: 5017 - protein, 25 aa, synthetic construct
KRASSQALGTIPKRRSSSRFIKRKK

SEQ ID NO: 5018 - protein, 7 aa, synthetic construct
RKKRKKK

SEQ ID NO: 5019-5024 - skipped (6 entries)

SEQ ID NO: 5025 - protein, 4 aa, synthetic construct
SGGS

SEQ ID NO: 5026 - protein, 4 aa, synthetic construct
GGGS

SEQ ID NO: 5027 - protein, 5 aa, synthetic construct
GGGGS

SEQ ID NO: 5028 - protein, 5 aa, synthetic construct
EAAAK

SEQ ID NO: 5029 - DNA, 306 bp, synthetic construct
  source 1..306: mol_type = other DNA
tgcctgtcatacgaaaccgagatactgacagtagaatatggccttctgccaatcgggaagattgtggagaaacggatagaatgcacagtttactctgtcgataacaatggtaacatttatactcagccagttgcccagtggcacgaccggggagagcaggaagtattcgaatactgtctggaggatggaagtctcattagggccactaaggaccacaaatttatgacagtcgatggccagatgctgcctatagacgaaatctttgagcgagagttggacctcatgcgagttgacaaccttcctaat

SEQ ID NO: 5030 - protein, 102 aa, synthetic construct
CLSYETEILTVEYGLLPIGKIVEKRIECTVYSVDNNGNIYTQPVAQWHDRGEQEVFEYCLEDGSLIRATKDHKFMTVDGQMLPIDEIFERELDLMRVDNLPN

SEQ ID NO: 5031 - DNA, 108 bp, synthetic construct
  source 1..108: mol_type = other DNA
atgatcaagatagctacaaggaagtatcttggcaaacaaaacgtttatgatattggagtcgaaagagatcacaactttgctctgaagaacggattcatagcttctaat

SEQ ID NO: 5032 - protein, 36 aa, synthetic construct
MIKIATRKYLGKQNVYDIGVERDHNFALKNGFIASN

SEQ ID NO: 5033 - DNA, 303 bp, synthetic construct
  source 1..303: mol_type = other DNA
tgcctgtcttatgataccgagatacttaccgttgaatatggcttcttgcctattggaaagattgtcgaagagagaattgaatgcacagtatatactgtagacaagaatggtttcgtttacacacagcccattgctcaatggcacaatcgcggcgaacaagaagtatttgagtactgtctcgaggatggaagcatcatacgagcaactaaagatcataaattcatgaccactgacgggcagatgttgccaatagatgagatattcgagcggggcttggatctcaaacaagtggatggattgcca

SEQ ID NO: 5034 - protein, 101 aa, synthetic construct
CLSYDTEILTVEYGFLPIGKIVEERIECTVYTVDKNGFVYTQPIAQWHNRGEQEVFEYCLEDGSIIRATKDHKFMTTDGQMLPIDEIFERGLDLKQVDGLP

SEQ ID NO: 5035 - DNA, 159 bp, synthetic construct
  source 1..159: mol_type = other DNA
atgaagaggactgccgatggatcagagtttgaatctcccaagaagaagaggaaagtaaagataatatctcgaaaaagtcttggtacccaaaatgtctatgatattggagtggagaaagatcacaacttccttctcaagaacggtctcgtagccagcaac

SEQ ID NO: 5036 - protein, 53 aa, synthetic construct
MKRTADGSEFESPKKKRKVKIISRKSLGTQNVYDIGVEKDHNFLLKNGLVASN

SEQ ID NO: 5037-5101 - skipped (65 entries)

SEQ ID NO: 5102 - protein, 6 aa, synthetic construct
GGSGGS

SEQ ID NO: 5103 - protein, 9 aa, synthetic construct
GGSGGSGGS

SEQ ID NO: 5104 - protein, 12 aa, synthetic construct
GGSGGSGGSGGS

SEQ ID NO: 5105 - protein, 15 aa, synthetic construct
GGSGGSGGSGGSGGS

SEQ ID NO: 5106 - protein, 18 aa, synthetic construct
GGSGGSGGSGGSGGSGGS

SEQ ID NO: 5107 - protein, 5 aa, synthetic construct
GGGGS

SEQ ID NO: 5108 - protein, 10 aa, synthetic construct
GGGGSGGGGS

SEQ ID NO: 5109 - protein, 15 aa, synthetic construct
GGGGSGGGGSGGGGS

SEQ ID NO: 5110 - protein, 20 aa, synthetic construct
GGGGSGGGGSGGGGSGGGGS

SEQ ID NO: 5111 - protein, 25 aa, synthetic construct
GGGGSGGGGSGGGGSGGGGSGGGGS

SEQ ID NO: 5112 - protein, 30 aa, synthetic construct
GGGGSGGGGSGGGGSGGGGSGGGGSGGGGS

SEQ ID NO: 5113 - skipped

SEQ ID NO: 5114 - protein, 4 aa, synthetic construct
GGGG

SEQ ID NO: 5115 - protein, 5 aa, synthetic construct
GGGGG

SEQ ID NO: 5116 - protein, 6 aa, synthetic construct
GGGGGG

SEQ ID NO: 5117 - protein, 7 aa, synthetic construct
GGGGGGG

SEQ ID NO: 5118 - protein, 8 aa, synthetic construct
GGGGGGGG

SEQ ID NO: 5119 - skipped

SEQ ID NO: 5120 - protein, 6 aa, synthetic construct
GSSGSS

SEQ ID NO: 5121 - protein, 9 aa, synthetic construct
GSSGSSGSS

SEQ ID NO: 5122 - protein, 12 aa, synthetic construct
GSSGSSGSSGSS

SEQ ID NO: 5123 - protein, 15 aa, synthetic construct
GSSGSSGSSGSSGSS

SEQ ID NO: 5124 - protein, 18 aa, synthetic construct
GSSGSSGSSGSSGSSGSS

SEQ ID NO: 5125 - protein, 5 aa, synthetic construct
EAAAK

SEQ ID NO: 5126 - protein, 10 aa, synthetic construct
EAAAKEAAAK

SEQ ID NO: 5127 - protein, 15 aa, synthetic construct
EAAAKEAAAKEAAAK

SEQ ID NO: 5128 - protein, 20 aa, synthetic construct
EAAAKEAAAKEAAAKEAAAK

SEQ ID NO: 5129 - protein, 25 aa, synthetic construct
EAAAKEAAAKEAAAKEAAAKEAAAK

SEQ ID NO: 5130 - protein, 30 aa, synthetic construct
EAAAKEAAAKEAAAKEAAAKEAAAKEAAAK

SEQ ID NO: 5131 - skipped

SEQ ID NO: 5132 - protein, 5 aa, synthetic construct
PAPAP

SEQ ID NO: 5133 - protein, 7 aa, synthetic construct
PAPAPAP

SEQ ID NO: 5134 - protein, 9 aa, synthetic construct
PAPAPAPAP

SEQ ID NO: 5135 - protein, 11 aa, synthetic construct
PAPAPAPAPAP

SEQ ID NO: 5136 - protein, 13 aa, synthetic construct
PAPAPAPAPAPAP

SEQ ID NO: 5137 - protein, 6 aa, synthetic construct
GGSGGG

SEQ ID NO: 5138 - protein, 6 aa, synthetic construct
GGGGGS

SEQ ID NO: 5139 - protein, 6 aa, synthetic construct
GGSGSS

SEQ ID NO: 5140 - protein, 6 aa, synthetic construct
GSSGGS

SEQ ID NO: 5141 - protein, 8 aa, synthetic construct
GGSEAAAK

SEQ ID NO: 5142 - protein, 8 aa, synthetic construct
EAAAKGGS

SEQ ID NO: 5143 - protein, 6 aa, synthetic construct
GGSPAP

SEQ ID NO: 5144 - protein, 6 aa, synthetic construct
PAPGGS

SEQ ID NO: 5145 - protein, 6 aa, synthetic construct
GGGGSS

SEQ ID NO: 5146 - protein, 6 aa, synthetic construct
GSSGGG

SEQ ID NO: 5147 - protein, 8 aa, synthetic construct
GGGEAAAK

SEQ ID NO: 5148 - protein, 8 aa, synthetic construct
EAAAKGGG

SEQ ID NO: 5149 - protein, 6 aa, synthetic construct
GGGPAP

SEQ ID NO: 5150 - protein, 6 aa, synthetic construct
PAPGGG

SEQ ID NO: 5151 - protein, 8 aa, synthetic construct
GSSEAAAK

SEQ ID NO: 5152 - protein, 8 aa, synthetic construct
EAAAKGSS

SEQ ID NO: 5153 - protein, 6 aa, synthetic construct
GSSPAP

SEQ ID NO: 5154 - protein, 6 aa, synthetic construct
PAPGSS

SEQ ID NO: 5155 - protein, 8 aa, synthetic construct
EAAAKPAP

SEQ ID NO: 5156 - protein, 8 aa, synthetic construct
PAPEAAAK

SEQ ID NO: 5157 - protein, 9 aa, synthetic construct
GGSGGGGSS

SEQ ID NO: 5158 - protein, 9 aa, synthetic construct
GGSGSSGGG

SEQ ID NO: 5159 - protein, 9 aa, synthetic construct
GGGGGSGSS

SEQ ID NO: 5160 - protein, 9 aa, synthetic construct
GGGGSSGGS

SEQ ID NO: 5161 - protein, 9 aa, synthetic construct
GSSGGSGGG

SEQ ID NO: 5162 - protein, 9 aa, synthetic construct
GSSGGGGGS

SEQ ID NO: 5163 - protein, 11 aa, synthetic construct
GGSGGGEAAAK

SEQ ID NO: 5164 - protein, 11 aa, synthetic construct
GGSEAAAKGGG

SEQ ID NO: 5165 - protein, 11 aa, synthetic construct
GGGGGSEAAAK

SEQ ID NO: 5166 - protein, 11 aa, synthetic construct
GGGEAAAKGGS

SEQ ID NO: 5167 - protein, 11 aa, synthetic construct
EAAAKGGSGGG

SEQ ID NO: 5168 - protein, 11 aa, synthetic construct
EAAAKGGGGGS

SEQ ID NO: 5169 - protein, 9 aa, synthetic construct
GGSGGGPAP

SEQ ID NO: 5170 - protein, 9 aa, synthetic construct
GGSPAPGGG

SEQ ID NO: 5171 - protein, 9 aa, synthetic construct
GGGGGSPAP

SEQ ID NO: 5172 - protein, 9 aa, synthetic construct
GGGPAPGGS

SEQ ID NO: 5173 - protein, 9 aa, synthetic construct
PAPGGSGGG

SEQ ID NO: 5174 - protein, 9 aa, synthetic construct
PAPGGGGGS

SEQ ID NO: 5175 - protein, 11 aa, synthetic construct
GGSGSSEAAAK

SEQ ID NO: 5176 - protein, 11 aa, synthetic construct
GGSEAAAKGSS

SEQ ID NO: 5177 - protein, 11 aa, synthetic construct
GSSGGSEAAAK

SEQ ID NO: 5178 - protein, 11 aa, synthetic construct
GSSEAAAKGGS

SEQ ID NO: 5179 - protein, 11 aa, synthetic construct
EAAAKGGSGSS

SEQ ID NO: 5180 - protein, 11 aa, synthetic construct
EAAAKGSSGGS

SEQ ID NO: 5181 - protein, 9 aa, synthetic construct
GGSGSSPAP

SEQ ID NO: 5182 - protein, 9 aa, synthetic construct
GGSPAPGSS

SEQ ID NO: 5183 - protein, 9 aa, synthetic construct
GSSGGSPAP

SEQ ID NO: 5184 - protein, 9 aa, synthetic construct
GSSPAPGGS

SEQ ID NO: 5185 - protein, 9 aa, synthetic construct
PAPGGSGSS

SEQ ID NO: 5186 - protein, 9 aa, synthetic construct
PAPGSSGGS

SEQ ID NO: 5187 - protein, 11 aa, synthetic construct
GGSEAAAKPAP

SEQ ID NO: 5188 - protein, 11 aa, synthetic construct
GGSPAPEAAAK

SEQ ID NO: 5189 - protein, 11 aa, synthetic construct
EAAAKGGSPAP

SEQ ID NO: 5190 - protein, 11 aa, synthetic construct
EAAAKPAPGGS

SEQ ID NO: 5191 - protein, 11 aa, synthetic construct
PAPGGSEAAAK

SEQ ID NO: 5192 - protein, 11 aa, synthetic construct
PAPEAAAKGGS

SEQ ID NO: 5193 - protein, 11 aa, synthetic construct
GGGGSSEAAAK

SEQ ID NO: 5194 - protein, 11 aa, synthetic construct
GGGEAAAKGSS

SEQ ID NO: 5195 - protein, 11 aa, synthetic construct
GSSGGGEAAAK

SEQ ID NO: 5196 - protein, 11 aa, synthetic construct
GSSEAAAKGGG

SEQ ID NO: 5197 - protein, 11 aa, synthetic construct
EAAAKGGGGSS

SEQ ID NO: 5198 - protein, 11 aa, synthetic construct
EAAAKGSSGGG

SEQ ID NO: 5199 - protein, 9 aa, synthetic construct
GGGGSSPAP

SEQ ID NO: 5200 - protein, 9 aa, synthetic construct
GGGPAPGSS

SEQ ID NO: 5201 - protein, 9 aa, synthetic construct
GSSGGGPAP

SEQ ID NO: 5202 - protein, 9 aa, synthetic construct
GSSPAPGGG

SEQ ID NO: 5203 - protein, 9 aa, synthetic construct
PAPGGGGSS

SEQ ID NO: 5204 - protein, 9 aa, synthetic construct
PAPGSSGGG

SEQ ID NO: 5205 - protein, 11 aa, synthetic construct
GGGEAAAKPAP

SEQ ID NO: 5206 - protein, 11 aa, synthetic construct
GGGPAPEAAAK

SEQ ID NO: 5207 - protein, 11 aa, synthetic construct
EAAAKGGGPAP

SEQ ID NO: 5208 - protein, 11 aa, synthetic construct
EAAAKPAPGGG

SEQ ID NO: 5209 - protein, 11 aa, synthetic construct
PAPGGGEAAAK

SEQ ID NO: 5210 - protein, 11 aa, synthetic construct
PAPEAAAKGGG

SEQ ID NO: 5211 - protein, 11 aa, synthetic construct
GSSEAAAKPAP

SEQ ID NO: 5212 - protein, 11 aa, synthetic construct
GSSPAPEAAAK

SEQ ID NO: 5213 - protein, 11 aa, synthetic construct
EAAAKGSSPAP

SEQ ID NO: 5214 - protein, 11 aa, synthetic construct
EAAAKPAPGSS

SEQ ID NO: 5215 - protein, 11 aa, synthetic construct
PAPGSSEAAAK

SEQ ID NO: 5216 - protein, 11 aa, synthetic construct
PAPEAAAKGSS

SEQ ID NO: 5217 - protein, 46 aa, synthetic construct
AEAAAKEAAAKEAAAKEAAAKALEAEAAAKEAAAKEAAAKEAAAKA

SEQ ID NO: 5218 - protein, 15 aa, synthetic construct
GGGGSEAAAKGGGGS

SEQ ID NO: 5219 - protein, 15 aa, synthetic construct
EAAAKGGGGSEAAAK

SEQ ID NO: 5220 - protein, 16 aa, synthetic construct
SGSETPGTSESATPES

SEQ ID NO: 5221 - protein, 12 aa, synthetic construct
GSAGSAAGSGEF

SEQ ID NO: 5222 - protein, 33 aa, synthetic construct; identical to SEQ ID NO: 5006

SEQ ID NO: 5223 - protein, 30 aa, synthetic construct
AHFKISGEKRPSTDPGKKAKNPKKKKKKDP

SEQ ID NO: 5224 - protein, 12 aa, synthetic construct
AHRAKKMSKTHA

SEQ ID NO: 5225 - protein, 14 aa, synthetic construct
ASPEYVNLPINGNG

SEQ ID NO: 5226 - protein, 7 aa, synthetic construct
CTKRPRW

SEQ ID NO: 5227 - protein, 16 aa, synthetic construct
DKAKRVSRNKSEKKRR

SEQ ID NO: 5228 - protein, 15 aa, synthetic construct
EELRLKEELLKGIYA

SEQ ID NO: 5229 - protein, 16 aa, synthetic construct
EEQLRRRKNSRLNNTG

SEQ ID NO: 5230 - protein, 24 aa, synthetic construct
EVLKVIRTGKRKKKAWKRMVTKVC

SEQ ID NO: 5231 - protein, 15 aa, synthetic construct
HHHHHHHHHHHHQPH

SEQ ID NO: 5232 - protein, 17 aa, synthetic construct
HKKKHPDASVNFSEFSK

SEQ ID NO: 5233 - protein, 6 aa, synthetic construct
HKRTKK

SEQ ID NO: 5234 - protein, 29 aa, synthetic construct
IINGRKLKLKKSRRRSSQTSNNSFTSRRS

SEQ ID NO: 5235 - protein, 8 aa, synthetic construct
KAEQERRK

SEQ ID NO: 5236 - protein, 18 aa, synthetic construct
KEKRKRREELFIEQKKRK

SEQ ID NO: 5237 - protein, 14 aa, synthetic construct
KKGKDEWFSRGKKP

SEQ ID NO: 5238 - protein, 12 aa, synthetic construct
KKGPSVQKRKKT

SEQ ID NO: 5239 - protein, 16 aa, synthetic construct
KKKTVINDLLHYKKEK

SEQ ID NO: 5240 - protein, 17 aa, synthetic construct
KKNGGKGKNKPSAKIKK

SEQ ID NO: 5241 - protein, 13 aa, synthetic construct
KKPKWDDFKKKKK

SEQ ID NO: 5242 - protein, 6 aa, synthetic construct
KKRKKD

SEQ ID NO: 5243 - protein, 9 aa, synthetic construct
KKRRKRRRK

SEQ ID NO: 5244 - protein, 9 aa, synthetic construct
KKRRRRARK

SEQ ID NO: 5245 - protein, 7 aa, synthetic construct
KKSKRGR

SEQ ID NO: 5246 - protein, 8 aa, synthetic construct
KKSRKRGS

SEQ ID NO: 5247 - protein, 17 aa, synthetic construct
KKSTALSRELGKIMRRR

SEQ ID NO: 5248 - protein, 17 aa, synthetic construct
KKSYQDPEIIAHSRPRK

SEQ ID NO: 5249 - protein, 17 aa, synthetic construct
KKTGKNRKLKSKRVKTR

SEQ ID NO: 5250 - protein, 17 aa, synthetic construct
KKVSIAGQSGKLWRWKR

SEQ ID NO: 5251 - protein, 20 aa, synthetic construct
KKYENVVIKRSPRKRGRPRK

SEQ ID NO: 5252 - protein, 6 aa, synthetic construct
KNKKRK

SEQ ID NO: 5253 - protein, 6 aa, synthetic construct
KPKKKR

SEQ ID NO: 5254 - protein, 19 aa, synthetic construct
KRAMKDDSHGNSTSPKRRK

SEQ ID NO: 5255 - protein, 17 aa, synthetic construct
KRANSNLVAAYEKAKKK

SEQ ID NO: 5256 - protein, 22 aa, synthetic construct
KRASEDTTSGSPPKKSSAGPKR

SEQ ID NO: 5257 - protein, 16 aa, synthetic construct
KRFKRRWMVRKMKTKK

SEQ ID NO: 5258 - protein, 16 aa, synthetic construct
KRGLNSSFETSPKKVK

SEQ ID NO: 5259 - protein, 20 aa, synthetic construct
KRGNSSIGPNDLSKRKQRKK

SEQ ID NO: 5260 - protein, 23 aa, synthetic construct
KRIHSVSLSQSQIDPSKKVKRAK

SEQ ID NO: 5261 - protein, 15 aa, synthetic construct
KRKGKLKNKGSKRKK

SEQ ID NO: 5262 - protein, 13 aa, synthetic construct
KRRRRRRREKRKR

SEQ ID NO: 5263 - protein, 18 aa, synthetic construct
KRSNDRTYSPEEEKQRRA

SEQ ID NO: 5264 - protein, 21 aa, synthetic construct
KRTVATNGDASGAHRAKKMSK

SEQ ID NO: 5265 - protein, 20 aa, synthetic construct
KRVYNKGEDEQEHLPKGKKR

SEQ ID NO: 5266 - protein, 18 aa, synthetic construct
KSGKAPRRRAVSMDNSNK

SEQ ID NO: 5267 - protein, 19 aa, synthetic construct
KVNFLDMSLDDIIIYKELE

SEQ ID NO: 5268 - protein, 15 aa, synthetic construct
KVQHRIAKKTTRRRR

SEQ ID NO: 5269 - protein, 8 aa, synthetic construct
LSPSLSPL

SEQ ID NO: 5270 - protein, 30 aa, synthetic construct; identical to SEQ ID NO: 5009

SEQ ID NO: 5271 - protein, 52 aa, synthetic construct
MPQNEYIELHRKRYGYRLDYHEKKRKKESREAHERSKKAKKMIGLKAKLYHK

SEQ ID NO: 5272 - protein, 10 aa, synthetic construct
MVQLRPRASR

SEQ ID NO: 5273 - protein, 24 aa, synthetic construct
NNKLLAKRRKGGASPKDDPMDDIK

SEQ ID NO: 5274 - protein, 20 aa, synthetic construct
NYKRPMDGTYGPPAKRHEGE

SEQ ID NO: 5275 - protein, 19 aa, synthetic construct
PDTKRAKLDSSETTMVKKK

SEQ ID NO: 5276 - protein, 7 aa, synthetic construct
PEKRTKI

SEQ ID NO: 5277 - protein, 8 aa, synthetic construct
PGGRGKKK

SEQ ID NO: 5278 - protein, 18 aa, synthetic construct
PGKMDKGEHRQERRDRPY

SEQ ID NO: 5279 - protein, 11 aa, synthetic construct
PKKGDKYDKTD

SEQ ID NO: 5280 - protein, 7 aa, synthetic construct
PKKKSRK

SEQ ID NO: 5281 - protein, 7 aa, synthetic construct
PKKNKPE

SEQ ID NO: 5282 - protein, 7 aa, synthetic construct
PKKRAKV

SEQ ID NO: 5283 - protein, 9 aa, synthetic construct
PKPKKLKVE

SEQ ID NO: 5284 - protein, 7 aa, synthetic construct
PKRGRGR

SEQ ID NO: 5285 - protein, 9 aa, synthetic construct
PKRRLVDDA

SEQ ID NO: 5286 - protein, 7 aa, synthetic construct
PKRRRTY

SEQ ID NO: 5287 - protein, 6 aa, synthetic construct
PLFKRR

SEQ ID NO: 5288 - protein, 7 aa, synthetic construct
PLRKAKR

SEQ ID NO: 5289 - protein, 9 aa, synthetic construct
PPAKRKCIF

SEQ ID NO: 5290 - protein, 8 aa, synthetic construct
PPARRRRL

SEQ ID NO: 5291 - protein, 8 aa, synthetic construct
PPKKKRKV

SEQ ID NO: 5292 - protein, 10 aa, synthetic construct
PPNKRMKVKH

SEQ ID NO: 5293 - protein, 13 aa, synthetic construct
PPRIYPQLPSAPT

SEQ ID NO: 5294 - protein, 13 aa, synthetic construct
PQRSPFPKSSVKR

SEQ ID NO: 5295 - protein, 8 aa, synthetic construct
PRPRKVPR

SEQ ID NO: 5296 - protein, 9 aa, synthetic construct
PRRRVQRKR

SEQ ID NO: 5297 - protein, 7 aa, synthetic construct
PRRVRLK

SEQ ID NO: 5298 - protein, 7 aa, synthetic construct
PSRKRPR

SEQ ID NO: 5299 - protein, 8 aa, synthetic construct
PSSKKRKV

SEQ ID NO: 5300 - protein, 7 aa, synthetic construct
PTKKRVK

SEQ ID NO: 5301 - protein, 9 aa, synthetic construct
QRPGPYDRP

SEQ ID NO: 5302 - protein, 18 aa, synthetic construct
RGKGGKGLGKGGAKRHRK

SEQ ID NO: 5303 - protein, 24 aa, synthetic construct
RKAGKGGGGHKTTKKRSAKDEKVP

SEQ ID NO: 5304 - protein, 9 aa, synthetic construct
RKIKLKRAK

SEQ ID NO: 5305 - protein, 9 aa, synthetic construct
RKIKRKRAK

SEQ ID NO: 5306 - protein, 17 aa, synthetic construct
RKKEAPGPREELRSRGR

SEQ ID NO: 5307 - protein, 7 aa, synthetic construct
RKKRKGK

SEQ ID NO: 5308 - protein, 9 aa, synthetic construct
RKKRRQRRR

SEQ ID NO: 5309 - protein, 25 aa, synthetic construct
RKKSIPLSIKNLKRKHKRKKNKITR

SEQ ID NO: 5310 - protein, 20 aa, synthetic construct
RKLVKPKNTKMKTKLRTNPY

SEQ ID NO: 5311 - protein, 16 aa, synthetic construct
RKRLILSDKGQLDWKK

SEQ ID NO: 5312 - protein, 7 aa, synthetic construct
RKRLKSK

SEQ ID NO: 5313 - protein, 9 aa, synthetic construct
RKRRVRDNM

SEQ ID NO: 5314 - protein, 22 aa, synthetic construct
RKRSPKDKKEKDLDGAGKRRKT

SEQ ID NO: 5315 - protein, 22 aa, synthetic construct
RKRTPRVDGQTGENDMNKRRRK

SEQ ID NO: 5316 - protein, 10 aa, synthetic construct
RLPVRRRRRR

SEQ ID NO: 5317 - protein, 10 aa, synthetic construct
RLRFRKPKSK

SEQ ID NO: 5318 - protein, 6 aa, synthetic construct
RQQRKR

SEQ ID NO: 5319 - protein, 16 aa, synthetic construct
RRDLNSSFETSPKKVK

SEQ ID NO: 5320 - protein, 8 aa, synthetic construct
RRDRAKLR

SEQ ID NO: 5321 - protein, 8 aa, synthetic construct
RRGDGRRR

SEQ ID NO: 5322 - protein, 11 aa, synthetic construct
RRGRKRKAEKQ

SEQ ID NO: 5323 - protein, 6 aa, synthetic construct
RRKKRR

SEQ ID NO: 5324 - protein, 19 aa, synthetic construct
RRKRSKSEDMDSVESKRRR

SEQ ID NO: 5325 - protein, 6 aa, synthetic construct
RRKRSR

SEQ ID NO: 5326 - protein, 14 aa, synthetic construct
RRPKGKTLQKRKPK

SEQ ID NO: 5327 - protein, 18 aa, synthetic construct
RRRGFERFGPDNMGRKRK

SEQ ID NO: 5328 - protein, 15 aa, synthetic construct
RRRGKNKVAAQNCRK

SEQ ID NO: 5329 - protein, 6 aa, synthetic construct
RRRKRR

SEQ ID NO: 5330 - protein, 14 aa, synthetic construct
RRRQKQKGGASRRR

SEQ ID NO: 5331 - protein, 13 aa, synthetic construct
RRRREGPRARRRR

SEQ ID NO: 5332 - protein, 61 aa, synthetic construct
RRTIRLKLVYDKCDRSCKIQKKNRNKCQYCRFHKCLSVGMSHNAIRFGRMPRSEKAKLKAE

SEQ ID NO: 5333 - protein, 17 aa, synthetic construct
RRVPQRKEVSRCRKCRK

SEQ ID NO: 5334 - protein, 32 aa, synthetic construct
RVGGRRQAVECIEDLLNEPGQPLDLSCKRPRP

SEQ ID NO: 5335 - protein, 9 aa, synthetic construct
RVVKLRIAP

SEQ ID NO: 5336 - protein, 6 aa, synthetic construct
RVVRRR

SEQ ID NO: 5337 - protein, 12 aa, synthetic construct
SKRKTKISRKTR

SEQ ID NO: 5338 - protein, 16 aa, synthetic construct
SYVKTVPNRTRTYIKL

SEQ ID NO: 5339 - protein, 12 aa, synthetic construct
TGKNEAKKRKIA

SEQ ID NO: 5340 - protein, 30 aa, synthetic construct
TLSPASSPSSVSCPVIPASTDESPGSALNI

SEQ ID NO: 5341 - protein, 12 aa, synthetic construct
VSKKQRTGKKIH

SEQ ID NO: 5342 - protein, 9 aa, synthetic construct
SPKKKRKVE

SEQ ID NO: 5343 - protein, 19 aa, synthetic construct
KRTADGSEFESPKKKRKVE

SEQ ID NO: 5344 - protein, 9 aa, synthetic construct
PAAKRVKLD

SEQ ID NO: 5345 - protein, 7 aa, synthetic construct
PKKKRKV

SEQ ID NO: 5346 - protein, 30 aa, synthetic construct; identical to SEQ ID NO: 5009

SEQ ID NO: 5347 - protein, 11 aa, synthetic construct
SPKKKRKVEAS

SEQ ID NO: 5348 - protein, 16 aa, synthetic construct
MAPKKKRKVGIHRGVP

SEQ ID NO: 5349 - protein, 29 aa, synthetic construct
KRTADGSEFEKRTADGSEFESPKKKAKVE

SEQ ID NO: 5350 - protein, 10 aa, synthetic construct
KRTADGSEFE

SEQ ID NO: 5351 - protein, 19 aa, synthetic construct
KRTADGSEFESPKKKAKVE

SEQ ID NO: 5352-6000 - skipped (649 entries)

SEQ ID NO: 6001 - protein, 2090 aa, synthetic construct
MPAAKRVKLDGGDKKYSIGLDIGTNSVGWAVITDEYKVPSKKFKVLGNTDRHSIKKNLIGALLFDSGETAEATRLKRTARRRYTRRKNRICYLQEIFSNEMAKVDDSFFHRLEESFLVEEDKKHERHPIFGNIVDEVAYHEKYPTIYHLRKKLVDSTDKADLRLIYLALAHMIKFRGHFLIEGDLNPDNSDVDKLFIQLVQTYNQLFEENPINASGVDAKAILSARLSKSRRLENLIAQLPGEKKNGLFGNLIALSLGLTPNFKSNFDLAEDAKLQLSKDTYDDDLDNLLAQIGDQYADLFLAAKNLSDAILLSDILRVNTEITKAPLSASMIKRYDEHHQDLTLLKALVRQQLPEKYKEIFFDQSKNGYAGYIDGGASQEEFYKFIKPILEKMDGTEELLVKLNREDLLRKQRTFDNGSIPHQIHLGELHAILRRQEDFYPFLKDNREKIEKILTFRIPYYVGPLARGNSRFAWMTRKSEETITPWNFEEVVDKGASAQSFIERMTNFDKNLPNEKVLPKHSLLYEYFTVYNELTKVKYVTEGMRKPAFLSGEQKKAIVDLLFKTNRKVTVKQLKEDYFKKIECFDSVEISGVEDRFNASLGTYHDLLKIIKDKDFLDNEENEDILEDIVLTLTLFEDREMIEERLKTYAHLFDDKVMKQLKRRRYTGWGRLSRKLINGIRDKQSGKTILDFLKSDGFANRNFMQLIHDDSLTFKEDIQKAQVSGQGDSLHEHIANLAGSPAIKKGILQTVKVVDELVKVMGRHKPENIVIEMARENQTTQKGQKNSRERMKRIEEGIKELGSQILKEHPVENTQLQNEKLYLYYLQNGRDMYVDQELDINRLSDYDVDHIVPQSFLKDDSIDNKVLTRSDKARGKSDNVPSEEVVKKMKNYWRQLLNAKLITQRKFDNLTKAERGGLSELDKAGFIKRQLVETRQITKHVAQILDSRMNTKYDENDKLIREVKVITLKSKLVSDFRKDFQFYKVREINNYHHAHDAYLNAVVGTALIKKYPKLESEFVYGDYKVYDVRKMIAKSEQEIGKATAKYFFYSNIMNFFKTEITLANGEIRKRPLIETNGETGEIVWDKGRDFATVRKVLSMPQVNIVKKTEVQTGGFSKESILPKRNSDKLIARKKDWDPKKYGGFDSPTVAYSVLVVAKVEKGKSKKLKSVKELLGITIMERSSFEKNPIDFLEAKGYKEVKKDLIIKLPKYSLFELENGRKRMLASAGELQKGNELALPSKYVNFLYLASHYEKLKGSPEDNEQKQLFVEQHKHYLDEIIEQISEFSKRVILADANLDKVLSAYNKHRDKPIREQAENIIHLFTLTNLGAPAAFKYFDTTIDRKRYTSTKEVLDATLIHQSITGLYETRIDLSQLGGDGGGGSGGTAPLEEEYRLFLEAPIQNVTLLEQWKREIPKVWAEINPPGLASTQAPIHVQLLSTALPVRVRQYPITLEAKRSLRETIRKFRAAGILRPVHSPWNTPLLPVRKSGTSEYRMVQDLREVNKRVETIHPTVPNPYTLLSLLPPDRIWYSVLDLKDAFFCIPLAPESQLIFAFEWADAEEGESGQLTWTRLPQGFKNSPTLFNEALNRDLQGFRLDHPSVSLLQYVDDLLIAADTQAACLSATRDLLMTLAELGYRVSGKKAQLCQEEVTYLGFKIHKGSRSLSNSRTQAILQIPVPKTKRQVREFLGKIGYCRLFIPGFAELAQPLYAATRPGNDPLVWGEKEEEAFQSLKLALTQPPALALPSLDKPFQLFVEETSGAAKGVLTQALGPWKRPVAYLSKRLDPVAAGWPRCLRAIAAAALLTREASKLTFGQDIEITSSHNLESLLRSPPDKWLTNARITQYQVLLLDPPRVRFKQTAALNPATLLPETDDTLPIHHCLDTLDSLTSTRPDLTDQPLAQAEATLFTDGSSYIRDGKRYAGAAVVTLDSVIWAEPLPIGTSAQKAELIALTKALEWSKDKSVNIYTDSRYAFATLHVHGMIYRERGWLTAGGKAIKNAPEILALLTAVWLPKRVAVMHCKGHQKDDAPTSTGNRRADEVAREVAIRPLSTQATISAGKRTADGSEFEKRTADGSEFESPKKKAKVE

SEQ ID NO: 6002 - protein, 2094 aa, synthetic construct
MPAAKRVKLDGGDKKYSIGLDIGTNSVGWAVITDEYKVPSKKFKVLGNTDRHSIKKNLIGALLFDSGETAEATRLKRTARRRYTRRKNRICYLQEIFSNEMAKVDDSFFHRLEESFLVEEDKKHERHPIFGNIVDEVAYHEKYPTIYHLRKKLVDSTDKADLRLIYLALAHMIKFRGHFLIEGDLNPDNSDVDKLFIQLVQTYNQLFEENPINASGVDAKAILSARLSKSRRLENLIAQLPGEKKNGLFGNLIALSLGLTPNFKSNFDLAEDAKLQLSKDTYDDDLDNLLAQIGDQYADLFLAAKNLSDAILLSDILRVNTEITKAPLSASMIKRYDEHHQDLTLLKALVRQQLPEKYKEIFFDQSKNGYAGYIDGGASQEEFYKFIKPILEKMDGTEELLVKLNREDLLRKQRTFDNGSIPHQIHLGELHAILRRQEDFYPFLKDNREKIEKILTFRIPYYVGPLARGNSRFAWMTRKSEETITPWNFEEVVDKGASAQSFIERMTNFDKNLPNEKVLPKHSLLYEYFTVYNELTKVKYVTEGMRKPAFLSGEQKKAIVDLLFKTNRKVTVKQLKEDYFKKIECFDSVEISGVEDRFNASLGTYHDLLKIIKDKDFLDNEENEDILEDIVLTLTLFEDREMIEERLKTYAHLFDDKVMKQLKRRRYTGWGRLSRKLINGIRDKQSGKTILDFLKSDGFANRNFMQLIHDDSLTFKEDIQKAQVSGQGDSLHEHIANLAGSPAIKKGILQTVKVVDELVKVMGRHKPENIVIEMARENQTTQKGQKNSRERMKRIEEGIKELGSQILKEHPVENTQLQNEKLYLYYLQNGRDMYVDQELDINRLSDYDVDHIVPQSFLKDDSIDNKVLTRSDKARGKSDNVPSEEVVKKMKNYWRQLLNAKLITQRKFDNLTKAERGGLSELDKAGFIKRQLVETRQITKHVAQILDSRMNTKYDENDKLIREVKVITLKSKLVSDFRKDFQFYKVREINNYHHAHDAYLNAVVGTALIKKYPKLESEFVYGDYKVYDVRKMIAKSEQEIGKATAKYFFYSNIMNFFKTEITLANGEIRKRPLIETNGETGEIVWDKGRDFATVRKVLSMPQVNIVKKTEVQTGGFSKESILPKRNSDKLIARKKDWDPKKYGGFDSPTVAYSVLVVAKVEKGKSKKLKSVKELLGITIMERSSFEKNPIDFLEAKGYKEVKKDLIIKLPKYSLFELENGRKRMLASAGELQKGNELALPSKYVNFLYLASHYEKLKGSPEDNEQKQLFVEQHKHYLDEIIEQISEFSKRVILADANLDKVLSAYNKHRDKPIREQAENIIHLFTLTNLGAPAAFKYFDTTIDRKRYTSTKEVLDATLIHQSITGLYETRIDLSQLGGDGGGGSGGTVSLQDEHRLFDIPVTTSLPDVWLQDFPQAWAETGGLGRAKCQAPIIIDLKPTAVPVSIKQYPMSLEAHMGIRQHIIKFLELGVLRPCRSPWNTPLLPVKKPGTQDYRPVQDLREINKRTVDIHPTVPNPYNLLSTLKPDYSWYTVLDLKDAFFCLPLAPQSQELFAFEWKDPERGISGQLTWTRLPQGFKNSPTLFDEALHRDLTDFRTQHPEVTLLQYVDDLLLAAPTKKACTQGTRHLLQELGEKGYRASAKKAQICQTKVTYLGYILSEGKRWLTPGRIETVARIPPPRNPREVREFLGTAGFCRLWIPGFAELAAPLYALTKESTPFTWQTEHQLAFEALKKALLSAPALGLPDTSKPFTLFLDERQGIAKGVLTQKLGPWKRPVAYLSKKLDPVAAGWPPCLRIMAATAMLVKDSAKLTLGQPLTVITPHTLEAIVRQPPDRWITNARLTHYQALLLDTDRVQFGPPVTLNPATLLPVPENQPSPHDCRQVLAETHGTREDLKDQELPDADHTWYTDGSSYLDSGTRRAGAAVVDGHNTIWAQSLPPGTSAQKAELIALTKALELSKGKKANIYTDSRYAFATAHTHGSIYERRGLLTSEGKEIKNKAEIIALLKALFLPQEVAIIHCPGHQKGQDPVAVGNRQADRVARQAAMAEVLTLATEPDNTSHITAGKRTADGSEFEKRTADGSEFESPKKKAKVE

SEQ ID NO: 6003 - protein, 2079 aa, synthetic construct
MPAAKRVKLDGGDKKYSIGLDIGTNSVGWAVITDEYKVPSKKFKVLGNTDRHSIKKNLIGALLFDSGETAEATRLKRTARRRYTRRKNRICYLQEIFSNEMAKVDDSFFHRLEESFLVEEDKKHERHPIFGNIVDEVAYHEKYPTIYHLRKKLVDSTDKADLRLIYLALAHMIKFRGHFLIEGDLNPDNSDVDKLFIQLVQTYNQLFEENPINASGVDAKAILSARLSKSRRLENLIAQLPGEKKNGLFGNLIALSLGLTPNFKSNFDLAEDAKLQLSKDTYDDDLDNLLAQIGDQYADLFLAAKNLSDAILLSDILRVNTEITKAPLSASMIKRYDEHHQDLTLLKALVRQQLPEKYKEIFFDQSKNGYAGYIDGGASQEEFYKFIKPILEKMDGTEELLVKLNREDLLRKQRTFDNGSIPHQIHLGELHAILRRQEDFYPFLKDNREKIEKILTFRIPYYVGPLARGNSRFAWMTRKSEETITPWNFEEVVDKGASAQSFIERMTNFDKNLPNEKVLPKHSLLYEYFTVYNELTKVKYVTEGMRKPAFLSGEQKKAIVDLLFKTNRKVTVKQLKEDYFKKIECFDSVEISGVEDRFNASLGTYHDLLKIIKDKDFLDNEENEDILEDIVLTLTLFEDREMIEERLKTYAHLFDDKVMKQLKRRRYTGWGRLSRKLINGIRDKQSGKTILDFLKSDGFANRNFMQLIHDDSLTFKEDIQKAQVSGQGDSLHEHIANLAGSPAIKKGILQTVKVVDELVKVMGRHKPENIVIEMARENQTTQKGQKNSRERMKRIEEGIKELGSQILKEHPVENTQLQNEKLYLYYLQNGRDMYVDQELDINRLSDYDVDHIVPQSFLKDDSIDNKVLTRSDKARGKSDNVPSEEVVKKMKNYWRQLLNAKLITQRKFDNLTKAERGGLSELDKAGFIKRQLVETRQITKHVAQILDSRMNTKYDENDKLIREVKVITLKSKLVSDFRKDFQFYKVREINNYHHAHDAYLNAVVGTALIKKYPKLESEFVYGDYKVYDVRKMIAKSEQEIGKATAKYFFYSNIMNFFKTEITLANGEIRKRPLIETNGETGEIVWDKGRDFATVRKVLSMPQVNIVKKTEVQTGGFSKESILPKRNSDKLIARKKDWDPKKYGGFDSPTVAYSVLVVAKVEKGKSKKLKSVKELLGITIMERSSFEKNPIDFLEAKGYKEVKKDLIIKLPKYSLFELENGRKRMLASAGELQKGNELALPSKYVNFLYLASHYEKLKGSPEDNEQKQLFVEQHKHYLDEIIEQISEFSKRVILADANLDKVLSAYNKHRDKPIREQAENIIHLFTLTNLGAPAAFKYFDTTIDRKRYTSTKEVLDATLIHQSITGLYETRIDLSQLGGDGGGGSGGVPWILKKPLELTIKLDLEEQQGTLLNNSILSKKGKEELKQLFEKYSALWQSWENQVGHRRIRPHKIATGTVKPTPQKQYHINPKAKPDIQIVINDLLKQGVLIQKESTMNTPVYPVPKPNGRWRMVLDYRAVNKVTPLIAVQNQHSYGILGSLFKGRYKTTIDLSNGFWAHPIVPEDYWITAFTWQGKQYCWTVLPQGFLNSPGLFTGDVVDLLQGIPNVEVYVDDVYISHDSEKEHLEYLDILFNRLKEAGYIISLKKSNIANSIVDFLGFQITNEGRGLTDTFKEKLENITAPTTLKQLQSILGLLNFARNFIPDFTELIAPLYALIPKSTKNYVPWQIEHSTTLETLITKLNGAEYLQGRKGDKTLIMKVNASYTTGYIRYYNEGEKKPISYVSIVFSKTELKFTELEKLLTTVHKGLLKALDLSMGQNIHVYSPIVSMQNIQKTPQTAKKALASRWLSWLSYLEDPRIRFFYDPQMPALKDLPAVDTGKDNKKHPSNFQHIFYTDGSAITSPTKEGHLNAGMGIVYFINKDGNLQKQQEWSISLGNHTAQFAEIAAFEFALKKCLPLGGNILVVTDSNYVAKAYNEELDVWASNGFVNNRKKPLKHISKWKSVADLKRLRPDVVVTHEPGHQKLDSSPHAYGNNLADQLATQASFKVHAGKRTADGSEFEKRTADGSEFESPKKKAKVE

SEQ ID NO: 6004 - protein, 2087 aa, synthetic construct
MPAAKRVKLDGGDKKYSIGLDIGTNSVGWAVITDEYKVPSKKFKVLGNTDRHSIKKNLIGALLFDSGETAEATRLKRTARRRYTRRKNRICYLQEIFSNEMAKVDDSFFHRLEESFLVEEDKKHERHPIFGNIVDEVAYHEKYPTIYHLRKKLVDSTDKADLRLIYLALAHMIKFRGHFLIEGDLNPDNSDVDKLFIQLVQTYNQLFEENPINASGVDAKAILSARLSKSRRLENLIAQLPGEKKNGLFGNLIALSLGLTPNFKSNFDLAEDAKLQLSKDTYDDDLDNLLAQIGDQYADLFLAAKNLSDAILLSDILRVNTEITKAPLSASMIKRYDEHHQDLTLLKALVRQQLPEKYKEIFFDQSKNGYAGYIDGGASQEEFYKFIKPILEKMDGTEELLVKLNREDLLRKQRTFDNGSIPHQIHLGELHAILRRQEDFYPFLKDNREKIEKILTFRIPYYVGPLARGNSRFAWMTRKSEETITPWNFEEVVDKGASAQSFIERMTNFDKNLPNEKVLPKHSLLYEYFTVYNELTKVKYVTEGMRKPAFLSGEQKKAIVDLLFKTNRKVTVKQLKEDYFKKIECFDSVEISGVEDRFNASLGTYHDLLKIIKDKDFLDNEENEDILEDIVLTLTLFEDREMIEERLKTYAHLFDDKVMKQLKRRRYTGWGRLSRKLINGIRDKQSGKTILDFLKSDGFANRNFMQLIHDDSLTFKEDIQKAQVSGQGDSLHEHIANLAGSPAIKKGILQTVKVVDELVKVMGRHKPENIVIEMARENQTTQKGQKNSRERMKRIEEGIKELGSQILKEHPVENTQLQNEKLYLYYLQNGRDMYVDQELDINRLSDYDVDHIVPQSFLKDDSIDNKVLTRSDKARGKSDNVPSEEVVKKMKNYWRQLLNAKLITQRKFDNLTKAERGGLSELDKAGFIKRQLVETRQITKHVAQILDSRMNTKYDENDKLIREVKVITLKSKLVSDFRKDFQFYKVREINNYHHAHDAYLNAVVGTALIKKYPKLESEFVYGDYKVYDVRKMIAKSEQEIGKATAKYFFYSNIMNFFKTEITLANGEIRKRPLIETNGETGEIVWDKGRDFATVRKVLSMPQVNIVKKTEVQTGGFSKESILPKRNSDKLIARKKDWDPKKYGGFDSPTVAYSVLVVAKVEKGKSKKLKSVKELLGITIMERSSFEKNPIDFLEAKGYKEVKKDLIIKLPKYSLFELENGRKRMLASAGELQKGNELALPSKYVNFLYLASHYEKLKGSPEDNEQKQLFVEQHKHYLDEIIEQISEFSKRVILADANLDKVLSAYNKHRDKPIREQAENIIHLFTLTNLGAPAAFKYFDTTIDRKRYTSTKEVLDATLIHQSITGLYETRIDLSQLGGDGGGGSGGTLQLEEEYRLFEPESTQKQEMDIWLKNFPQAWAETGGMGTAHCQAPVLIQLKATATPISIRQYPMPHEAYQGIKPHIRRMLDQGILKPCQSPWNTPLLPVKKPGTEDYRPVQDLREVNKRVEDIHPTVPNPYNLLSTLPPSHPWYTVLDLKDAFFCLRLHSESQLLFAFEWRDPEIGLSGQLTWTRLPQGFKNSPTLFNEALHSDLADFRVRYPALVLLQYVDDLLLAAATRTECLEGTKALLETLGNKGYRASAKKAQICLQEVTYLGYSLKDGQRWLTKARKEAILSIPVPKNSRQVREFLGKAGYCRLFIPGFAELAAPLYPLTRPGTLFQWGTEQQLAFEDIKKALLSSPALGLPDITKPFELFIDENSGFAKGVLVQKLGPWKRPVAYLSKKLDTVASGWPPCLRMVAAIAILVKDAGKLTLGQPLTILTSHPVEALVRQPPNKWLSNARMTHYQAMLLDAERVHFGPTVSLNPATLLPLPSGGNHHDCLQILAETHGTRPDLTDQPLPDADLTWYTDGSSFIRNGEREAGAAVTTESEVIWAAPLPPGTSAQRAELIALTQALKMAEGKKLTVYTDSRYAFATTHVHGEIYRRRGWLTSEGKEIKNKNEILALLEALFLPKRLSIIHCPGHQKGDSPQAKGNRLADDTAKKAATETHSSLTVLPAGKRTADGSEFEKRTADGSEFESPKKKAKVE

SEQ ID NO: 6005 - protein, 2079 aa, synthetic construct
MPAAKRVKLDGGDKKYSIGLDIGTNSVGWAVITDEYKVPSKKFKVLGNTDRHSIKKNLIGALLFDSGETAEATRLKRTARRRYTRRKNRICYLQEIFSNEMAKVDDSFFHRLEESFLVEEDKKHERHPIFGNIVDEVAYHEKYPTIYHLRKKLVDSTDKADLRLIYLALAHMIKFRGHFLIEGDLNPDNSDVDKLFIQLVQTYNQLFEENPINASGVDAKAILSARLSKSRRLENLIAQLPGEKKNGLFGNLIALSLGLTPNFKSNFDLAEDAKLQLSKDTYDDDLDNLLAQIGDQYADLFLAAKNLSDAILLSDILRVNTEITKAPLSASMIKRYDEHHQDLTLLKALVRQQLPEKYKEIFFDQSKNGYAGYIDGGASQEEFYKFIKPILEKMDGTEELLVKLNREDLLRKQRTFDNGSIPHQIHLGELHAILRRQEDFYPFLKDNREKIEKILTFRIPYYVGPLARGNSRFAWMTRKSEETITPWNFEEVVDKGASAQSFIERMTNFDKNLPNEKVLPKHSLLYEYFTVYNELTKVKYVTEGMRKPAFLSGEQKKAIVDLLFKTNRKVTVKQLKEDYFKKIECFDSVEISGVEDRFNASLGTYHDLLKIIKDKDFLDNEENEDILEDIVLTLTLFEDREMIEERLKTYAHLFDDKVMKQLKRRRYTGWGRLSRKLINGIRDKQSGKTILDFLKSDGFANRNFMQLIHDDSLTFKEDIQKAQVSGQGDSLHEHIANLAGSPAIKKGILQTVKVVDELVKVMGRHKPENIVIEMARENQTTQKGQKNSRERMKRIEEGIKELGSQILKEHPVENTQLQNEKLYLYYLQNGRDMYVDQELDINRLSDYDVDHIVPQSFLKDDSIDNKVLTRSDKARGKSDNVPSEEVVKKMKNYWRQLLNAKLITQRKFDNLTKAERGGLSELDKAGFIKRQLVETRQITKHVAQILDSRMNTKYDENDKLIREVKVITLKSKLVSDFRKDFQFYKVREINNYHHAHDAYLNAVVGTALIKKYPKLESEFVYGDYKVYDVRKMIAKSEQEIGKATAKYFFYSNIMNFFKTEITLANGEIRKRPLIETNGETGEIVWDKGRDFATVRKVLSMPQVNIVKKTEVQTGGFSKESILPKRNSDKLIARKKDWDPKKYGGFDSPTVAYSVLVVAKVEKGKSKKLKSVKELLGITIMERSSFEKNPIDFLEAKGYKEVKKDLIIKLPKYSLFELENGRKRMLASAGELQKGNELALPSKYVNFLYLASHYEKLKGSPEDNEQKQLFVEQHKHYLDEIIEQISEFSKRVILADANLDKVLSAYNKHRDKPIREQAENIIHLFTLTNLGAPAAFKYFDTTIDRKRYTSTKEVLDATLIHQSITGLYETRIDLSQLGGDGGGGSGGVPWLTQQPLQLTILVPLQEYQEKILSKTALPEDQKQQLKTLFVKYDNLWQHWENQVGHRKIRPHNIATGDYPPRPQKQYPINPKAKPSIQIVIDDLLKQGVLTPQNSTMNTPVYPVPKPDGRWRMVLDYREVNKTIPLTAAQNQHSAGILATIVRQKYKTTLDLANGFWAHPITPESYWLTAFTWQGKQYCWTRLPQGFLNSPALFNADVVDLLKEIPNVQVYVDDIYLSHDDPKEHVQQLEKVFQILLQAGYVVSLKKSEIGQKTVEFLGFNITKEGRGLTDTFKTKLLNITPPKDLKQLQSILGKLNFARNFIPNFAELVQPLYNLIAPAKGKYIEWSEENTKQLNMVIEALNTASNLEERLPEQRLVIKVNTSPSAGYVRYYNETGKKPIMYLNYVFSKAELKFSMLEKLLTTMHKALIKAMDLAMGQEILVYSPIVSMTKIQKTPLPERKALPIRWITWMTYLEDPRIQFHYDKTLPELKHIPDVYTSSQSPVKHPSQYEGVFYTDGSAIKSPDPTKSNNAGMGIVHATYKPEYQVLNQWSIPLGNHTAQMAEIAAVEFACKKALKIPGPVLVITDSFYVAESANKELPYWKSNGFVNNKKKPLKHISKWKSIAECLSMKPDITIQHEKGISLQIPVFILKGNALADKLATQGSYVVNAGKRTADGSEFEKRTADGSEFESPKKKAKVE

SEQ ID NO: 6006 - protein, 2210 aa, synthetic construct
MPAAKRVKLDGGDKKYSIGLDIGTNSVGWAVITDEYKVPSKKFKVLGNTDRHSIKKNLIGALLFDSGETAEATRLKRTARRRYTRRKNRICYLQEIFSNEMAKVDDSFFHRLEESFLVEEDKKHERHPIFGNIVDEVAYHEKYPTIYHLRKKLVDSTDKADLRLIYLALAHMIKFRGHFLIEGDLNPDNSDVDKLFIQLVQTYNQLFEENPINASGVDAKAILSARLSKSRRLENLIAQLPGEKKNGLFGNLIALSLGLTPNFKSNFDLAEDAKLQLSKDTYDDDLDNLLAQIGDQYADLFLAAKNLSDAILLSDILRVNTEITKAPLSASMIKRYDEHHQDLTLLKALVRQQLPEKYKEIFFDQSKNGYAGYIDGGASQEEFYKFIKPILEKMDGTEELLVKLNREDLLRKQRTFDNGSIPHQIHLGELHAILRRQEDFYPFLKDNREKIEKILTFRIPYYVGPLARGNSRFAWMTRKSEETITPWNFEEVVDKGASAQSFIERMTNFDKNLPNEKVLPKHSLLYEYFTVYNELTKVKYVTEGMRKPAFLSGEQKKAIVDLLFKTNRKVTVKQLKEDYFKKIECFDSVEISGVEDRFNASLGTYHDLLKIIKDKDFLDNEENEDILEDIVLTLTLFEDREMIEERLKTYAHLFDDKVMKQLKRRRYTGWGRLSRKLINGIRDKQSGKTILDFLKSDGFANRNFMQLIHDDSLTFKEDIQKAQVSGQGDSLHEHIANLAGSPAIKKGILQTVKVVDELVKVMGRHKPENIVIEMARENQTTQKGQKNSRERMKRIEEGIKELGSQILKEHPVENTQLQNEKLYLYYLQNGRDMYVDQELDINRLSDYDVDHIVPQSFLKDDSIDNKVLTRSDKARGKSDNVPSEEVVKKMKNYWRQLLNAKLITQRKFDNLTKAERGGLSELDKAGFIKRQLVETRQITKHVAQILDSRMNTKYDENDKLIREVKVITLKSKLVSDFRKDFQFYKVREINNYHHAHDAYLNAVVGTALIKKYPKLESEFVYGDYKVYDVRKMIAKSEQEIGKATAKYFFYSNIMNFFKTEITLANGEIRKRPLIETNGETGEIVWDKGRDFATVRKVLSMPQVNIVKKTEVQTGGFSKESILPKRNSDKLIARKKDWDPKKYGGFDSPTVAYSVLVVAKVEKGKSKKLKSVKELLGITIMERSSFEKNPIDFLEAKGYKEVKKDLIIKLPKYSLFELENGRKRMLASAGELQKGNELALPSKYVNFLYLASHYEKLKGSPEDNEQKQLFVEQHKHYLDEIIEQISEFSKRVILADANLDKVLSAYNKHRDKPIREQAENIIHLFTLTNLGAPAAFKYFDTTIDRKRYTSTKEVLDATLIHQSITGLYETRIDLSQLGGDGGGGSGGTLGDQGSRGSDPLPEPRVTLTVEGIPTEFLVNTGAEHSVLTKPMGKMGSKRTVVAGATGSKVYPWTTKRLLKIGQKQVTHSFLVIPECPAPLLGRDLLTKLKAQIQFSTEGPQVTWEDRPAMCLVLNLEEEYRLHEKPVPPSIDPSWLQLFPMVWAEKAGMGLANQVPPVVVELKSDASPVAVRQYPMSKEAREGIRPHIQRFLDLGILVPCQSPWNTPLLPVKKPGTNDYRPVQDLREVNKRVQDIHPTVPNPYNLLSSLPPSHTWYSVLDLKDAFFCLKLHPNSQPLFAFEWRDPEKGNTGQLTWTRLPQGFKNSPTLFDEALHRDLASFRALNPQVVMLQYVDDLLVAAPTYRDCKEGTRRLLQELSKLGYRVSAKKAQLCREEVTYLGYLLKGGKRWLTPARKATVMKIPTPTTPRQVREFLGTAGFCRLWIPGFASLAAPLYPLTREKVPFTWTEAHQEAFGRIKEALLSAPALALPDLTKPFALYVDEKEGVARGVLTQTLGPWRRPVAYLSKKLDPVASGWPTCLKAIAAVALLLKDADKLTLGQNVLVIAPHNLESIVRQPPDRWMTNARMTHYQSLLLNERVSFAPPAILNPATLLPVESDDTPIHICSEILAEETGTRPDLRDQPLPGVPAWYTDGSSFIMDGRRQAGAAIVDNKRTVWASNLPEGTSAQKAELIALTQALRLAEGKSINIYTDSRYAFATAHVHGAIYKQRGLLTSAGKDIKNKEEILALLEAIHLPKRVAIIHCPGHQRGTDPVATGNRKADEAAKQAAQSTRILTETTKNAGKRTADGSEFEKRTADGSEFESPKKKAKVE

SEQ ID NO: 6007 - protein, 2210 aa, synthetic construct
MPAAKRVKLDGGDKKYSIGLDIGTNSVGWAVITDEYKVPSKKFKVLGNTDRHSIKKNLIGALLFDSGETAEATRLKRTARRRYTRRKNRICYLQEIFSNEMAKVDDSFFHRLEESFLVEEDKKHERHPIFGNIVDEVAYHEKYPTIYHLRKKLVDSTDKADLRLIYLALAHMIKFRGHFLIEGDLNPDNSDVDKLFIQLVQTYNQLFEENPINASGVDAKAILSARLSKSRRLENLIAQLPGEKKNGLFGNLIALSLGLTPNFKSNFDLAEDAKLQLSKDTYDDDLDNLLAQIGDQYADLFLAAKNLSDAILLSDILRVNTEITKAPLSASMIKRYDEHHQDLTLLKALVRQQLPEKYKEIFFDQSKNGYAGYIDGGASQEEFYKFIKPILEKMDGTEELLVKLNREDLLRKQRTFDNGSIPHQIHLGELHAILRRQEDFYPFLKDNREKIEKILTFRIPYYVGPLARGNSRFAWMTRKSEETITPWNFEEVVDKGASAQSFIERMTNFDKNLPNEKVLPKHSLLYEYFTVYNELTKVKYVTEGMRKPAFLSGEQKKAIVDLLFKTNRKVTVKQLKEDYFKKIECFDSVEISGVEDRFNASLGTYHDLLKIIKDKDFLDNEENEDILEDIVLTLTLFEDREMIEERLKTYAHLFDDKVMKQLKRRRYTGWGRLSRKLINGIRDKQSGKTILDFLKSDGFANRNFMQLIHDDSLTFKEDIQKAQVSGQGDSLHEHIANLAGSPAIKKGILQTVKVVDELVKVMGRHKPENIVIEMARENQTTQKGQKNSRERMKRIEEGIKELGSQILKEHPVENTQLQNEKLYLYYLQNGRDMYVDQELDINRLSDYDVDHIVPQSFLKDDSIDNKVLTRSDKARGKSDNVPSEEVVKKMKNYWRQLLNAKLITQRKFDNLTKAERGGLSELDKAGFIKRQLVETRQITKHVAQILDSRMNTKYDENDKLIREVKVITLKSKLVSDFRKDFQFYKVREINNYHHAHDAYLNAVVGTALIKKYPKLESEFVYGDYKVYDVRKMIAKSEQEIGKATAKYFFYSNIMNFFKTEITLANGEIRKRPLIETNGETGEIVWDKGRDFATVRKVLSMPQVNIVKKTEVQTGGFSKESILPKRNSDKLIARKKDWDPKKYGGFDSPTVAYSVLVVAKVEKGKSKKLKSVKELLGITIMERSSFEKNPIDFLEAKGYKEVKKDLIIKLPKYSLFELENGRKRMLASAGELQKGNELALPSKYVNFLYLASHYEKLKGSPEDNEQKQLFVEQHKHYLDEIIEQISEFSKRVILADANLDKVLSAYNKHRDKPIREQAENIIHLFTLTNLGAPAAFKYFDTTIDRKRYTSTKEVLDATLIHQSITGLYETRIDLSQLGGDGGGGSGGTLGDQGSRGSDPLPEPRVTLTVEGIPTEFLVNTGAEHSVLTKPMGKMGSKRTVVAGATGSKVYPWTTKRLLKIGQKQVTHSFLVIPECPAPLLGRDLLTKLKAQIQFSTEGPQVTWEDRPAMCLVLNLEEEYRLHEKPVPPSIDPSWLQLFPMVWAEKAGMGLANQVPPVVVELKSDASPVAVRQYPMSKEAREGIRPHIQRFLDLGILVPCQSPWNTPLLPVKKPGTNDYRPVQDLREVNKRVQDIHPTVPNPYNLLSSLPPSHTWYSVLDLKDAFFCLKLHPNSQPLFAFEWRDPEKGNTGQLTWTRLPQGFKNSPTLFNEALHRDLASFRALNPQVVMLQYVDDLLVAAPTYRDCKEGTRRLLQELSKLGYRVSAKKAQLCREEVTYLGYLLKGGKRWLTPARKATVMKIPTPTTPRQVREFLGTAGFCRLWIPGFASLAAPLYPLTRPKVPFTWTEAHQEAFGRIKEALLSAPALALPDLTKPFALYVDEKEGVARGVLTQTLGPWRRPVAYLSKKLDPVASGWPTCLKAIAAVALLLKDADKLTLGQNVLVIAPHNLESIVRQPPDRWMTNARMTHYQSLLLNERVSFAPPAILNPATLLPVESDDTPIHICSEILAEETGTRPDLRDQPLPGVPAWYTDGSSFIMDGRRQAGAAIVDNKRTVWASNLPEGTSAQKAELIALTQALRLAEGKSINIYTDSRYAFATAHVHGAIYKQRGWLTSAGKDIKNKEEILALLEAIHLPKRVAIIHCPGHQRGTDPVATGNRKADEAAKQAAQSTRILTETTKNAGKRTADGSEFEKRTADGSEFESPKKKAKVE

SEQ ID NO: 6008 - protein, 2088 aa, synthetic construct
MPAAKRVKLDGGDKKYSIGLDIGTNSVGWAVITDEYKVPSKKFKVLGNTDRHSIKKNLIGALLFDSGETAEATRLKRTARRRYTRRKNRICYLQEIFSNEMAKVDDSFFHRLEESFLVEEDKKHERHPIFGNIVDEVAYHEKYPTIYHLRKKLVDSTDKADLRLIYLALAHMIKFRGHFLIEGDLNPDNSDVDKLFIQLVQTYNQLFEENPINASGVDAKAILSARLSKSRRLENLIAQLPGEKKNGLFGNLIALSLGLTPNFKSNFDLAEDAKLQLSKDTYDDDLDNLLAQIGDQYADLFLAAKNLSDAILLSDILRVNTEITKAPLSASMIKRYDEHHQDLTLLKALVRQQLPEKYKEIFFDQSKNGYAGYIDGGASQEEFYKFIKPILEKMDGTEELLVKLNREDLLRKQRTFDNGSIPHQIHLGELHAILRRQEDFYPFLKDNREKIEKILTFRIPYYVGPLARGNSRFAWMTRKSEETITPWNFEEVVDKGASAQSFIERMTNFDKNLPNEKVLPKHSLLYEYFTVYNELTKVKYVTEGMRKPAFLSGEQKKAIVDLLFKTNRKVTVKQLKEDYFKKIECFDSVEISGVEDRFNASLGTYHDLLKIIKDKDFLDNEENEDILEDIVLTLTLFEDREMIEERLKTYAHLFDDKVMKQLKRRRYTGWGRLSRKLINGIRDKQSGKTILDFLKSDGFANRNFMQLIHDDSLTFKEDIQKAQVSGQGDSLHEHIANLAGSPAIKKGILQTVKVVDELVKVMGRHKPENIVIEMARENQTTQKGQKNSRERMKRIEEGIKELGSQILKEHPVENTQLQNEKLYLYYLQNGRDMYVDQELDINRLSDYDVDHIVPQSFLKDDSIDNKVLTRSDKARGKSDNVPSEEVVKKMKNYWRQLLNAKLITQRKFDNLTKAERGGLSELDKAGFIKRQLVETRQITKHVAQILDSRMNTKYDENDKLIREVKVITLKSKLVSDFRKDFQFYKVREINNYHHAHDAYLNAVVGTALIKKYPKLESEFVYGDYKVYDVRKMIAKSEQEIGKATAKYFFYSNIMNFFKTEITLANGEIRKRPLIETNGETGEIVWDKGRDFATVRKVLSMPQVNIVKKTEVQTGGFSKESILPKRNSDKLIARKKDWDPKKYGGFDSPTVAYSVLVVAKVEKGKSKKLKSVKELLGITIMERSSFEKNPIDFLEAKGYKEVKKDLIIKLPKYSLFELENGRKRMLASAGELQKGNELALPSKYVNFLYLASHYEKLKGSPEDNEQKQLFVEQHKHYLDEIIEQISEFSKRVILADANLDKVLSAYNKHRDKPIREQAENIIHLFTLTNLGAPAAFKYFDTTIDRKRYTSTKEVLDATLIHQSITGLYETRIDLSQLGGDGGGGSGGTLNLEDEYRLYETSAEPEVSPGSTWLSDFPQAWAETGGMGLAVRQAPLIIPLKATSTPVSIKQYPMSQEAKLGIKPHIQRLLDQGILVPCQSPWNTPLLPVKKPGTNDYRPVQDLREVNKRVEDIHPTVPNPYNLLSGLPPSHRWYTVLDLKDAFFCLRLHPTSQPLFAFEWRDPGMGISGQLTWTRLPQGFKNSPTLFNEALHRDLADFRIQHPDLILLQYVDDILLAATSELDCQQGTRALLLTLGNLGYRASAKKAQLCQKQVKYLGYLLKEGQRWLTEARKETVMGQPTPKTPRQLREFLGKAGFCRLFIPGFAEMAAPLYPLTKPGTLFNWGPDQQKAYQEIKQALLTAPALGLPDLTKPFELFVDEKQGYAKGVLTQKLGPWRRPVAYLSKKLDPVAAGWPPCLRMVAAIAVLRKDAGKLTMGQPLVILAPHAVEALVKQPPDRWLSNARMTHYQAMLLDTDRVQFGPVVALNPATLLPLPEEGAPHDCLEILAETHGTRPDLTDQPIPDADHTWYTDGSSFLQEGQRKAGAAVTTETEVIWARALPAGTSAQRAELIALTQALKMAEGKRLNVYTDSRYAFATAHIHGEIYRRRGWLTSEGREIKNKSEILALLKALFLPKRLSIIHCLGHQKGDSAEARGNRLADQAAREAAIKTPPDTSTLLAGKRTADGSEFEKRTADGSEFESPKKKAKVE

SEQ ID NO: 6009 - protein, 2088 aa, synthetic construct
MPAAKRVKLDGGDKKYSIGLDIGTNSVGWAVITDEYKVPSKKFKVLGNTDRHSIKKNLIGALLFDSGETAEATRLKRTARRRYTRRKNRICYLQEIFSNEMAKVDDSFFHRLEESFLVEEDKKHERHPIFGNIVDEVAYHEKYPTIYHLRKKLVDSTDKADLRLIYLALAHMIKFRGHFLIEGDLNPDNSDVDKLFIQLVQTYNQLFEENPINASGVDAKAILSARLSKSRRLENLIAQLPGEKKNGLFGNLIALSLGLTPNFKSNFDLAEDAKLQLSKDTYDDDLDNLLAQIGDQYADLFLAAKNLSDAILLSDILRVNTEITKAPLSASMIKRYDEHHQDLTLLKALVRQQLPEKYKEIFFDQSKNGYAGYIDGGASQEEFYKFIKPILEKMDGTEELLVKLNREDLLRKQRTFDNGSIPHQIHLGELHAILRRQEDFYPFLKDNREKIEKILTFRIPYYVGPLARGNSRFAWMTRKSEETITPWNFEEVVDKGASAQSFIERMTNFDKNLPNEKVLPKHSLLYEYFTVYNELTKVKYVTEGMRKPAFLSGEQKKAIVDLLFKTNRKVTVKQLKEDYFKKIECFDSVEISGVEDRFNASLGTYHDLLKIIKDKDFLDNEENEDILEDIVLTLTLFEDREMIEERLKTYAHLFDDKVMKQLKRRRYTGWGRLSRKLINGIRDKQSGKTILDFLKSDGFANRNFMQLIHDDSLTFKEDIQKAQVSGQGDSLHEHIANLAGSPAIKKGILQTVKVVDELVKVMGRHKPENIVIEMARENQTTQKGQKNSRERMKRIEEGIKELGSQILKEHPVENTQLQNEKLYLYYLQNGRDMYVDQELDINRLSDYDVDHIVPQSFLKDDSIDNKVLTRSDKARGKSDNVPSEEVVKKMKNYWRQLLNAKLITQRKFDNLTKAERGGLSELDKAGFIKRQLVETRQITKHVAQILDSRMNTKYDENDKLIREVKVITLKSKLVSDFRKDFQFYKVREINNYHHAHDAYLNAVVGTALIKKYPKLESEFVYGDYKVYDVRKMIAKSEQEIGKATAKYFFYSNIMNFFKTEITLANGEIRKRPLIETNGETGEIVWDKGRDFATVRKVLSMPQVNIVKKTEVQTGGFSKESILPKRNSDKLIARKKDWDPKKYGGFDSPTVAYSVLVVAKVEKGKSKKLKSVKELLGITIMERSSFEKNPIDFLEAKGYKEVKKDLIIKLPKYSLFELENGRKRMLASAGELQKGNELALPSKYVNFLYLASHYEKLKGSPEDNEQKQLFVEQHKHYLDEIIEQISEFSKRVILADANLDKVLSAYNKHRDKPIREQAENIIHLFTLTNLGAPAAFKYFDTTIDRKRYTSTKEVLDATLIHQSITGLYETRIDLSQLGGDGGGGSGGTLGIEDEYRLHETSTEPDVSLGSTWLSDFPQAWAETGGMGLAVRQAPLIIPLKATSTPVSIQQYPMSHEARLGIKPHIQRLLDQGILVPCQSPWNTPLLPVKKPGTNDYRPVQDLREVNKRVEDIHPTVPNPYNLLSGLPPSHQWYTVLDLKDAFFCLRLHPTSQPLFAFEWRDPGMGISGQLTWTRLPQGFKNSPTLFNEALHRDLADFRIQHPDLILLQYVDDILLAATSELDCQQGTRALLQTLGDLGYRASAKKAQICQKQVKYLGYLLREGQRWLTEARKETVMGQPVPKTPRQLREFLGTAGFCRLWIPGFAEMAAPLYPLTKPGTLFSWGPDQQKAYQEIKQALLTAPALGLPDLTKPFELFVDEKQGYAKGVLTQKLGPWRRPVAYLSKKLDPVAAGWPPCLRMVAAIAVLTKDAGKLTMGQPLVILAPHAVEALVKQPPDRWLSNARMTHYQAMLLDTDRVQFGPVVALNPATLLPLPEEGAPHDCLEILAETHGTRPDLTDQPIPDADHTWYTDGSSFLQEGQRKAGAAVTTETEVIWAGALPAGTSAQRAELIALTQALKMAEGKRLNVYTDSRYAFATAHIHGEIYRRRGWLTSEGREIKNKSEILALLKALFLPKRLSIIHCLGHQKGDSAEARGNRLADQAAREAAIKTPPDTSTLLAGKRTADGSEFEKRTADGSEFESPKKKAKVE

SEQ ID NO: 6010 - protein, 2088 aa, synthetic construct
MPAAKRVKLDGGDKKYSIGLDIGTNSVGWAVITDEYKVPSKKFKVLGNTDRHSIKKNLIGALLFDSGETAEATRLKRTARRRYTRRKNRICYLQEIFSNEMAKVDDSFFHRLEESFLVEEDKKHERHPIFGNIVDEVAYHEKYPTIYHLRKKLVDSTDKADLRLIYLALAHMIKFRGHFLIEGDLNPDNSDVDKLFIQLVQTYNQLFEENPINASGVDAKAILSARLSKSRRLENLIAQLPGEKKNGLFGNLIALSLGLTPNFKSNFDLAEDAKLQLSKDTYDDDLDNLLAQIGDQYADLFLAAKNLSDAILLSDILRVNTEITKAPLSASMIKRYDEHHQDLTLLKALVRQQLPEKYKEIFFDQSKNGYAGYIDGGASQEEFYKFIKPILEKMDGTEELLVKLNREDLLRKQRTFDNGSIPHQIHLGELHAILRRQEDFYPFLKDNREKIEKILTFRIPYYVGPLARGNSRFAWMTRKSEETITPWNFEEVVDKGASAQSFIERMTNFDKNLPNEKVLPKHSLLYEYFTVYNELTKVKYVTEGMRKPAFLSGEQKKAIVDLLFKTNRKVTVKQLKEDYFKKIECFDSVEISGVEDRFNASLGTYHDLLKIIKDKDFLDNEENEDILEDIVLTLTLFEDREMIEERLKTYAHLFDDKVMKQLKRRRYTGWGRLSRKLINGIRDKQSGKTILDFLKSDGFANRNFMQLIHDDSLTFKEDIQKAQVSGQGDSLHEHIANLAGSPAIKKGILQTVKVVDELVKVMGRHKPENIVIEMARENQTTQKGQKNSRERMKRIEEGIKELGSQILKEHPVENTQLQNEKLYLYYLQNGRDMYVDQELDINRLSDYDVDHIVPQSFLKDDSIDNKVLTRSDKARGKSDNVPSEEVVKKMKNYWRQLLNAKLITQRKFDNLTKAERGGLSELDKAGFIKRQLVETRQITKHVAQILDSRMNTKYDENDKLIREVKVITLKSKLVSDFRKDFQFYKVREINNYHHAHDAYLNAVVGTALIKKYPKLESEFVYGDYKVYDVRKMIAKSEQEIGKATAKYFFYSNIMNFFKTEITLANGEIRKRPLIETNGETGEIVWDKGRDFATVRKVLSMPQVNIVKKTEVQTGGFSKESILPKRNSDKLIARKKDWDPKKYGGFDSPTVAYSVLVVAKVEKGKSKKLKSVKELLGITIMERSSFEKNPIDFLEAKGYKEVKKDLIIKLPKYSLFELENGRKRMLASAGELQKGNELALPSKYVNFLYLASHYEKLKGSPEDNEQKQLFVEQHKHYLDEIIEQISEFSKRVILADANLDKVLSAYNKHRDKPIREQAENIIHLFTLTNLGAPAAFKYFDTTIDRKRYTSTKEVLDATLIHQSITGLYETRIDLSQLGGDGGGGSGGTLNIEDEYRLHETSKEPDVSLGSTWLSDFPQAWAETGGMGLAVRQAPLIIPLKATSTPVSIKQYPMSQEARLGIKPHIQRLLDQGILVPCQSPWNTPLLPVKKPGTNDYRPVQDLREVNKRVEDIHPTVPNPYNLLSGLPPSHQWYTVLDLKDAFFCLRLHPTSQPLFAFEWRDPEMGISGQLTWTRLPQGFKNSPTLFNEALHRDLAGFRIQHPDLILLQYVDDLLLAATSELDCQQGTRALLQTLGDLGYRASAKKAQICQKQVKYLGYLLKEGQRWLTEARKETVMGQPIPKTPRQLREFLGTAGFCRLWIPGFAEMAAPLYPLTKPGTLFNWGPDQQKAFQEIKQALLTAPALGLPDLTKPFELFVDEKQGYAKGVLTQKLGPWRRPVAYLSKKLDPVAAGWPPCLRMVAAIAVLTKDAGKLTMGQPLVILAPHAVEALVKQPPDRWLSNARMTHYQALLLDTDRVQFGPVVALNPATLLPLPEEGLQHDCLDILAEAHGTRSDLMDQPLPDADHTWYTDGSSFLQEGQRKAGAAVTTETEVIWARALPAGTSAQRAELIALTQALKMAEGKKLNVYTDSRYAFATAHIHGEIYRRRGWLTSEGKEIKNKDEILALLKALFLPKRLSIIHCPGHQKGNSAEARGNRMADQAAREVATRETPETSTLLAGKRTADGSEFEKRTADGSEFESPKKKAKVE

SEQ ID NO: 6011 - protein, 2088 aa, synthetic construct
MPAAKRVKLDGGDKKYSIGLDIGTNSVGWAVITDEYKVPSKKFKVLGNTDRHSIKKNLIGALLFDSGETAEATRLKRTARRRYTRRKNRICYLQEIFSNEMAKVDDSFFHRLEESFLVEEDKKHERHPIFGNIVDEVAYHEKYPTIYHLRKKLVDSTDKADLRLIYLALAHMIKFRGHFLIEGDLNPDNSDVDKLFIQLVQTYNQLFEENPINASGVDAKAILSARLSKSRRLENLIAQLPGEKKNGLFGNLIALSLGLTPNFKSNFDLAEDAKLQLSKDTYDDDLDNLLAQIGDQYADLFLAAKNLSDAILLSDILRVNTEITKAPLSASMIKRYDEHHQDLTLLKALVRQQLPEKYKEIFFDQSKNGYAGYIDGGASQEEFYKFIKPILEKMDGTEELLVKLNREDLLRKQRTFDNGSIPHQIHLGELHAILRRQEDFYPFLKDNREKIEKILTFRIPYYVGPLARGNSRFAWMTRKSEETITPWNFEEVVDKGASAQSFIERMTNFDKNLPNEKVLPKHSLLYEYFTVYNELTKVKYVTEGMRKPAFLSGEQKKAIVDLLFKTNRKVTVKQLKEDYFKKIECFDSVEISGVEDRFNASLGTYHDLLKIIKDKDFLDNEENEDILEDIVLTLTLFEDREMIEERLKTYAHLFDDKVMKQLKRRRYTGWGRLSRKLINGIRDKQSGKTILDFLKSDGFANRNFMQLIHDDSLTFKEDIQKAQVSGQGDSLHEHIANLAGSPAIKKGILQTVKVVDELVKVMGRHKPENIVIEMARENQTTQKGQKNSRERMKRIEEGIKELGSQILKEHPVENTQLQNEKLYLYYLQNGRDMYVDQELDINRLSDYDVDHIVPQSFLKDDSIDNKVLTRSDKARGKSDNVPSEEVVKKMKNYWRQLLNAKLITQRKFDNLTKAERGGLSELDKAGFIKRQLVETRQITKHVAQILDSRMNTKYDENDKLIREVKVITLKSKLVSDFRKDFQFYKVREINNYHHAHDAYLNAVVGTALIKKYPKLESEFVYGDYKVYDVRKMIAKSEQEIGKATAKYFFYSNIMNFFKTEITLANGEIRKRPLIETNGETGEIVWDKGRDFATVRKVLSMPQVNIVKKTEVQTGGFSKESILPKRNSDKLIARKKDWDPKKYGGFDSPTVAYSVLVVAKVEKGKSKKLKSVKELLGITIMERSSFEKNPIDFLEAKGYKEVKKDLIIKLPKYSLFELENGRKRMLASAGELQKGNELALPSKYVNFLYLASHYEKLKGSPEDNEQKQLFVEQHKHYLDEIIEQISEFSKRVILADANLDKVLSAYNKHRDKPIREQAENIIHLFTLTNLGAPAAFKYFDTTIDRKRYTSTKEVLDATLIHQSITGLYETRIDLSQLGGDGGGGSGGTLNIEDEYRLHETSKGPDVPLGSTWLSDFPQAWAETGGMGLAVRQAPLIIPLKATSTPVSIKQYPMSQEARLGIKPHIQRLLDQGILVPCQSPWNTPLLPVKKPGTNDYRPVQDLREVNKRVEDIHPTVPNPYNLLSGLPPSHQWYTVLDLKDAFFCLRLHPTSQSLFAFEWRDPEMGISGQLTWTRLPQGFKNSPTLFNEALHRDLADFRIQHPDLILLQYVDDLLLAATSELDCQQGTRALLQTLGDLGYRASAKKAQICQKQVKYLGYLLKEGQRWLTEARKETVMGQPTPKTPRQLREFLGTAGFCRLWIPGFAEMAAPLYPLTKPGTLFEWGPDQQKAYQEIKQALLTAPALGLPDLTKPFELFVDEKQGYAKGVLTQKLGPWRRPVAYLSKKLDPVAAGWPPCLRMVAAIAVLTKDAGKLTMGQPLVILAPHAVEALVKQPPDRWLSNARMTHYQALLLDTDRVQFGPIVALNPATLLPLPEEGLQHDCLDILAEAHGTRPDLTDQPLPDADHTWYTDGSSFLQEGQRKAGAAVTTETEVVWAKALPAGTSAQRAELIALTQALKMAEGKKLNVYTDSRYAFATAHIHGEIYRRRGWLTSEGKEIKNKDEILALLKALFLPKRLSIIHCPGHQKGNRAEARGNRMADQAAREVATRETPETSTLLAGKRTADGSEFEKRTADGSEFESPKKKAKVE

SEQ ID NO: 6012 - protein, 2088 aa, synthetic construct
MPAAKRVKLDGGDKKYSIGLDIGTNSVGWAVITDEYKVPSKKFKVLGNTDRHSIKKNLIGALLFDSGETAEATRLKRTARRRYTRRKNRICYLQEIFSNEMAKVDDSFFHRLEESFLVEEDKKHERHPIFGNIVDEVAYHEKYPTIYHLRKKLVDSTDKADLRLIYLALAHMIKFRGHFLIEGDLNPDNSDVDKLFIQLVQTYNQLFEENPINASGVDAKAILSARLSKSRRLENLIAQLPGEKKNGLFGNLIALSLGLTPNFKSNFDLAEDAKLQLSKDTYDDDLDNLLAQIGDQYADLFLAAKNLSDAILLSDILRVNTEITKAPLSASMIKRYDEHHQDLTLLKALVRQQLPEKYKEIFFDQSKNGYAGYIDGGASQEEFYKFIKPILEKMDGTEELLVKLNREDLLRKQRTFDNGSIPHQIHLGELHAILRRQEDFYPFLKDNREKIEKILTFRIPYYVGPLARGNSRFAWMTRKSEETITPWNFEEVVDKGASAQSFIERMTNFDKNLPNEKVLPKHSLLYEYFTVYNELTKVKYVTEGMRKPAFLSGEQKKAIVDLLFKTNRKVTVKQLKEDYFKKIECFDSVEISGVEDRFNASLGTYHDLLKIIKDKDFLDNEENEDILEDIVLTLTLFEDREMIEERLKTYAHLFDDKVMKQLKRRRYTGWGRLSRKLINGIRDKQSGKTILDFLKSDGFANRNFMQLIHDDSLTFKEDIQKAQVSGQGDSLHEHIANLAGSPAIKKGILQTVKVVDELVKVMGRHKPENIVIEMARENQTTQKGQKNSRERMKRIEEGIKELGSQILKEHPVENTQLQNEKLYLYYLQNGRDMYVDQELDINRLSDYDVDHIVPQSFLKDDSIDNKVLTRSDKARGKSDNVPSEEVVKKMKNYWRQLLNAKLITQRKFDNLTKAERGGLSELDKAGFIKRQLVETRQITKHVAQILDSRMNTKYDENDKLIREVKVITLKSKLVSDFRKDFQFYKVREINNYHHAHDAYLNAVVGTALIKKYPKLESEFVYGDYKVYDVRKMIAKSEQEIGKATAKYFFYSNIMNFFKTEITLANGEIRKRPLIETNGETGEIVWDKGRDFATVRKVLSMPQVNIVKKTEVQTGGFSKESILPKRNSDKLIARKKDWDPKKYGGFDSPTVAYSVLVVAKVEKGKSKKLKSVKELLGITIMERSSFEKNPIDFLEAKGYKEVKKDLIIKLPKYSLFELENGRKRMLASAGELQKGNELALPSKYVNFLYLASHYEKLKGSPEDNEQKQLFVEQHKHYLDEIIEQISEFSKRVILADANLDKVLSAYNKHRDKPIREQAENIIHLFTLTNLGAPAAFKYFDTTIDRKRYTSTKEVLDATLIHQSITGLYETRIDLSQLGGDGGGGSGGTLNIEDEYRLHETSKGPDVPLGSTWLSDFPQAWAETGGMGLAVRQAPLIIPLKATSTPVSIKQYPMSQEARLGIKPHIQRLLDQGILVPCQSPWNTPLLPVKKPGTNDYRPVQDLREVNKRVEDIHPTVPNPYNLLSGLPPSHQWYTVLDLKDAFFCLRLHPTSQSLFAFEWRDPEMGISGQLTWTRLPQGFKNSPTLFNEALHRDLADFRIQHPDLILLQYVDDLLLAATSELDCQQGTRALLQTLGDLGYRASAKKAQICQKQVKYLGYLLKEGQRWLTEARKETVMGQPTPKTPRQLREFLGKAGFCRLFIPGFAEMAAPLYPLTKPGTLFEWGPDQQKAYQEIKQALLTAPALGLPDLTKPFELFVDEKQGYAKGVLTQKLGPWRRPVAYLSKKLDPVAAGWPPCLRMVAAIAVLTKDAGKLTMGQPLVILAPHAVEALVKQPPDRWLSNARMTHYQALLLDTDRVQFGPIVALNPATLLPLPEEGLQHDCLDILAEAHGTRPDLTDQPLPDADHTWYTDGSSFLQEGQRKAGAAVTTETEVVWAKALPAGTSAQRAELIALTQALKMAEGKKLNVYTDSRYAFATAHIHGEIYRRRGWLTSEGKEIKNKDEILALLKALFLPKRLSIIHCPGHQKGNRAEARGNRMADQAAREVATRETPETSTLLAGKRTADGSEFEKRTADGSEFESPKKKAKVE

SEQ ID NO: 6013 - protein, 2086 aa, synthetic construct
MPAAKRVKLDGGDKKYSIGLDIGTNSVGWAVITDEYKVPSKKFKVLGNTDRHSIKKNLIGALLFDSGETAEATRLKRTARRRYTRRKNRICYLQEIFSNEMAKVDDSFFHRLEESFLVEEDKKHERHPIFGNIVDEVAYHEKYPTIYHLRKKLVDSTDKADLRLIYLALAHMIKFRGHFLIEGDLNPDNSDVDKLFIQLVQTYNQLFEENPINASGVDAKAILSARLSKSRRLENLIAQLPGEKKNGLFGNLIALSLGLTPNFKSNFDLAEDAKLQLSKDTYDDDLDNLLAQIGDQYADLFLAAKNLSDAILLSDILRVNTEITKAPLSASMIKRYDEHHQDLTLLKALVRQQLPEKYKEIFFDQSKNGYAGYIDGGASQEEFYKFIKPILEKMDGTEELLVKLNREDLLRKQRTFDNGSIPHQIHLGELHAILRRQEDFYPFLKDNREKIEKILTFRIPYYVGPLARGNSRFAWMTRKSEETITPWNFEEVVDKGASAQSFIERMTNFDKNLPNEKVLPKHSLLYEYFTVYNELTKVKYVTEGMRKPAFLSGEQKKAIVDLLFKTNRKVTVKQLKEDYFKKIECFDSVEISGVEDRFNASLGTYHDLLKIIKDKDFLDNEENEDILEDIVLTLTLFEDREMIEERLKTYAHLFDDKVMKQLKRRRYTGWGRLSRKLINGIRDKQSGKTILDFLKSDGFANRNFMQLIHDDSLTFKEDIQKAQVSGQGDSLHEHIANLAGSPAIKKGILQTVKVVDELVKVMGRHKPENIVIEMARENQTTQKGQKNSRERMKRIEEGIKELGSQILKEHPVENTQLQNEKLYLYYLQNGRDMYVDQELDINRLSDYDVDHIVPQSFLKDDSIDNKVLTRSDKARGKSDNVPSEEVVKKMKNYWRQLLNAKLITQRKFDNLTKAERGGLSELDKAGFIKRQLVETRQITKHVAQILDSRMNTKYDENDKLIREVKVITLKSKLVSDFRKDFQFYKVREINNYHHAHDAYLNAVVGTALIKKYPKLESEFVYGDYKVYDVRKMIAKSEQEIGKATAKYFFYSNIMNFFKTEITLANGEIRKRPLIETNGETGEIVWDKGRDFATVRKVLSMPQVNIVKKTEVQTGGFSKESILPKRNSDKLIARKKDWDPKKYGGFDSPTVAYSVLVVAKVEKGKSKKLKSVKELLGITIMERSSFEKNPIDFLEAKGYKEVKKDLIIKLPKYSLFELENGRKRMLASAGELQKGNELALPSKYVNFLYLASHYEKLKGSPEDNEQKQLFVEQHKHYLDEIIEQISEFSKRVILADANLDKVLSAYNKHRDKPIREQAENIIHLFTLTNLGAPAAFKYFDTTIDRKRYTSTKEVLDATLIHQSITGLYETRIDLSQLGGDGGGGSGGVLNLEEEYRLHEKPVPSSIDPSWLQLFPTVWAERAGMGLANQVPPVVVELRSGASPVAVRQYPMSKEAREGIRPHIQRFLDLGVLVPCQSPWNTPLLPVKKPGTNDYRPVQDLREINKRVQDIHPTVPNPYNLLSSLPPSHTWYSVLDLKDAFFCLKLHPNSQPLFAFEWRDPEKGNTGQLTWTRLPQGFKNSPTLFNEALHRDLAPFRALNPQVVLLQYVDDLLVAAPTYRDCKEGTQKLLQELSKLGYRVSAKKAQLCQKEVTYLGYLLKEGKRWLTPARKATVMKIPPPTTPRQVREFLGKAGFCRLFIPGFASLAAPLYPLTKPSIPFIWTEEHQKAFDRIKEALLSAPALALPDLTKPFTLYVDERAGVARGVLTQTLGPWRRPVAYLSKKLDPVASGWPTCLKAVAAVALLLKDADKLTLGQNVTVIASHSLESIVRQPPDRWMTNARMTHYQSLLLNERVSFAPPAVLNPATLLPVESEATPVHRCSEILAEETGTRRDLKDQPLPGVPAWYTDGSSFIAEGKRRAGAAIVDGKRTVWASSLPEGTSAQKAELVALTQALRLAEGKDINIYTDSRYAFATAHIHGAIYKQRGWLTSAGKDIKNKEEILALLEAIHLPKRVAIIHCPGHQKGNDPVATGNRRADEAAKQAALSTRVLAETTKPAGKRTADGSEFEKRTADGSEFESPKKKAKVE

SEQ ID NO: 6014 - protein, 2088 aa, synthetic construct
MPAAKRVKLDGGDKKYSIGLDIGTNSVGWAVITDEYKVPSKKFKVLGNTDRHSIKKNLIGALLFDSGETAEATRLKRTARRRYTRRKNRICYLQEIFSNEMAKVDDSFFHRLEESFLVEEDKKHERHPIFGNIVDEVAYHEKYPTIYHLRKKLVDSTDKADLRLIYLALAHMIKFRGHFLIEGDLNPDNSDVDKLFIQLVQTYNQLFEENPINASGVDAKAILSARLSKSRRLENLIAQLPGEKKNGLFGNLIALSLGLTPNFKSNFDLAEDAKLQLSKDTYDDDLDNLLAQIGDQYADLFLAAKNLSDAILLSDILRVNTEITKAPLSASMIKRYDEHHQDLTLLKALVRQQLPEKYKEIFFDQSKNGYAGYIDGGASQEEFYKFIKPILEKMDGTEELLVKLNREDLLRKQRTFDNGSIPHQIHLGELHAILRRQEDFYPFLKDNREKIEKILTFRIPYYVGPLARGNSRFAWMTRKSEETITPWNFEEVVDKGASAQSFIERMTNFDKNLPNEKVLPKHSLLYEYFTVYNELTKVKYVTEGMRKPAFLSGEQKKAIVDLLFKTNRKVTVKQLKEDYFKKIECFDSVEISGVEDRFNASLGTYHDLLKIIKDKDFLDNEENEDILEDIVLTLTLFEDREMIEERLKTYAHLFDDKVMKQLKRRRYTGWGRLSRKLINGIRDKQSGKTILDFLKSDGFANRNFMQLIHDDSLTFKEDIQKAQVSGQGDSLHEHIANLAGSPAIKKGILQTVKVVDELVKVMGRHKPENIVIEMARENQTTQKGQKNSRERMKRIEEGIKELGSQILKEHPVENTQLQNEKLYLYYLQNGRDMYVDQELDINRLSDYDVDHIVPQSFLKDDSIDNKVLTRSDKARGKSDNVPSEEVVKKMKNYWRQLLNAKLITQRKFDNLTKAERGGLSELDKAGFIKRQLVETRQITKHVAQILDSRMNTKYDENDKLIREVKVITLKSKLVSDFRKDFQFYKVREINNYHHAHDAYLNAVVGTALIKKYPKLESEFVYGDYKVYDVRKMIAKSEQEIGKATAKYFFYSNIMNFFKTEITLANGEIRKRPLIETNGETGEIVWDKGRDFATVRKVLSMPQVNIVKKTEVQTGGFSKESILPKRNSDKLIARKKDWDPKKYGGFDSPTVAYSVLVVAKVEKGKSKKLKSVKELLGITIMERSSFEKNPIDFLEAKGYKEVKKDLIIKLPKYSLFELENGRKRMLASAGELQKGNELALPSKYVNFLYLASHYEKLKGSPEDNEQKQLFVEQHKHYLDEIIEQISEFSKRVILADANLDKVLSAYNKHRDKPIREQAENIIHLFTLTNLGAPAAFKYFDTTIDRKRYTSTKEVLDATLIHQSITGLYETRIDLSQLGGDGGGGSGGTLNIEDEYRLHETSKEPDVPLGSTWLSDFPQAWAETGGMGLAVRQAPLIIPLKATSTPVSIKQYPMSQEARLGIKPHIQRLLDQGILVPCQSPWNTPLLPVKKPGTNDYRPVQDLREVNKRVEDIHPTVPNPYNLLSGLPPSHQWYTVLDLKDAFFCLRLHPTSQPLFAFEWRDPEMGISGQLTWTRLPQGFKNSPTLFNEALHRDLADFRIQHPDLILLQYVDDLLLAATSEQDCQRGTRALLQTLGNLGYRASAKKAQICQKQVKYLGYLLKEGQRWLTEARKETVMGQPTPKTPRQLREFLGKAGFCRLFIPGFAEMAAPLYPLTKPGTLFNWGPDQQKAYQEIKQALLTAPALGLPDLTKPFELFVDEKQGYAKGVLTQKLGPWRRPVAYLSKKLDPVAAGWPPCLRMVAAIAVLTKDAGKLTMGQPLVILAPHAVEALVKQPPDRWLSNARMTHYQAMLLDTDRVQFGPVVALNPATLLPLPEKEAPHDCLEILAETHGTRPDLTDQPIPDADYTWYTDGSSFLQEGQRRAGAAVTTETEVIWARALPAGTSAQRAELIALTQALKMAEGKKLNVYTDSRYAFATAHVHGEIYRRRGWLTSEGREIKNKNEILALLKALFLPKRLSIIHCPGHQKGNSAEARGNRMADQAAREAAMKAVLETSTLLAGKRTADGSEFEKRTADGSEFESPKKKAKVE

SEQ ID NO: 6015 - protein, 2093 aa, synthetic construct
MPAAKRVKLDGGDKKYSIGLDIGTNSVGWAVITDEYKVPSKKFKVLGNTDRHSIKKNLIGALLFDSGETAEATRLKRTARRRYTRRKNRICYLQEIFSNEMAKVDDSFFHRLEESFLVEEDKKHERHPIFGNIVDEVAYHEKYPTIYHLRKKLVDSTDKADLRLIYLALAHMIKFRGHFLIEGDLNPDNSDVDKLFIQLVQTYNQLFEENPINASGVDAKAILSARLSKSRRLENLIAQLPGEKKNGLFGNLIALSLGLTPNFKSNFDLAEDAKLQLSKDTYDDDLDNLLAQIGDQYADLFLAAKNLSDAILLSDILRVNTEITKAPLSASMIKRYDEHHQDLTLLKALVRQQLPEKYKEIFFDQSKNGYAGYIDGGASQEEFYKFIKPILEKMDGTEELLVKLNREDLLRKQRTFDNGSIPHQIHLGELHAILRRQEDFYPFLKDNREKIEKILTFRIPYYVGPLARGNSRFAWMTRKSEETITPWNFEEVVDKGASAQSFIERMTNFDKNLPNEKVLPKHSLLYEYFTVYNELTKVKYVTEGMRKPAFLSGEQKKAIVDLLFKTNRKVTVKQLKEDYFKKIECFDSVEISGVEDRFNASLGTYHDLLKIIKDKDFLDNEENEDILEDIVLTLTLFEDREMIEERLKTYAHLFDDKVMKQLKRRRYTGWGRLSRKLINGIRDKQSGKTILDFLKSDGFANRNFMQLIHDDSLTFKEDIQKAQVSGQGDSLHEHIANLAGSPAIKKGILQTVKVVDELVKVMGRHKPENIVIEMARENQTTQKGQKNSRERMKRIEEGIKELGSQILKEHPVENTQLQNEKLYLYYLQNGRDMYVDQELDINRLSDYDVDHIVPQSFLKDDSIDNKVLTRSDKARGKSDNVPSEEVVKKMKNYWRQLLNAKLITQRKFDNLTKAERGGLSELDKAGFIKRQLVETRQITKHVAQILDSRMNTKYDENDKLIREVKVITLKSKLVSDFRKDFQFYKVREINNYHHAHDAYLNAVVGTALIKKYPKLESEFVYGDYKVYDVRKMIAKSEQEIGKATAKYFFYSNIMNFFKTEITLANGEIRKRPLIETNGETGEIVWDKGRDFATVRKVLSMPQVNIVKKTEVQTGGFSKESILPKRNSDKLIARKKDWDPKKYGGFDSPTVAYSVLVVAKVEKGKSKKLKSVKELLGITIMERSSFEKNPIDFLEAKGYKEVKKDLIIKLPKYSLFELENGRKRMLASAGELQKGNELALPSKYVNFLYLASHYEKLKGSPEDNEQKQLFVEQHKHYLDEIIEQISEFSKRVILADANLDKVLSAYNKHRDKPIREQAENIIHLFTLTNLGAPAAFKYFDTTIDRKRYTSTKEVLDATLIHQSITGLYETRIDLSQLGGDGGGGSGGSGGTAPLEEEYRLFLEAPIQNVTLLEQWKREIPKVWAEINPPGLASTQAPIHVQLLSTALPVRVRQYPITLEAKRSLRETIRKFRAAGILRPVHSPWNTPLLPVRKSGTSEYRMVQDLREVNKRVETIHPTVPNPYTLLSLLPPDRIWYSVLDLKDAFFCIPLAPESQLIFAFEWADAEEGESGQLTWTRLPQGFKNSPTLFNEALNRDLQGFRLDHPSVSLLQYVDDLLIAADTQAACLSATRDLLMTLAELGYRVSGKKAQLCQEEVTYLGFKIHKGSRSLSNSRTQAILQIPVPKTKRQVREFLGTIGYCRLWIPGFAELAQPLYAATRPGNDPLVWGEKEEEAFQSLKLALTQPPALALPSLDKPFQLFVEETSGAAKGVLTQALGPWKRPVAYLSKRLDPVAAGWPRCLRAIAAAALLTREASKLTFGQDIEITSSHNLESLLRSPPDKWLTNARITQYQVLLLDPPRVRFKQTAALNPATLLPETDDTLPIHHCLDTLDSLTSTRPDLTDQPLAQAEATLFTDGSSYIRDGKRYAGAAVVTLDSVIWAEPLPIGTSAQKAELIALTKALEWSKDKSVNIYTDSRYAFATLHVHGMIYRERGWLTAGGKAIKNAPEILALLTAVWLPKRVAVMHCKGHQKDDAPTSTGNRRADEVAREVAIRPLSTQATISAGKRTADGSEFEKRTADGSEFESPKKKAKVE

SEQ ID NO: 6016 - protein, 2082 aa, synthetic construct
MPAAKRVKLDGGDKKYSIGLDIGTNSVGWAVITDEYKVPSKKFKVLGNTDRHSIKKNLIGALLFDSGETAEATRLKRTARRRYTRRKNRICYLQEIFSNEMAKVDDSFFHRLEESFLVEEDKKHERHPIFGNIVDEVAYHEKYPTIYHLRKKLVDSTDKADLRLIYLALAHMIKFRGHFLIEGDLNPDNSDVDKLFIQLVQTYNQLFEENPINASGVDAKAILSARLSKSRRLENLIAQLPGEKKNGLFGNLIALSLGLTPNFKSNFDLAEDAKLQLSKDTYDDDLDNLLAQIGDQYADLFLAAKNLSDAILLSDILRVNTEITKAPLSASMIKRYDEHHQDLTLLKALVRQQLPEKYKEIFFDQSKNGYAGYIDGGASQEEFYKFIKPILEKMDGTEELLVKLNREDLLRKQRTFDNGSIPHQIHLGELHAILRRQEDFYPFLKDNREKIEKILTFRIPYYVGPLARGNSRFAWMTRKSEETITPWNFEEVVDKGASAQSFIERMTNFDKNLPNEKVLPKHSLLYEYFTVYNELTKVKYVTEGMRKPAFLSGEQKKAIVDLLFKTNRKVTVKQLKEDYFKKIECFDSVEISGVEDRFNASLGTYHDLLKIIKDKDFLDNEENEDILEDIVLTLTLFEDREMIEERLKTYAHLFDDKVMKQLKRRRYTGWGRLSRKLINGIRDKQSGKTILDFLKSDGFANRNFMQLIHDDSLTFKEDIQKAQVSGQGDSLHEHIANLAGSPAIKKGILQTVKVVDELVKVMGRHKPENIVIEMARENQTTQKGQKNSRERMKRIEEGIKELGSQILKEHPVENTQLQNEKLYLYYLQNGRDMYVDQELDINRLSDYDVDHIVPQSFLKDDSIDNKVLTRSDKARGKSDNVPSEEVVKKMKNYWRQLLNAKLITQRKFDNLTKAERGGLSELDKAGFIKRQLVETRQITKHVAQILDSRMNTKYDENDKLIREVKVITLKSKLVSDFRKDFQFYKVREINNYHHAHDAYLNAVVGTALIKKYPKLESEFVYGDYKVYDVRKMIAKSEQEIGKATAKYFFYSNIMNFFKTEITLANGEIRKRPLIETNGETGEIVWDKGRDFATVRKVLSMPQVNIVKKTEVQTGGFSKESILPKRNSDKLIARKKDWDPKKYGGFDSPTVAYSVLVVAKVEKGKSKKLKSVKELLGITIMERSSFEKNPIDFLEAKGYKEVKKDLIIKLPKYSLFELENGRKRMLASAGELQKGNELALPSKYVNFLYLASHYEKLKGSPEDNEQKQLFVEQHKHYLDEIIEQISEFSKRVILADANLDKVLSAYNKHRDKPIREQAENIIHLFTLTNLGAPAAFKYFDTTIDRKRYTSTKEVLDATLIHQSITGLYETRIDLSQLGGDGGGGSGGSGGVPWILKKPLELTIKLDLEEQQGTLLNNSILSKKGKEELKQLFEKYSALWQSWENQVGHRRIRPHKIATGTVKPTPQKQYHINPKAKPDIQIVINDLLKQGVLIQKESTMNTPVYPVPKPNGRWRMVLDYRAVNKVTPLIAVQNQHSYGILGSLFKGRYKTTIDLSNGFWAHPIVPEDYWITAFTWQGKQYCWTVLPQGFLNSPGLFNGDVVDLLQGIPNVEVYVDDVYISHDSEKEHLEYLDILFNRLKEAGYIISLKKSNIANSIVDFLGFQITNEGRGLTDTFKEKLENITAPTTLKQLQSILGKLNFARNFIPDFTELIAPLYALIPKSPKNYVPWQIEHSTTLETLITKLNGAEYLQGRKGDKTLIMKVNASYTTGYIRYYNEGEKKPISYVSIVFSKTELKFTELEKLLTTVHKGLLKALDLSMGQNIHVYSPIVSMQNIQKTPQTAKKALASRWLSWLSYLEDPRIRFFYDPQMPALKDLPAVDTGKDNKKHPSNFQHIFYTDGSAITSPTKEGHLNAGMGIVYFINKDGNLQKQQEWSISLGNHTAQFAEIAAFEFALKKCLPLGGNILVVTDSNYVAKAYNEELDVWASNGFVNNRKKPLKHISKWKSVADLKRLRPDVVVTHEPGHQKLDSSPHAYGNNLADQLATQASFKVHAGKRTADGSEFEKRTADGSEFESPKKKAKVE

SEQ ID NO: 6017 - protein, 2090 aa, synthetic construct
MPAAKRVKLDGGDKKYSIGLDIGTNSVGWAVITDEYKVPSKKFKVLGNTDRHSIKKNLIGALLFDSGETAEATRLKRTARRRYTRRKNRICYLQEIFSNEMAKVDDSFFHRLEESFLVEEDKKHERHPIFGNIVDEVAYHEKYPTIYHLRKKLVDSTDKADLRLIYLALAHMIKFRGHFLIEGDLNPDNSDVDKLFIQLVQTYNQLFEENPINASGVDAKAILSARLSKSRRLENLIAQLPGEKKNGLFGNLIALSLGLTPNFKSNFDLAEDAKLQLSKDTYDDDLDNLLAQIGDQYADLFLAAKNLSDAILLSDILRVNTEITKAPLSASMIKRYDEHHQDLTLLKALVRQQLPEKYKEIFFDQSKNGYAGYIDGGASQEEFYKFIKPILEKMDGTEELLVKLNREDLLRKQRTFDNGSIPHQIHLGELHAILRRQEDFYPFLKDNREKIEKILTFRIPYYVGPLARGNSRFAWMTRKSEETITPWNFEEVVDKGASAQSFIERMTNFDKNLPNEKVLPKHSLLYEYFTVYNELTKVKYVTEGMRKPAFLSGEQKKAIVDLLFKTNRKVTVKQLKEDYFKKIECFDSVEISGVEDRFNASLGTYHDLLKIIKDKDFLDNEENEDILEDIVLTLTLFEDREMIEERLKTYAHLFDDKVMKQLKRRRYTGWGRLSRKLINGIRDKQSGKTILDFLKSDGFANRNFMQLIHDDSLTFKEDIQKAQVSGQGDSLHEHIANLAGSPAIKKGILQTVKVVDELVKVMGRHKPENIVIEMARENQTTQKGQKNSRERMKRIEEGIKELGSQILKEHPVENTQLQNEKLYLYYLQNGRDMYVDQELDINRLSDYDVDHIVPQSFLKDDSIDNKVLTRSDKARGKSDNVPSEEVVKKMKNYWRQLLNAKLITQRKFDNLTKAERGGLSELDKAGFIKRQLVETRQITKHVAQILDSRMNTKYDENDKLIREVKVITLKSKLVSDFRKDFQFYKVREINNYHHAHDAYLNAVVGTALIKKYPKLESEFVYGDYKVYDVRKMIAKSEQEIGKATAKYFFYSNIMNFFKTEITLANGEIRKRPLIETNGETGEIVWDKGRDFATVRKVLSMPQVNIVKKTEVQTGGFSKESILPKRNSDKLIARKKDWDPKKYGGFDSPTVAYSVLVVAKVEKGKSKKLKSVKELLGITIMERSSFEKNPIDFLEAKGYKEVKKDLIIKLPKYSLFELENGRKRMLASAGELQKGNELALPSKYVNFLYLASHYEKLKGSPEDNEQKQLFVEQHKHYLDEIIEQISEFSKRVILADANLDKVLSAYNKHRDKPIREQAENIIHLFTLTNLGAPAAFKYFDTTIDRKRYTSTKEVLDATLIHQSITGLYETRIDLSQLGGDGGGGSGGSGGTLQLEEEYRLFEPESTQKQEMDIWLKNFPQAWAETGGMGTAHCQAPVLIQLKATATPISIRQYPMPHEAYQGIKPHIRRMLDQGILKPCQSPWNTPLLPVKKPGTEDYRPVQDLREVNKRVEDIHPTVPNPYNLLSTLPPSHPWYTVLDLKDAFFCLRLHSESQLLFAFEWRDPEIGLSGQLTWTRLPQGFKNSPTLFNEALHSDLADFRVRYPALVLLQYVDDLLLAAATRTECLEGTKALLETLGNKGYRASAKKAQICLQEVTYLGYSLKDGQRWLTKARKEAILSIPVPKNSRQVREFLGKAGYCRLFIPGFAELAAPLYPLTRPGTLFQWGTEQQLAFEDIKKALLSSPALGLPDITKPFELFIDENSGFAKGVLVQKLGPWKRPVAYLSKKLDTVASGWPPCLRMVAAIAILVKDAGKLTLGQPLTILTSHPVEALVRQPPNKWLSNARMTHYQAMLLDAERVHFGPTVSLNPATLLPLPSGGNHHDCLQILAETHGTRPDLTDQPLPDADLTWYTDGSSFIRNGEREAGAAVTTESEVIWAAPLPPGTSAQRAELIALTQALKMAEGKKLTVYTDSRYAFATTHVHGEIYRRRGWLTSEGKEIKNKNEILALLEALFLPKRLSIIHCPGHQKGDSPQAKGNRLADDTAKKAATETHSSLTVLPAGKRTADGSEFEKRTADGSEFESPKKKAKVE

SEQ ID NO: 6018 - protein, 2171 aa, synthetic construct
MPAAKRVKLDGGDKKYSIGLDIGTNSVGWAVITDEYKVPSKKFKVLGNTDRHSIKKNLIGALLFDSGETAEATRLKRTARRRYTRRKNRICYLQEIFSNEMAKVDDSFFHRLEESFLVEEDKKHERHPIFGNIVDEVAYHEKYPTIYHLRKKLVDSTDKADLRLIYLALAHMIKFRGHFLIEGDLNPDNSDVDKLFIQLVQTYNQLFEENPINASGVDAKAILSARLSKSRRLENLIAQLPGEKKNGLFGNLIALSLGLTPNFKSNFDLAEDAKLQLSKDTYDDDLDNLLAQIGDQYADLFLAAKNLSDAILLSDILRVNTEITKAPLSASMIKRYDEHHQDLTLLKALVRQQLPEKYKEIFFDQSKNGYAGYIDGGASQEEFYKFIKPILEKMDGTEELLVKLNREDLLRKQRTFDNGSIPHQIHLGELHAILRRQEDFYPFLKDNREKIEKILTFRIPYYVGPLARGNSRFAWMTRKSEETITPWNFEEVVDKGASAQSFIERMTNFDKNLPNEKVLPKHSLLYEYFTVYNELTKVKYVTEGMRKPAFLSGEQKKAIVDLLFKTNRKVTVKQLKEDYFKKIECFDSVEISGVEDRFNASLGTYHDLLKIIKDKDFLDNEENEDILEDIVLTLTLFEDREMIEERLKTYAHLFDDKVMKQLKRRRYTGWGRLSRKLINGIRDKQSGKTILDFLKSDGFANRNFMQLIHDDSLTFKEDIQKAQVSGQGDSLHEHIANLAGSPAIKKGILQTVKVVDELVKVMGRHKPENIVIEMARENQTTQKGQKNSRERMKRIEEGIKELGSQILKEHPVENTQLQNEKLYLYYLQNGRDMYVDQELDINRLSDYDVDHIVPQSFLKDDSIDNKVLTRSDKARGKSDNVPSEEVVKKMKNYWRQLLNAKLITQRKFDNLTKAERGGLSELDKAGFIKRQLVETRQITKHVAQILDSRMNTKYDENDKLIREVKVITLKSKLVSDFRKDFQFYKVREINNYHHAHDAYLNAVVGTALIKKYPKLESEFVYGDYKVYDVRKMIAKSEQEIGKATAKYFFYSNIMNFFKTEITLANGEIRKRPLIETNGETGEIVWDKGRDFATVRKVLSMPQVNIVKKTEVQTGGFSKESILPKRNSDKLIARKKDWDPKKYGGFDSPTVAYSVLVVAKVEKGKSKKLKSVKELLGITIMERSSFEKNPIDFLEAKGYKEVKKDLIIKLPKYSLFELENGRKRMLASAGELQKGNELALPSKYVNFLYLASHYEKLKGSPEDNEQKQLFVEQHKHYLDEIIEQISEFSKRVILADANLDKVLSAYNKHRDKPIREQAENIIHLFTLTNLGAPAAFKYFDTTIDRKRYTSTKEVLDATLIHQSITGLYETRIDLSQLGGDGGGGSGGSGGMNPLQLLQPLPAEIKGTKLLAHWNSGATITCIPESFLEDEQPIKKTLIKTIHGEKQQNVYYVTFKVKGRKVEAEVIASPYEYILLSPTDVPWLTQQPLQLTILVPLQEYQEKILSKTALPEDQKQQLKTLFVKYDNLWQHWENQVGHRKIRPHNIATGDYPPRPQKQYPINPKAKPSIQIVIDDLLKQGVLTPQNSTMNTPVYPVPKPDGRWRMVLDYREVNKTIPLTAAQNQHSAGILATIVRQKYKTTLDLANGFWAHPITPESYWLTAFTWQGKQYCWTRLPQGFLNSPALFNADVVDLLKEIPNVQVYVDDIYLSHDDPKEHVQQLEKVFQILLQAGYVVSLKKSEIGQKTVEFLGFNITKEGRGLTDTFKTKLLNITPPKDLKQLQSILGLLNFARNFIPNFAELVQPLYNLIAPAKGKYIEWSEENTKQLNMVIEALNTASNLEERLPEQRLVIKVNTSPSAGYVRYYNETGKKPIMYLNYVFSKAELKFSMLEKLLTTMHKALIKAMDLAMGQEILVYSPIVSMTKIQKTPLPERKALPIRWITWMTYLEDPRIQFHYDKTLPELKHIPDVYTSSQSPVKHPSQYEGVFYTDGSAIKSPDPTKSNNAGMGIVHATYKPEYQVLNQWSIPLGNHTAQMAEIAAVEFACKKALKIPGPVLVITDSFYVAESANKELPYWKSNGFVNNKKKPLKHISKWKSIAECLSMKPDITIQHEKGISLQIPVFILKGNALADKLATQGSYVVNAGKRTADGSEFEKRTADGSEFESPKKKAKVE

SEQ ID NO: 6019 - protein, 2213 aa, synthetic construct
MPAAKRVKLDGGDKKYSIGLDIGTNSVGWAVITDEYKVPSKKFKVLGNTDRHSIKKNLIGALLFDSGETAEATRLKRTARRRYTRRKNRICYLQEIFSNEMAKVDDSFFHRLEESFLVEEDKKHERHPIFGNIVDEVAYHEKYPTIYHLRKKLVDSTDKADLRLIYLALAHMIKFRGHFLIEGDLNPDNSDVDKLFIQLVQTYNQLFEENPINASGVDAKAILSARLSKSRRLENLIAQLPGEKKNGLFGNLIALSLGLTPNFKSNFDLAEDAKLQLSKDTYDDDLDNLLAQIGDQYADLFLAAKNLSDAILLSDILRVNTEITKAPLSASMIKRYDEHHQDLTLLKALVRQQLPEKYKEIFFDQSKNGYAGYIDGGASQEEFYKFIKPILEKMDGTEELLVKLNREDLLRKQRTFDNGSIPHQIHLGELHAILRRQEDFYPFLKDNREKIEKILTFRIPYYVGPLARGNSRFAWMTRKSEETITPWNFEEVVDKGASAQSFIERMTNFDKNLPNEKVLPKHSLLYEYFTVYNELTKVKYVTEGMRKPAFLSGEQKKAIVDLLFKTNRKVTVKQLKEDYFKKIECFDSVEISGVEDRFNASLGTYHDLLKIIKDKDFLDNEENEDILEDIVLTLTLFEDREMIEERLKTYAHLFDDKVMKQLKRRRYTGWGRLSRKLINGIRDKQSGKTILDFLKSDGFANRNFMQLIHDDSLTFKEDIQKAQVSGQGDSLHEHIANLAGSPAIKKGILQTVKVVDELVKVMGRHKPENIVIEMARENQTTQKGQKNSRERMKRIEEGIKELGSQILKEHPVENTQLQNEKLYLYYLQNGRDMYVDQELDINRLSDYDVDHIVPQSFLKDDSIDNKVLTRSDKARGKSDNVPSEEVVKKMKNYWRQLLNAKLITQRKFDNLTKAERGGLSELDKAGFIKRQLVETRQITKHVAQILDSRMNTKYDENDKLIREVKVITLKSKLVSDFRKDFQFYKVREINNYHHAHDAYLNAVVGTALIKKYPKLESEFVYGDYKVYDVRKMIAKSEQEIGKATAKYFFYSNIMNFFKTEITLANGEIRKRPLIETNGETGEIVWDKGRDFATVRKVLSMPQVNIVKKTEVQTGGFSKESILPKRNSDKLIARKKDWDPKKYGGFDSPTVAYSVLVVAKVEKGKSKKLKSVKELLGITIMERSSFEKNPIDFLEAKGYKEVKKDLIIKLPKYSLFELENGRKRMLASAGELQKGNELALPSKYVNFLYLASHYEKLKGSPEDNEQKQLFVEQHKHYLDEIIEQISEFSKRVILADANLDKVLSAYNKHRDKPIREQAENIIHLFTLTNLGAPAAFKYFDTTIDRKRYTSTKEVLDATLIHQSITGLYETRIDLSQLGGDGGGGSGGSGGTLGDQGSRGSDPLPEPRVTLTVEGIPTEFLVNTGAEHSVLTKPMGKMGSKRTVVAGATGSKVYPWTTKRLLKIGQKQVTHSFLVIPECPAPLLGRDLLTKLKAQIQFSTEGPQVTWEDRPAMCLVLNLEEEYRLHEKPVPPSIDPSWLQLFPMVWAEKAGMGLANQVPPVVVELKSDASPVAVRQYPMSKEAREGIRPHIQRFLDLGILVPCQSPWNTPLLPVKKPGTNDYRPVQDLREVNKRVQDIHPTVPNPYNLLSSLPPSHTWYSVLDLKDAFFCLKLHPNSQPLFAFEWRDPEKGNTGQLTWTRLPQGFKNSPTLFDEALHRDLASFRALNPQVVMLQYVDDLLVAAPTYRDCKEGTRRLLQELSKLGYRVSAKKAQLCREEVTYLGYLLKGGKRWLTPARKATVMKIPTPTTPRQVREFLGTAGFCRLWIPGFASLAAPLYPLTREKVPFTWTEAHQEAFGRIKEALLSAPALALPDLTKPFALYVDEKEGVARGVLTQTLGPWRRPVAYLSKKLDPVASGWPTCLKAIAAVALLLKDADKLTLGQNVLVIAPHNLESIVRQPPDRWMTNARMTHYQSLLLNERVSFAPPAILNPATLLPVESDDTPIHICSEILAEETGTRPDLRDQPLPGVPAWYTDGSSFIMDGRRQAGAAIVDNKRTVWASNLPEGTSAQKAELIALTQALRLAEGKSINIYTDSRYAFATAHVHGAIYKQRGLLTSAGKDIKNKEEILALLEAIHLPKRVAIIHCPGHQRGTDPVATGNRKADEAAKQAAQSTRILTETTKNAGKRTADGSEFEKRTADGSEFESPKKKAKVE

SEQ ID NO: 6020 - protein, 2122 aa, synthetic construct
MPAAKRVKLDGGDKKYSIGLDIGTNSVGWAVITDEYKVPSKKFKVLGNTDRHSIKKNLIGALLFDSGETAEATRLKRTARRRYTRRKNRICYLQEIFSNEMAKVDDSFFHRLEESFLVEEDKKHERHPIFGNIVDEVAYHEKYPTIYHLRKKLVDSTDKADLRLIYLALAHMIKFRGHFLIEGDLNPDNSDVDKLFIQLVQTYNQLFEENPINASGVDAKAILSARLSKSRRLENLIAQLPGEKKNGLFGNLIALSLGLTPNFKSNFDLAEDAKLQLSKDTYDDDLDNLLAQIGDQYADLFLAAKNLSDAILLSDILRVNTEITKAPLSASMIKRYDEHHQDLTLLKALVRQQLPEKYKEIFFDQSKNGYAGYIDGGASQEEFYKFIKPILEKMDGTEELLVKLNREDLLRKQRTFDNGSIPHQIHLGELHAILRRQEDFYPFLKDNREKIEKILTFRIPYYVGPLARGNSRFAWMTRKSEETITPWNFEEVVDKGASAQSFIERMTNFDKNLPNEKVLPKHSLLYEYFTVYNELTKVKYVTEGMRKPAFLSGEQKKAIVDLLFKTNRKVTVKQLKEDYFKKIECFDSVEISGVEDRFNASLGTYHDLLKIIKDKDFLDNEENEDILEDIVLTLTLFEDREMIEERLKTYAHLFDDKVMKQLKRRRYTGWGRLSRKLINGIRDKQSGKTILDFLKSDGFANRNFMQLIHDDSLTFKEDIQKAQVSGQGDSLHEHIANLAGSPAIKKGILQTVKVVDELVKVMGRHKPENIVIEMARENQTTQKGQKNSRERMKRIEEGIKELGSQILKEHPVENTQLQNEKLYLYYLQNGRDMYVDQELDINRLSDYDVDHIVPQSFLKDDSIDNKVLTRSDKARGKSDNVPSEEVVKKMKNYWRQLLNAKLITQRKFDNLTKAERGGLSELDKAGFIKRQLVETRQITKHVAQILDSRMNTKYDENDKLIREVKVITLKSKLVSDFRKDFQFYKVREINNYHHAHDAYLNAVVGTALIKKYPKLESEFVYGDYKVYDVRKMIAKSEQEIGKATAKYFFYSNIMNFFKTEITLANGEIRKRPLIETNGETGEIVWDKGRDFATVRKVLSMPQVNIVKKTEVQTGGFSKESILPKRNSDKLIARKKDWDPKKYGGFDSPTVAYSVLVVAKVEKGKSKKLKSVKELLGITIMERSSFEKNPIDFLEAKGYKEVKKDLIIKLPKYSLFELENGRKRMLASAGELQKGNELALPSKYVNFLYLASHYEKLKGSPEDNEQKQLFVEQHKHYLDEIIEQISEFSKRVILADANLDKVLSAYNKHRDKPIREQAENIIHLFTLTNLGAPAAFKYFDTTIDRKRYTSTKEVLDATLIHQSITGLYETRIDLSQLGGDGGGGSGGSGGLLGRDLLTKLKAQIQFSTEGPQVTWEDRPAMCLVLNLEEEYRLHEKPVPPSIDPSWLQLFPMVWAEKAGMGLANQVPPVVVELKSDASPVAVRQYPMSKEAREGIRPHIQRFLDLGILVPCQSPWNTPLLPVKKPGTNDYRPVQDLREVNKRVQDIHPTVPNPYNLLSSLPPSHTWYSVLDLKDAFFCLKLHPNSQPLFAFEWRDPEKGNTGQLTWTRLPQGFKNSPTLFDEALHRDLASFRALNPQVVMLQYVDDLLVAAPTYRDCKEGTRRLLQELSKLGYRVSAKKAQLCREEVTYLGYLLKGGKRWLTPARKATVMKIPTPTTPRQVREFLGTAGFCRLWIPGFASLAAPLYPLTREKVPFTWTEAHQEAFGRIKEALLSAPALALPDLTKPFALYVDEKEGVARGVLTQTLGPWRRPVAYLSKKLDPVASGWPTCLKAIAAVALLLKDADKLTLGQNVLVIAPHNLESIVRQPPDRWMTNARMTHYQSLLLNERVSFAPPAILNPATLLPVESDDTPIHICSEILAEETGTRPDLRDQPLPGVPAWYTDGSSFIMDGRRQAGAAIVDNKRTVWASNLPEGTSAQKAELIALTQALRLAEGKSINIYTDSRYAFATAHVHGAIYKQRGLLTSAGKDIKNKEEILALLEAIHLPKRVAIIHCPGHQRGTDPVATGNRKADEAAKQAAQSTRILTETTKNAGKRTADGSEFEKRTADGSEFESPKKKAKVE

SEQ ID NO: 6021 - protein, 2213 aa, synthetic construct
MPAAKRVKLDGGDKKYSIGLDIGTNSVGWAVITDEYKVPSKKFKVLGNTDRHSIKKNLIGALLFDSGETAEATRLKRTARRRYTRRKNRICYLQEIFSNEMAKVDDSFFHRLEESFLVEEDKKHERHPIFGNIVDEVAYHEKYPTIYHLRKKLVDSTDKADLRLIYLALAHMIKFRGHFLIEGDLNPDNSDVDKLFIQLVQTYNQLFEENPINASGVDAKAILSARLSKSRRLENLIAQLPGEKKNGLFGNLIALSLGLTPNFKSNFDLAEDAKLQLSKDTYDDDLDNLLAQIGDQYADLFLAAKNLSDAILLSDILRVNTEITKAPLSASMIKRYDEHHQDLTLLKALVRQQLPEKYKEIFFDQSKNGYAGYIDGGASQEEFYKFIKPILEKMDGTEELLVKLNREDLLRKQRTFDNGSIPHQIHLGELHAILRRQEDFYPFLKDNREKIEKILTFRIPYYVGPLARGNSRFAWMTRKSEETITPWNFEEVVDKGASAQSFIERMTNFDKNLPNEKVLPKHSLLYEYFTVYNELTKVKYVTEGMRKPAFLSGEQKKAIVDLLFKTNRKVTVKQLKEDYFKKIECFDSVEISGVEDRFNASLGTYHDLLKIIKDKDFLDNEENEDILEDIVLTLTLFEDREMIEERLKTYAHLFDDKVMKQLKRRRYTGWGRLSRKLINGIRDKQSGKTILDFLKSDGFANRNFMQLIHDDSLTFKEDIQKAQVSGQGDSLHEHIANLAGSPAIKKGILQTVKVVDELVKVMGRHKPENIVIEMARENQTTQKGQKNSRERMKRIEEGIKELGSQILKEHPVENTQLQNEKLYLYYLQNGRDMYVDQELDINRLSDYDVDHIVPQSFLKDDSIDNKVLTRSDKARGKSDNVPSEEVVKKMKNYWRQLLNAKLITQRKFDNLTKAERGGLSELDKAGFIKRQLVETRQITKHVAQILDSRMNTKYDENDKLIREVKVITLKSKLVSDFRKDFQFYKVREINNYHHAHDAYLNAVVGTALIKKYPKLESEFVYGDYKVYDVRKMIAKSEQEIGKATAKYFFYSNIMNFFKTEITLANGEIRKRPLIETNGETGEIVWDKGRDFATVRKVLSMPQVNIVKKTEVQTGGFSKESILPKRNSDKLIARKKDWDPKKYGGFDSPTVAYSVLVVAKVEKGKSKKLKSVKELLGITIMERSSFEKNPIDFLEAKGYKEVKKDLIIKLPKYSLFELENGRKRMLASAGELQKGNELALPSKYVNFLYLASHYEKLKGSPEDNEQKQLFVEQHKHYLDEIIEQISEFSKRVILADANLDKVLSAYNKHRDKPIREQAENIIHLFTLTNLGAPAAFKYFDTTIDRKRYTSTKEVLDATLIHQSITGLYETRIDLSQLGGDGGGGSGGSGGTLGDQGSRGSDPLPEPRVTLTVEGIPTEFLVNTGAEHSVLTKPMGKMGSKRTVVAGATGSKVYPWTTKRLLKIGQKQVTHSFLVIPECPAPLLGRDLLTKLKAQIQFSTEGPQVTWEDRPAMCLVLNLEEEYRLHEKPVPPSIDPSWLQLFPMVWAEKAGMGLANQVPPVVVELKSDASPVAVRQYPMSKEAREGIRPHIQRFLDLGILVPCQSPWNTPLLPVKKPGTNDYRPVQDLREVNKRVQDIHPTVPNPYNLLSSLPPSHTWYSVLDLKDAFFCLKLHPNSQPLFAFEWRDPEKGNTGQLTWTRLPQGFKNSPTLFNEALHRDLASFRALNPQVVMLQYVDDLLVAAPTYRDCKEGTRRLLQELSKLGYRVSAKKAQLCREEVTYLGYLLKGGKRWLTPARKATVMKIPTPTTPRQVREFLGTAGFCRLWIPGFASLAAPLYPLTRPKVPFTWTEAHQEAFGRIKEALLSAPALALPDLTKPFALYVDEKEGVARGVLTQTLGPWRRPVAYLSKKLDPVASGWPTCLKAIAAVALLLKDADKLTLGQNVLVIAPHNLESIVRQPPDRWMTNARMTHYQSLLLNERVSFAPPAILNPATLLPVESDDTPIHICSEILAEETGTRPDLRDQPLPGVPAWYTDGSSFIMDGRRQAGAAIVDNKRTVWASNLPEGTSAQKAELIALTQALRLAEGKSINIYTDSRYAFATAHVHGAIYKQRGWLTSAGKDIKNKEEILALLEAIHLPKRVAIIHCPGHQRGTDPVATGNRKADEAAKQAAQSTRILTETTKNAGKRTADGSEFEKRTADGSEFESPKKKAKVE

SEQ ID NO: 6022 - protein, 2091 aa, synthetic construct
MPAAKRVKLDGGDKKYSIGLDIGTNSVGWAVITDEYKVPSKKFKVLGNTDRHSIKKNLIGALLFDSGETAEATRLKRTARRRYTRRKNRICYLQEIFSNEMAKVDDSFFHRLEESFLVEEDKKHERHPIFGNIVDEVAYHEKYPTIYHLRKKLVDSTDKADLRLIYLALAHMIKFRGHFLIEGDLNPDNSDVDKLFIQLVQTYNQLFEENPINASGVDAKAILSARLSKSRRLENLIAQLPGEKKNGLFGNLIALSLGLTPNFKSNFDLAEDAKLQLSKDTYDDDLDNLLAQIGDQYADLFLAAKNLSDAILLSDILRVNTEITKAPLSASMIKRYDEHHQDLTLLKALVRQQLPEKYKEIFFDQSKNGYAGYIDGGASQEEFYKFIKPILEKMDGTEELLVKLNREDLLRKQRTFDNGSIPHQIHLGELHAILRRQEDFYPFLKDNREKIEKILTFRIPYYVGPLARGNSRFAWMTRKSEETITPWNFEEVVDKGASAQSFIERMTNFDKNLPNEKVLPKHSLLYEYFTVYNELTKVKYVTEGMRKPAFLSGEQKKAIVDLLFKTNRKVTVKQLKEDYFKKIECFDSVEISGVEDRFNASLGTYHDLLKIIKDKDFLDNEENEDILEDIVLTLTLFEDREMIEERLKTYAHLFDDKVMKQLKRRRYTGWGRLSRKLINGIRDKQSGKTILDFLKSDGFANRNFMQLIHDDSLTFKEDIQKAQVSGQGDSLHEHIANLAGSPAIKKGILQTVKVVDELVKVMGRHKPENIVIEMARENQTTQKGQKNSRERMKRIEEGIKELGSQILKEHPVENTQLQNEKLYLYYLQNGRDMYVDQELDINRLSDYDVDHIVPQSFLKDDSIDNKVLTRSDKARGKSDNVPSEEVVKKMKNYWRQLLNAKLITQRKFDNLTKAERGGLSELDKAGFIKRQLVETRQITKHVAQILDSRMNTKYDENDKLIREVKVITLKSKLVSDFRKDFQFYKVREINNYHHAHDAYLNAVVGTALIKKYPKLESEFVYGDYKVYDVRKMIAKSEQEIGKATAKYFFYSNIMNFFKTEITLANGEIRKRPLIETNGETGEIVWDKGRDFATVRKVLSMPQVNIVKKTEVQTGGFSKESILPKRNSDKLIARKKDWDPKKYGGFDSPTVAYSVLVVAKVEKGKSKKLKSVKELLGITIMERSSFEKNPIDFLEAKGYKEVKKDLIIKLPKYSLFELENGRKRMLASAGELQKGNELALPSKYVNFLYLASHYEKLKGSPEDNEQKQLFVEQHKHYLDEIIEQISEFSKRVILADANLDKVLSAYNKHRDKPIREQAENIIHLFTLTNLGAPAAFKYFDTTIDRKRYTSTKEVLDATLIHQSITGLYETRIDLSQLGGDGGGGSGGSGGLGIEDEYRLHETSTEPDVSLGSTWLSDFPQAWAETGGMGLAVRQAPLIIPLKATSTPVSIQQYPMSHEARLGIKPHIQRLLDQGILVPCQSPWNTPLLPVKKPGTNDYRPVQDLREVNKRVEDIHPTVPNPYNLLSGLPPSHQWYTVLDLKDAFFCLRLHPTSQPLFAFEWRDPGMGISGQLTWTRLPQGFKNSPTLFNEALHRDLADFRIQHPDLILLQYVDDILLAATSELDCQQGTRALLQTLGDLGYRASAKKAQICQKQVKYLGYLLREGQRWLTEARKETVMGQPVPKTPRQLREFLGKAGFCRLFIPGFAEMAAPLYPLTKPGTLFSWGPDQQKAYQEIKQALLTAPALGLPDLTKPFELFVDEKQGYAKGVLTQKLGPWRRPVAYLSKKLDPVAAGWPPCLRMVAAIAVLTKDAGKLTMGQPLVILAPHAVEALVKQPPDRWLSNARMTHYQAMLLDTDRVQFGPVVALNPATLLPLPEEGAPHDCLEILAETHGTRPDLTDQPIPDADHTWYTDGSSFLQEGQRKAGAAVTTETEVIWAGALPAGTSAQRAELIALTQALKMAEGKRLNVYTDSRYAFATAHIHGEIYRRRGWLTSEGREIKNKSEILALLKALFLPKRLSIIHCLGHQKGDSAEARGNRLADQAAREAAIKTPPDTSTLLIAGKRTADGSEFEKRTADGSEFESPKKKAKVE

SEQ ID NO: 6023 - protein, 2091 aa, synthetic construct
MPAAKRVKLDGGDKKYSIGLDIGTNSVGWAVITDEYKVPSKKFKVLGNTDRHSIKKNLIGALLFDSGETAEATRLKRTARRRYTRRKNRICYLQEIFSNEMAKVDDSFFHRLEESFLVEEDKKHERHPIFGNIVDEVAYHEKYPTIYHLRKKLVDSTDKADLRLIYLALAHMIKFRGHFLIEGDLNPDNSDVDKLFIQLVQTYNQLFEENPINASGVDAKAILSARLSKSRRLENLIAQLPGEKKNGLFGNLIALSLGLTPNFKSNFDLAEDAKLQLSKDTYDDDLDNLLAQIGDQYADLFLAAKNLSDAILLSDILRVNTEITKAPLSASMIKRYDEHHQDLTLLKALVRQQLPEKYKEIFFDQSKNGYAGYIDGGASQEEFYKFIKPILEKMDGTEELLVKLNREDLLRKQRTFDNGSIPHQIHLGELHAILRRQEDFYPFLKDNREKIEKILTFRIPYYVGPLARGNSRFAWMTRKSEETITPWNFEEVVDKGASAQSFIERMTNFDKNLPNEKVLPKHSLLYEYFTVYNELTKVKYVTEGMRKPAFLSGEQKKAIVDLLFKTNRKVTVKQLKEDYFKKIECFDSVEISGVEDRFNASLGTYHDLLKIIKDKDFLDNEENEDILEDIVLTLTLFEDREMIEERLKTYAHLFDDKVMKQLKRRRYTGWGRLSRKLINGIRDKQSGKTILDFLKSDGFANRNFMQLIHDDSLTFKEDIQKAQVSGQGDSLHEHIANLAGSPAIKKGILQTVKVVDELVKVMGRHKPENIVIEMARENQTTQKGQKNSRERMKRIEEGIKELGSQILKEHPVENTQLQNEKLYLYYLQNGRDMYVDQELDINRLSDYDVDHIVPQSFLKDDSIDNKVLTRSDKARGKSDNVPSEEVVKKMKNYWRQLLNAKLITQRKFDNLTKAERGGLSELDKAGFIKRQLVETRQITKHVAQILDSRMNTKYDENDKLIREVKVITLKSKLVSDFRKDFQFYKVREINNYHHAHDAYLNAVVGTALIKKYPKLESEFVYGDYKVYDVRKMIAKSEQEIGKATAKYFFYSNIMNFFKTEITLANGEIRKRPLIETNGETGEIVWDKGRDFATVRKVLSMPQVNIVKKTEVQTGGFSKESILPKRNSDKLIARKKDWDPKKYGGFDSPTVAYSVLVVAKVEKGKSKKLKSVKELLGITIMERSSFEKNPIDFLEAKGYKEVKKDLIIKLPKYSLFELENGRKRMLASAGELQKGNELALPSKYVNFLYLASHYEKLKGSPEDNEQKQLFVEQHKHYLDEIIEQISEFSKRVILADANLDKVLSAYNKHRDKPIREQAENIIHLFTLTNLGAPAAFKYFDTTIDRKRYTSTKEVLDATLIHQSITGLYETRIDLSQLGGDGGGGSGGSGGTLGIEDEYRLHETSTEPDVSLGSTWLSDFPQAWAETGGMGLAVRQAPLIIPLKATSTPVSIQQYPMSHEARLGIKPHIQRLLDQGILVPCQSPWNTPLLPVKKPGTNDYRPVQDLREVNKRVEDIHPTVPNPYNLLSGLPPSHQWYTVLDLKDAFFCLRLHPTSQPLFAFEWRDPGMGISGQLTWTRLPQGFKNSPTLFNEALHRDLADFRIQHPDLILLQYVDDILLAATSELDCQQGTRALLQTLGDLGYRASAKKAQICQKQVKYLGYLLREGQRWLTEARKETVMGQPVPKTPRQLREFLGTAGFCRLWIPGFAEMAAPLYPLTKPGTLFSWGPDQQKAYQEIKQALLTAPALGLPDLTKPFELFVDEKQGYAKGVLTQKLGPWRRPVAYLSKKLDPVAAGWPPCLRMVAAIAVLTKDAGKLTMGQPLVILAPHAVEALVKQPPDRWLSNARMTHYQAMLLDTDRVQFGPVVALNPATLLPLPEEGAPHDCLEILAETHGTRPDLTDQPIPDADHTWYTDGSSFLQEGQRKAGAAVTTETEVIWAGALPAGTSAQRAELIALTQALKMAEGKRLNVYTDSRYAFATAHIHGEIYRRRGWLTSEGREIKNKSEILALLKALFLPKRLSIIHCLGHQKGDSAEARGNRLADQAAREAAIKTPPDTSTLLAGKRTADGSEFEKRTADGSEFESPKKKAKVE

SEQ ID NO: 6024 - protein, 2091 aa, synthetic construct
MPAAKRVKLDGGDKKYSIGLDIGTNSVGWAVITDEYKVPSKKFKVLGNTDRHSIKKNLIGALLFDSGETAEATRLKRTARRRYTRRKNRICYLQEIFSNEMAKVDDSFFHRLEESFLVEEDKKHERHPIFGNIVDEVAYHEKYPTIYHLRKKLVDSTDKADLRLIYLALAHMIKFRGHFLIEGDLNPDNSDVDKLFIQLVQTYNQLFEENPINASGVDAKAILSARLSKSRRLENLIAQLPGEKKNGLFGNLIALSLGLTPNFKSNFDLAEDAKLQLSKDTYDDDLDNLLAQIGDQYADLFLAAKNLSDAILLSDILRVNTEITKAPLSASMIKRYDEHHQDLTLLKALVRQQLPEKYKEIFFDQSKNGYAGYIDGGASQEEFYKFIKPILEKMDGTEELLVKLNREDLLRKQRTFDNGSIPHQIHLGELHAILRRQEDFYPFLKDNREKIEKILTFRIPYYVGPLARGNSRFAWMTRKSEETITPWNFEEVVDKGASAQSFIERMTNFDKNLPNEKVLPKHSLLYEYFTVYNELTKVKYVTEGMRKPAFLSGEQKKAIVDLLFKTNRKVTVKQLKEDYFKKIECFDSVEISGVEDRFNASLGTYHDLLKIIKDKDFLDNEENEDILEDIVLTLTLFEDREMIEERLKTYAHLFDDKVMKQLKRRRYTGWGRLSRKLINGIRDKQSGKTILDFLKSDGFANRNFMQLIHDDSLTFKEDIQKAQVSGQGDSLHEHIANLAGSPAIKKGILQTVKVVDELVKVMGRHKPENIVIEMARENQTTQKGQKNSRERMKRIEEGIKELGSQILKEHPVENTQLQNEKLYLYYLQNGRDMYVDQELDINRLSDYDVDHIVPQSFLKDDSIDNKVLTRSDKARGKSDNVPSEEVVKKMKNYWRQLLNAKLITQRKFDNLTKAERGGLSELDKAGFIKRQLVETRQITKHVAQILDSRMNTKYDENDKLIREVKVITLKSKLVSDFRKDFQFYKVREINNYHHAHDAYLNAVVGTALIKKYPKLESEFVYGDYKVYDVRKMIAKSEQEIGKATAKYFFYSNIMNFFKTEITLANGEIRKRPLIETNGETGEIVWDKGRDFATVRKVLSMPQVNIVKKTEVQTGGFSKESILPKRNSDKLIARKKDWDPKKYGGFDSPTVAYSVLVVAKVEKGKSKKLKSVKELLGITIMERSSFEKNPIDFLEAKGYKEVKKDLIIKLPKYSLFELENGRKRMLASAGELQKGNELALPSKYVNFLYLASHYEKLKGSPEDNEQKQLFVEQHKHYLDEIIEQISEFSKRVILADANLDKVLSAYNKHRDKPIREQAENIIHLFTLTNLGAPAAFKYFDTTIDRKRYTSTKEVLDATLIHQSITGLYETRIDLSQLGGDGGGGSGGSGGTLNIEDEYRLHETSKEPDVSLGSTWLSDFPQAWAETGGMGLAVRQAPLIIPLKATSTPVSIKQYPMSQEARLGIKPHIQRLLDQGILVPCQSPWNTPLLPVKKPGTNDYRPVQDLREVNKRVEDIHPTVPNPYNLLSGLPPSHQWYTVLDLKDAFFCLRLHPTSQPLFAFEWRDPEMGISGQLTWTRLPQGFKNSPTLFNEALHRDLAGFRIQHPDLILLQYVDDLLLAATSELDCQQGTRALLQTLGDLGYRASAKKAQICQKQVKYLGYLLKEGQRWLTEARKETVMGQPIPKTPRQLREFLGTAGFCRLWIPGFAEMAAPLYPLTKPGTLFNWGPDQQKAFQEIKQALLTAPALGLPDLTKPFELFVDEKQGYAKGVLTQKLGPWRRPVAYLSKKLDPVAAGWPPCLRMVAAIAVLTKDAGKLTMGQPLVILAPHAVEALVKQPPDRWLSNARMTHYQALLLDTDRVQFGPVVALNPATLLPLPEEGLQHDCLDILAEAHGTRSDLMDQPLPDADHTWYTDGSSFLQEGQRKAGAAVTTETEVIWARALPAGTSAQRAELIALTQALKMAEGKKLNVYTDSRYAFATAHIHGEIYRRRGWLTSEGKEIKNKDEILALLKALFLPKRLSIIHCPGHQKGNSAEARGNRMADQAAREVATRETPETSTLLAGKRTADGSEFEKRTADGSEFESPKKKAKVE

SEQ ID NO: 6025 - protein, 2091 aa, synthetic construct
MPAAKRVKLDGGDKKYSIGLDIGTNSVGWAVITDEYKVPSKKFKVLGNTDRHSIKKNLIGALLFDSGETAEATRLKRTARRRYTRRKNRICYLQEIFSNEMAKVDDSFFHRLEESFLVEEDKKHERHPIFGNIVDEVAYHEKYPTIYHLRKKLVDSTDKADLRLIYLALAHMIKFRGHFLIEGDLNPDNSDVDKLFIQLVQTYNQLFEENPINASGVDAKAILSARLSKSRRLENLIAQLPGEKKNGLFGNLIALSLGLTPNFKSNFDLAEDAKLQLSKDTYDDDLDNLLAQIGDQYADLFLAAKNLSDAILLSDILRVNTEITKAPLSASMIKRYDEHHQDLTLLKALVRQQLPEKYKEIFFDQSKNGYAGYIDGGASQEEFYKFIKPILEKMDGTEELLVKLNREDLLRKQRTFDNGSIPHQIHLGELHAILRRQEDFYPFLKDNREKIEKILTFRIPYYVGPLARGNSRFAWMTRKSEETITPWNFEEVVDKGASAQSFIERMTNFDKNLPNEKVLPKHSLLYEYFTVYNELTKVKYVTEGMRKPAFLSGEQKKAIVDLLFKTNRKVTVKQLKEDYFKKIECFDSVEISGVEDRFNASLGTYHDLLKIIKDKDFLDNEENEDILEDIVLTLTLFEDREMIEERLKTYAHLFDDKVMKQLKRRRYTGWGRLSRKLINGIRDKQSGKTILDFLKSDGFANRNFMQLIHDDSLTFKEDIQKAQVSGQGDSLHEHIANLAGSPAIKKGILQTVKVVDELVKVMGRHKPENIVIEMARENQTTQKGQKNSRERMKRIEEGIKELGSQILKEHPVENTQLQNEKLYLYYLQNGRDMYVDQELDINRLSDYDVDHIVPQSFLKDDSIDNKVLTRSDKARGKSDNVPSEEVVKKMKNYWRQLLNAKLITQRKFDNLTKAERGGLSELDKAGFIKRQLVETRQITKHVAQILDSRMNTKYDENDKLIREVKVITLKSKLVSDFRKDFQFYKVREINNYHHAHDAYLNAVVGTALIKKYPKLESEFVYGDYKVYDVRKMIAKSEQEIGKATAKYFFYSNIMNFFKTEITLANGEIRKRPLIETNGETGEIVWDKGRDFATVRKVLSMPQVNIVKKTEVQTGGFSKESILPKRNSDKLIARKKDWDPKKYGGFDSPTVAYSVLVVAKVEKGKSKKLKSVKELLGITIMERSSFEKNPIDFLEAKGYKEVKKDLIIKLPKYSLFELENGRKRMLASAGELQKGNELALPSKYVNFLYLASHYEKLKGSPEDNEQKQLFVEQHKHYLDEIIEQISEFSKRVILADANLDKVLSAYNKHRDKPIREQAENIIHLFTLTNLGAPAAFKYFDTTIDRKRYTSTKEVLDATLIHQSITGLYETRIDLSQLGGDGGGGSGGSGGTLNIEDEHRLHETSKEPDVSLGSTWLSDFPQAWAETGGMGLAVRQAPLIIPLKATSTPVSIKQYPMSQEARLGIKPHIQRLLDQGILVPCQSPWNTPLLPVKKPGTNDYRPVQDLREVNKRVEDIHPTVPNPYNLLSGLPPSHQWYTVLDLKDAFFCLRLHPTSQPLFAFEWRDPEMGISGQLTWTRLPQGFKNSPTLFNEALHRDLADFRIQHPDLILLQYVDDLLLAATSELDCQQGTRALLQTLGNLGYRASAKKAQICQKQVKYLGYLLKEGQRWLTEARKETVMGQPTPKTPRQLREFLGTAGFCRLWIPGFAEMAAPLYPLTKPGTLFNWGPDQQKAYQEIKQALLTAPALGLPDLTKPFELFVDEKQGYAKGVLTQKLGPWRRPVAYLSKKLDPVAAGWPPCLRMVAAIAVLTKDAGKLTMGQPLVILAPHAVEALVKQPPDRWLSNARMTHYQALLLDTDRVQFGPVVALNPATLLPLPEEGLQHNCLDILAEAHGTRPDLTDQPLPDADHTWYTDGSSLLQEGQRKAGAAVTTETEVIWAKALPAGTSAQRAELIALTQALKMAEGKKLNVYTDSRYAFATAHIHGEIYRRRGWLTSEGKEIKNKDEILALLKALFLPKRLSIIHCPGHQKGHSAEARGNRMADQAARKAAITETPDTSTLLAGKRTADGSEFEKRTADGSEFESPKKKAKVE

SEQ ID NO: 6026 - protein, 2085 aa, synthetic construct
MPAAKRVKLDGGDKKYSIGLDIGTNSVGWAVITDEYKVPSKKFKVLGNTDRHSIKKNLIGALLFDSGETAEATRLKRTARRRYTRRKNRICYLQEIFSNEMAKVDDSFFHRLEESFLVEEDKKHERHPIFGNIVDEVAYHEKYPTIYHLRKKLVDSTDKADLRLIYLALAHMIKFRGHFLIEGDLNPDNSDVDKLFIQLVQTYNQLFEENPINASGVDAKAILSARLSKSRRLENLIAQLPGEKKNGLFGNLIALSLGLTPNFKSNFDLAEDAKLQLSKDTYDDDLDNLLAQIGDQYADLFLAAKNLSDAILLSDILRVNTEITKAPLSASMIKRYDEHHQDLTLLKALVRQQLPEKYKEIFFDQSKNGYAGYIDGGASQEEFYKFIKPILEKMDGTEELLVKLNREDLLRKQRTFDNGSIPHQIHLGELHAILRRQEDFYPFLKDNREKIEKILTFRIPYYVGPLARGNSRFAWMTRKSEETITPWNFEEVVDKGASAQSFIERMTNFDKNLPNEKVLPKHSLLYEYFTVYNELTKVKYVTEGMRKPAFLSGEQKKAIVDLLFKTNRKVTVKQLKEDYFKKIECFDSVEISGVEDRFNASLGTYHDLLKIIKDKDFLDNEENEDILEDIVLTLTLFEDREMIEERLKTYAHLFDDKVMKQLKRRRYTGWGRLSRKLINGIRDKQSGKTILDFLKSDGFANRNFMQLIHDDSLTFKEDIQKAQVSGQGDSLHEHIANLAGSPAIKKGILQTVKVVDELVKVMGRHKPENIVIEMARENQTTQKGQKNSRERMKRIEEGIKELGSQILKEHPVENTQLQNEKLYLYYLQNGRDMYVDQELDINRLSDYDVDHIVPQSFLKDDSIDNKVLTRSDKARGKSDNVPSEEVVKKMKNYWRQLLNAKLITQRKFDNLTKAERGGLSELDKAGFIKRQLVETRQITKHVAQILDSRMNTKYDENDKLIREVKVITLKSKLVSDFRKDFQFYKVREINNYHHAHDAYLNAVVGTALIKKYPKLESEFVYGDYKVYDVRKMIAKSEQEIGKATAKYFFYSNIMNFFKTEITLANGEIRKRPLIETNGETGEIVWDKGRDFATVRKVLSMPQVNIVKKTEVQTGGFSKESILPKRNSDKLIARKKDWDPKKYGGFDSPTVAYSVLVVAKVEKGKSKKLKSVKELLGITIMERSSFEKNPIDFLEAKGYKEVKKDLIIKLPKYSLFELENGRKRMLASAGELQKGNELALPSKYVNFLYLASHYEKLKGSPEDNEQKQLFVEQHKHYLDEIIEQISEFSKRVILADANLDKVLSAYNKHRDKPIREQAENIIHLFTLTNLGAPAAFKYFDTTIDRKRYTSTKEVLDATLIHQSITGLYETRIDLSQLGGDGGGGSGGSGGTLQLDDEYRLYSPLVKPDQNIQFWLEQFPQAWAETAGMGLAKQVPPQVIQLKASATPVSVRQYPLSKEAQEGIRPHVQRLIQQGILVPVQSPWNTPLLPVRKPGTNDYRPVQDLREVNKRVQDIHPTVPNPYNLLCALPPQRSWYTVLDLKDAFFCLRLHPTSQPLFAFEWRDPGTGRTGQLTWTRLPQGFKNSPTIFDEALHRDLANFRIQHPQVTLLQYVDDLLLAGATKQDCLEGTKALLLELSDLGYRASAKKAQICRREVTYLGYSLRDGQRWLTEARKKTVVQIPAPTTAKQVREFLGTAGFCRLWIPGFATLAAPLYPLTKEKGEFSWAPEHQKAFDAIKKALLSAPALALPDVTKPFTLYVDERKGVARGVLTQTLGPWRRPVAYLSKKLDPVASGWPVCLKAIAAVAILVKDADKLTLGQNITVIAPHALENIVRQPPDRWMTNARMTHYQSLLLTERVTFAPPAALNPATLLPEETDEPVTHDCHQLLIEETGVRKDLTDIPLTGEVLTWFTDGSSYVVEGKRMAGAAVVDGTRTIWASSLPEGTSAQKAELMALTQALRLAEGKSINIYTDSRYAFATAHVHGAIYKQRGLLTSAGREIKNKEEILSLLEALHLPKRLAIIHCPGHQKAKDPISRGNQMADRVAKQAAQGVNLLAGKRTADGSEFEKRTADGSEFESPKKKAKVE

SEQ ID NO: 6027 - protein, 2171 aa, synthetic construct
MPAAKRVKLDGGDKKYSIGLDIGTNSVGWAVITDEYKVPSKKFKVLGNTDRHSIKKNLIGALLFDSGETAEATRLKRTARRRYTRRKNRICYLQEIFSNEMAKVDDSFFHRLEESFLVEEDKKHERHPIFGNIVDEVAYHEKYPTIYHLRKKLVDSTDKADLRLIYLALAHMIKFRGHFLIEGDLNPDNSDVDKLFIQLVQTYNQLFEENPINASGVDAKAILSARLSKSRRLENLIAQLPGEKKNGLFGNLIALSLGLTPNFKSNFDLAEDAKLQLSKDTYDDDLDNLLAQIGDQYADLFLAAKNLSDAILLSDILRVNTEITKAPLSASMIKRYDEHHQDLTLLKALVRQQLPEKYKEIFFDQSKNGYAGYIDGGASQEEFYKFIKPILEKMDGTEELLVKLNREDLLRKQRTFDNGSIPHQIHLGELHAILRRQEDFYPFLKDNREKIEKILTFRIPYYVGPLARGNSRFAWMTRKSEETITPWNFEEVVDKGASAQSFIERMTNFDKNLPNEKVLPKHSLLYEYFTVYNELTKVKYVTEGMRKPAFLSGEQKKAIVDLLFKTNRKVTVKQLKEDYFKKIECFDSVEISGVEDRFNASLGTYHDLLKIIKDKDFLDNEENEDILEDIVLTLTLFEDREMIEERLKTYAHLFDDKVMKQLKRRRYTGWGRLSRKLINGIRDKQSGKTILDFLKSDGFANRNFMQLIHDDSLTFKEDIQKAQVSGQGDSLHEHIANLAGSPAIKKGILQTVKVVDELVKVMGRHKPENIVIEMARENQTTQKGQKNSRERMKRIEEGIKELGSQILKEHPVENTQLQNEKLYLYYLQNGRDMYVDQELDINRLSDYDVDHIVPQSFLKDDSIDNKVLTRSDKARGKSDNVPSEEVVKKMKNYWRQLLNAKLITQRKFDNLTKAERGGLSELDKAGFIKRQLVETRQITKHVAQILDSRMNTKYDENDKLIREVKVITLKSKLVSDFRKDFQFYKVREINNYHHAHDAYLNAVVGTALIKKYPKLESEFVYGDYKVYDVRKMIAKSEQEIGKATAKYFFYSNIMNFFKTEITLANGEIRKRPLIETNGETGEIVWDKGRDFATVRKVLSMPQVNIVKKTEVQTGGFSKESILPKRNSDKLIARKKDWDPKKYGGFDSPTVAYSVLVVAKVEKGKSKKLKSVKELLGITIMERSSFEKNPIDFLEAKGYKEVKKDLIIKLPKYSLFELENGRKRMLASAGELQKGNELALPSKYVNFLYLASHYEKLKGSPEDNEQKQLFVEQHKHYLDEIIEQISEFSKRVILADANLDKVLSAYNKHRDKPIREQAENIIHLFTLTNLGAPAAFKYFDTTIDRKRYTSTKEVLDATLIHQSITGLYETRIDLSQLGGDGGGGSGGSGGMDPLQLLQPLEAEIKGTKLKAHWNSGATITCVPQAFLEEEVPIKNIWIKTIHGEKEQPVYYLTFKIQGRKVEAEVISSPYDYILVSPSDIPWLMKKPLQLTTLVPLQEYEERLLKQTMLTGSYKEKLQSLFLKYDALWQHWENQVGHRRIKPHHIATGTVNPRPQKQYPINPKAKASIQTVINDLLKQGVLIQQNSIMNTPVYPVPKPDGKWRMVLDYREVNKTIPLIAAQNQHSAGILSSIFRGKYKTTLDLSNGFWAHSITPESYWLTAFTWLGQQYCWTRLPQGFLNSPALFNADVVDLLKEVPNVQVYVDDIYISHDDPREHLEQLEKVFSLLLNAGYVVSLKKSEIAQHEVEFLGFNITKEGRGLTETFKQKLLNITPPRDLKQLQSILGLLNFARNFIPNFSELVKPLYNIIATAPGKYITWTTDNSQQLQNIISMLNSAENLEERNPEVRLIMKVNTSPSAGYIRFYNEFAKRPIMYLNYVYTKAEVKFTNTEKLLTTIHKGLIKALDLGMGQEILVYSPIVSMTKIQKTPLPERKALPIRWITWMSYLEDPRIQFHYDKTLPELQQVPTVTDDIIAKIKHPSEFSMVFYTDGSAIKHPNVNKSHNAGMGIAQVQFKPEFTVINTWSIPLGDHTAQLAEVAAVEFACKKALKIDGPVLIVTDSFYVAESVNKELPYWQSNGFFNNKKKPLKHVSKWKSIADCIQLKPDIIIIHEKGHQPTASTFHTEGNNLADKLATQGSYVVNAGKRTADGSEFEKRTADGSEFESPKKKAKVE

SEQ ID NO: 6028 - protein, 2091 aa, synthetic construct
MPAAKRVKLDGGDKKYSIGLDIGTNSVGWAVITDEYKVPSKKFKVLGNTDRHSIKKNLIGALLFDSGETAEATRLKRTARRRYTRRKNRICYLQEIFSNEMAKVDDSFFHRLEESFLVEEDKKHERHPIFGNIVDEVAYHEKYPTIYHLRKKLVDSTDKADLRLIYLALAHMIKFRGHFLIEGDLNPDNSDVDKLFIQLVQTYNQLFEENPINASGVDAKAILSARLSKSRRLENLIAQLPGEKKNGLFGNLIALSLGLTPNFKSNFDLAEDAKLQLSKDTYDDDLDNLLAQIGDQYADLFLAAKNLSDAILLSDILRVNTEITKAPLSASMIKRYDEHHQDLTLLKALVRQQLPEKYKEIFFDQSKNGYAGYIDGGASQEEFYKFIKPILEKMDGTEELLVKLNREDLLRKQRTFDNGSIPHQIHLGELHAILRRQEDFYPFLKDNREKIEKILTFRIPYYVGPLARGNSRFAWMTRKSEETITPWNFEEVVDKGASAQSFIERMTNFDKNLPNEKVLPKHSLLYEYFTVYNELTKVKYVTEGMRKPAFLSGEQKKAIVDLLFKTNRKVTVKQLKEDYFKKIECFDSVEISGVEDRFNASLGTYHDLLKIIKDKDFLDNEENEDILEDIVLTLTLFEDREMIEERLKTYAHLFDDKVMKQLKRRRYTGWGRLSRKLINGIRDKQSGKTILDFLKSDGFANRNFMQLIHDDSLTFKEDIQKAQVSGQGDSLHEHIANLAGSPAIKKGILQTVKVVDELVKVMGRHKPENIVIEMARENQTTQKGQKNSRERMKRIEEGIKELGSQILKEHPVENTQLQNEKLYLYYLQNGRDMYVDQELDINRLSDYDVDHIVPQSFLKDDSIDNKVLTRSDKARGKSDNVPSEEVVKKMKNYWRQLLNAKLITQRKFDNLTKAERGGLSELDKAGFIKRQLVETRQITKHVAQILDSRMNTKYDENDKLIREVKVITLKSKLVSDFRKDFQFYKVREINNYHHAHDAYLNAVVGTALIKKYPKLESEFVYGDYKVYDVRKMIAKSEQEIGKATAKYFFYSNIMNFFKTEITLANGEIRKRPLIETNGETGEIVWDKGRDFATVRKVLSMPQVNIVKKTEVQTGGFSKESILPKRNSDKLIARKKDWDPKKYGGFDSPTVAYSVLVVAKVEKGKSKKLKSVKELLGITIMERSSFEKNPIDFLEAKGYKEVKKDLIIKLPKYSLFELENGRKRMLASAGELQKGNELALPSKYVNFLYLASHYEKLKGSPEDNEQKQLFVEQHKHYLDEIIEQISEFSKRVILADANLDKVLSAYNKHRDKPIREQAENIIHLFTLTNLGAPAAFKYFDTTIDRKRYTSTKEVLDATLIHQSITGLYETRIDLSQLGGDGGGGSGGSGGTLNIEDEYRLHETSKEPDVPLGSTWLSDFPQAWAETGGMGLAVRQAPLIIPLKATSTPVSIKQYPMSQEARLGIKPHIQRLLDQGILVPCQSPWNTPLLPVKKPGTNDYRPVQDLREVNKRVEDIHPTVPNPYNLLSGLPPSHQWYTVLDLKDAFFCLRLHPTSQPLFAFEWRDPEMGISGQLTWTRLPQGFKNSPTLFNEALHRDLADFRIQHPDLILLQYVDDLLLAATSEQDCQRGTRALLQTLGNLGYRASAKKAQICQKQVKYLGYLLKEGQRWLTEARKETVMGQPTPKTPRQLREFLGTAGFCRLWIPGFAEMAAPLYPLTKPGTLFNWGPDQQKAYQEIKQALLTAPALGLPDLTKPFELFVDEKQGYAKGVLTQKLGPWRRPVAYLSKKLDPVAAGWPPCLRMVAAIAVLTKDAGKLTMGQPLVILAPHAVEALVKQPPDRWLSNARMTHYQAMLLDTDRVQFGPVVALNPATLLPLPEKEAPHDCLEILAETHGTRPDLTDQPIPDADYTWYTDGSSFLQEGQRRAGAAVTTETEVIWARALPAGTSAQRAELIALTQALKMAEGKKLNVYTDSRYAFATAHVHGEIYRRRGWLTSEGREIKNKNEILALLKALFLPKRLSIIHCPGHQKGNSAEARGNRMADQAAREAAMKAVLETSTLLAGKRTADGSEFEKRTADGSEFESPKKKAKVE

SEQ ID NO: 6029 - protein, 2096 aa, synthetic construct
MPAAKRVKLDGGDKKYSIGLDIGTNSVGWAVITDEYKVPSKKFKVLGNTDRHSIKKNLIGALLFDSGETAEATRLKRTARRRYTRRKNRICYLQEIFSNEMAKVDDSFFHRLEESFLVEEDKKHERHPIFGNIVDEVAYHEKYPTIYHLRKKLVDSTDKADLRLIYLALAHMIKFRGHFLIEGDLNPDNSDVDKLFIQLVQTYNQLFEENPINASGVDAKAILSARLSKSRRLENLIAQLPGEKKNGLFGNLIALSLGLTPNFKSNFDLAEDAKLQLSKDTYDDDLDNLLAQIGDQYADLFLAAKNLSDAILLSDILRVNTEITKAPLSASMIKRYDEHHQDLTLLKALVRQQLPEKYKEIFFDQSKNGYAGYIDGGASQEEFYKFIKPILEKMDGTEELLVKLNREDLLRKQRTFDNGSIPHQIHLGELHAILRRQEDFYPFLKDNREKIEKILTFRIPYYVGPLARGNSRFAWMTRKSEETITPWNFEEVVDKGASAQSFIERMTNFDKNLPNEKVLPKHSLLYEYFTVYNELTKVKYVTEGMRKPAFLSGEQKKAIVDLLFKTNRKVTVKQLKEDYFKKIECFDSVEISGVEDRFNASLGTYHDLLKIIKDKDFLDNEENEDILEDIVLTLTLFEDREMIEERLKTYAHLFDDKVMKQLKRRRYTGWGRLSRKLINGIRDKQSGKTILDFLKSDGFANRNFMQLIHDDSLTFKEDIQKAQVSGQGDSLHEHIANLAGSPAIKKGILQTVKVVDELVKVMGRHKPENIVIEMARENQTTQKGQKNSRERMKRIEEGIKELGSQILKEHPVENTQLQNEKLYLYYLQNGRDMYVDQELDINRLSDYDVDHIVPQSFLKDDSIDNKVLTRSDKARGKSDNVPSEEVVKKMKNYWRQLLNAKLITQRKFDNLTKAERGGLSELDKAGFIKRQLVETRQITKHVAQILDSRMNTKYDENDKLIREVKVITLKSKLVSDFRKDFQFYKVREINNYHHAHDAYLNAVVGTALIKKYPKLESEFVYGDYKVYDVRKMIAKSEQEIGKATAKYFFYSNIMNFFKTEITLANGEIRKRPLIETNGETGEIVWDKGRDFATVRKVLSMPQVNIVKKTEVQTGGFSKESILPKRNSDKLIARKKDWDPKKYGGFDSPTVAYSVLVVAKVEKGKSKKLKSVKELLGITIMERSSFEKNPIDFLEAKGYKEVKKDLIIKLPKYSLFELENGRKRMLASAGELQKGNELALPSKYVNFLYLASHYEKLKGSPEDNEQKQLFVEQHKHYLDEIIEQISEFSKRVILADANLDKVLSAYNKHRDKPIREQAENIIHLFTLTNLGAPAAFKYFDTTIDRKRYTSTKEVLDATLIHQSITGLYETRIDLSQLGGDGGGGSGGSGGSGGTAPLEEEYRLFLEAPIQNVTLLEQWKREIPKVWAEINPPGLASTQAPIHVQLLSTALPVRVRQYPITLEAKRSLRETIRKFRAAGILRPVHSPWNTPLLPVRKSGTSEYRMVQDLREVNKRVETIHPTVPNPYTLLSLLPPDRIWYSVLDLKDAFFCIPLAPESQLIFAFEWADAEEGESGQLTWTRLPQGFKNSPTLFNEALNRDLQGFRLDHPSVSLLQYVDDLLIAADTQAACLSATRDLLMTLAELGYRVSGKKAQLCQEEVTYLGFKIHKGSRSLSNSRTQAILQIPVPKTKRQVREFLGTIGYCRLWIPGFAELAQPLYAATRPGNDPLVWGEKEEEAFQSLKLALTQPPALALPSLDKPFQLFVEETSGAAKGVLTQALGPWKRPVAYLSKRLDPVAAGWPRCLRAIAAAALLTREASKLTFGQDIEITSSHNLESLLRSPPDKWLTNARITQYQVLLLDPPRVRFKQTAALNPATLLPETDDTLPIHHCLDTLDSLTSTRPDLTDQPLAQAEATLFTDGSSYIRDGKRYAGAAVVTLDSVIWAEPLPIGTSAQKAELIALTKALEWSKDKSVNIYTDSRYAFATLHVHGMIYRERGWLTAGGKAIKNAPEILALLTAVWLPKRVAVMHCKGHQKDDAPTSTGNRRADEVAREVAIRPLSTQATISAGKRTADGSEFEKRTADGSEFESPKKKAKVE

SEQ ID NO: 6030 - protein, 2096 aa, synthetic construct; identical to SEQ ID NO: 4501

SEQ ID NO: 6031 - protein, 2093 aa, synthetic construct
MPAAKRVKLDGGDKKYSIGLDIGTNSVGWAVITDEYKVPSKKFKVLGNTDRHSIKKNLIGALLFDSGETAEATRLKRTARRRYTRRKNRICYLQEIFSNEMAKVDDSFFHRLEESFLVEEDKKHERHPIFGNIVDEVAYHEKYPTIYHLRKKLVDSTDKADLRLIYLALAHMIKFRGHFLIEGDLNPDNSDVDKLFIQLVQTYNQLFEENPINASGVDAKAILSARLSKSRRLENLIAQLPGEKKNGLFGNLIALSLGLTPNFKSNFDLAEDAKLQLSKDTYDDDLDNLLAQIGDQYADLFLAAKNLSDAILLSDILRVNTEITKAPLSASMIKRYDEHHQDLTLLKALVRQQLPEKYKEIFFDQSKNGYAGYIDGGASQEEFYKFIKPILEKMDGTEELLVKLNREDLLRKQRTFDNGSIPHQIHLGELHAILRRQEDFYPFLKDNREKIEKILTFRIPYYVGPLARGNSRFAWMTRKSEETITPWNFEEVVDKGASAQSFIERMTNFDKNLPNEKVLPKHSLLYEYFTVYNELTKVKYVTEGMRKPAFLSGEQKKAIVDLLFKTNRKVTVKQLKEDYFKKIECFDSVEISGVEDRFNASLGTYHDLLKIIKDKDFLDNEENEDILEDIVLTLTLFEDREMIEERLKTYAHLFDDKVMKQLKRRRYTGWGRLSRKLINGIRDKQSGKTILDFLKSDGFANRNFMQLIHDDSLTFKEDIQKAQVSGQGDSLHEHIANLAGSPAIKKGILQTVKVVDELVKVMGRHKPENIVIEMARENQTTQKGQKNSRERMKRIEEGIKELGSQILKEHPVENTQLQNEKLYLYYLQNGRDMYVDQELDINRLSDYDVDHIVPQSFLKDDSIDNKVLTRSDKARGKSDNVPSEEVVKKMKNYWRQLLNAKLITQRKFDNLTKAERGGLSELDKAGFIKRQLVETRQITKHVAQILDSRMNTKYDENDKLIREVKVITLKSKLVSDFRKDFQFYKVREINNYHHAHDAYLNAVVGTALIKKYPKLESEFVYGDYKVYDVRKMIAKSEQEIGKATAKYFFYSNIMNFFKTEITLANGEIRKRPLIETNGETGEIVWDKGRDFATVRKVLSMPQVNIVKKTEVQTGGFSKESILPKRNSDKLIARKKDWDPKKYGGFDSPTVAYSVLVVAKVEKGKSKKLKSVKELLGITIMERSSFEKNPIDFLEAKGYKEVKKDLIIKLPKYSLFELENGRKRMLASAGELQKGNELALPSKYVNFLYLASHYEKLKGSPEDNEQKQLFVEQHKHYLDEIIEQISEFSKRVILADANLDKVLSAYNKHRDKPIREQAENIIHLFTLTNLGAPAAFKYFDTTIDRKRYTSTKEVLDATLIHQSITGLYETRIDLSQLGGDGGGGSGGSGGSGGTLQLEEEYRLFEPESTQKQEMDIWLKNFPQAWAETGGMGTAHCQAPVLIQLKATATPISIRQYPMPHEAYQGIKPHIRRMLDQGILKPCQSPWNTPLLPVKKPGTEDYRPVQDLREVNKRVEDIHPTVPNPYNLLSTLPPSHPWYTVLDLKDAFFCLRLHSESQLLFAFEWRDPEIGLSGQLTWTRLPQGFKNSPTLFNEALHSDLADFRVRYPALVLLQYVDDLLLAAATRTECLEGTKALLETLGNKGYRASAKKAQICLQEVTYLGYSLKDGQRWLTKARKEAILSIPVPKNSRQVREFLGKAGYCRLFIPGFAELAAPLYPLTRPGTLFQWGTEQQLAFEDIKKALLSSPALGLPDITKPFELFIDENSGFAKGVLVQKLGPWKRPVAYLSKKLDTVASGWPPCLRMVAAIAILVKDAGKLTLGQPLTILTSHPVEALVRQPPNKWLSNARMTHYQAMLLDAERVHFGPTVSLNPATLLPLPSGGNHHDCLQILAETHGTRPDLTDQPLPDADLTWYTDGSSFIRNGEREAGAAVTTESEVIWAAPLPPGTSAQRAELIALTQALKMAEGKKLTVYTDSRYAFATTHVHGEIYRRRGWLTSEGKEIKNKNEILALLEALFLPKRLSIIHCPGHQKGDSPQAKGNRLADDTAKKAATETHSSLTVLPAGKRTADGSEFEKRTADGSEFESPKKKAKVE

SEQ ID NO: 6032 - protein, 2094 aa, synthetic construct
MPAAKRVKLDGGDKKYSIGLDIGTNSVGWAVITDEYKVPSKKFKVLGNTDRHSIKKNLIGALLFDSGETAEATRLKRTARRRYTRRKNRICYLQEIFSNEMAKVDDSFFHRLEESFLVEEDKKHERHPIFGNIVDEVAYHEKYPTIYHLRKKLVDSTDKADLRLIYLALAHMIKFRGHFLIEGDLNPDNSDVDKLFIQLVQTYNQLFEENPINASGVDAKAILSARLSKSRRLENLIAQLPGEKKNGLFGNLIALSLGLTPNFKSNFDLAEDAKLQLSKDTYDDDLDNLLAQIGDQYADLFLAAKNLSDAILLSDILRVNTEITKAPLSASMIKRYDEHHQDLTLLKALVRQQLPEKYKEIFFDQSKNGYAGYIDGGASQEEFYKFIKPILEKMDGTEELLVKLNREDLLRKQRTFDNGSIPHQIHLGELHAILRRQEDFYPFLKDNREKIEKILTFRIPYYVGPLARGNSRFAWMTRKSEETITPWNFEEVVDKGASAQSFIERMTNFDKNLPNEKVLPKHSLLYEYFTVYNELTKVKYVTEGMRKPAFLSGEQKKAIVDLLFKTNRKVTVKQLKEDYFKKIECFDSVEISGVEDRFNASLGTYHDLLKIIKDKDFLDNEENEDILEDIVLTLTLFEDREMIEERLKTYAHLFDDKVMKQLKRRRYTGWGRLSRKLINGIRDKQSGKTILDFLKSDGFANRNFMQLIHDDSLTFKEDIQKAQVSGQGDSLHEHIANLAGSPAIKKGILQTVKVVDELVKVMGRHKPENIVIEMARENQTTQKGQKNSRERMKRIEEGIKELGSQILKEHPVENTQLQNEKLYLYYLQNGRDMYVDQELDINRLSDYDVDHIVPQSFLKDDSIDNKVLTRSDKARGKSDNVPSEEVVKKMKNYWRQLLNAKLITQRKFDNLTKAERGGLSELDKAGFIKRQLVETRQITKHVAQILDSRMNTKYDENDKLIREVKVITLKSKLVSDFRKDFQFYKVREINNYHHAHDAYLNAVVGTALIKKYPKLESEFVYGDYKVYDVRKMIAKSEQEIGKATAKYFFYSNIMNFFKTEITLANGEIRKRPLIETNGETGEIVWDKGRDFATVRKVLSMPQVNIVKKTEVQTGGFSKESILPKRNSDKLIARKKDWDPKKYGGFDSPTVAYSVLVVAKVEKGKSKKLKSVKELLGITIMERSSFEKNPIDFLEAKGYKEVKKDLIIKLPKYSLFELENGRKRMLASAGELQKGNELALPSKYVNFLYLASHYEKLKGSPEDNEQKQLFVEQHKHYLDEIIEQISEFSKRVILADANLDKVLSAYNKHRDKPIREQAENIIHLFTLTNLGAPAAFKYFDTTIDRKRYTSTKEVLDATLIHQSITGLYETRIDLSQLGGDGGGGSGGSGGSGGTLNLEDEYRLYETSAEPEVSPGSTWLSDFPQAWAETGGMGLAVRQAPLIIPLKATSTPVSIKQYPMSQEAKLGIKPHIQRLLDQGILVPCQSPWNTPLLPVKKPGTNDYRPVQDLREVNKRVEDIHPTVPNPYNLLSGLPPSHRWYTVLDLKDAFFCLRLHPTSQPLFAFEWRDPGMGISGQLTWTRLPQGFKNSPTLFNEALHRDLADFRIQHPDLILLQYVDDILLAATSELDCQQGTRALLLTLGNLGYRASAKKAQLCQKQVKYLGYLLKEGQRWLTEARKETVMGQPTPKTPRQLREFLGTAGFCRLWIPGFAEMAAPLYPLTKPGTLFNWGPDQQKAYQEIKQALLTAPALGLPDLTKPFELFVDEKQGYAKGVLTQKLGPWRRPVAYLSKKLDPVAAGWPPCLRMVAAIAVLRKDAGKLTMGQPLVILAPHAVEALVKQPPDRWLSNARMTHYQAMLLDTDRVQFGPVVALNPATLLPLPEEGAPHDCLEILAETHGTRPDLTDQPIPDADHTWYTDGSSFLQEGQRKAGAAVTTETEVIWARALPAGTSAQRAELIALTQALKMAEGKRLNVYTDSRYAFATAHIHGEIYRRRGWLTSEGREIKNKSEILALLKALFLPKRLSIIHCLGHQKGDSAEARGNRLADQAAREAAIKTPPDTSTLLAGKRTADGSEFEKRTADGSEFESPKKKAKVE

SEQ ID NO: 6033 - protein, 2094 aa, synthetic construct
MPAAKRVKLDGGDKKYSIGLDIGTNSVGWAVITDEYKVPSKKFKVLGNTDRHSIKKNLIGALLFDSGETAEATRLKRTARRRYTRRKNRICYLQEIFSNEMAKVDDSFFHRLEESFLVEEDKKHERHPIFGNIVDEVAYHEKYPTIYHLRKKLVDSTDKADLRLIYLALAHMIKFRGHFLIEGDLNPDNSDVDKLFIQLVQTYNQLFEENPINASGVDAKAILSARLSKSRRLENLIAQLPGEKKNGLFGNLIALSLGLTPNFKSNFDLAEDAKLQLSKDTYDDDLDNLLAQIGDQYADLFLAAKNLSDAILLSDILRVNTEITKAPLSASMIKRYDEHHQDLTLLKALVRQQLPEKYKEIFFDQSKNGYAGYIDGGASQEEFYKFIKPILEKMDGTEELLVKLNREDLLRKQRTFDNGSIPHQIHLGELHAILRRQEDFYPFLKDNREKIEKILTFRIPYYVGPLARGNSRFAWMTRKSEETITPWNFEEVVDKGASAQSFIERMTNFDKNLPNEKVLPKHSLLYEYFTVYNELTKVKYVTEGMRKPAFLSGEQKKAIVDLLFKTNRKVTVKQLKEDYFKKIECFDSVEISGVEDRFNASLGTYHDLLKIIKDKDFLDNEENEDILEDIVLTLTLFEDREMIEERLKTYAHLFDDKVMKQLKRRRYTGWGRLSRKLINGIRDKQSGKTILDFLKSDGFANRNFMQLIHDDSLTFKEDIQKAQVSGQGDSLHEHIANLAGSPAIKKGILQTVKVVDELVKVMGRHKPENIVIEMARENQTTQKGQKNSRERMKRIEEGIKELGSQILKEHPVENTQLQNEKLYLYYLQNGRDMYVDQELDINRLSDYDVDHIVPQSFLKDDSIDNKVLTRSDKARGKSDNVPSEEVVKKMKNYWRQLLNAKLITQRKFDNLTKAERGGLSELDKAGFIKRQLVETRQITKHVAQILDSRMNTKYDENDKLIREVKVITLKSKLVSDFRKDFQFYKVREINNYHHAHDAYLNAVVGTALIKKYPKLESEFVYGDYKVYDVRKMIAKSEQEIGKATAKYFFYSNIMNFFKTEITLANGEIRKRPLIETNGETGEIVWDKGRDFATVRKVLSMPQVNIVKKTEVQTGGFSKESILPKRNSDKLIARKKDWDPKKYGGFDSPTVAYSVLVVAKVEKGKSKKLKSVKELLGITIMERSSFEKNPIDFLEAKGYKEVKKDLIIKLPKYSLFELENGRKRMLASAGELQKGNELALPSKYVNFLYLASHYEKLKGSPEDNEQKQLFVEQHKHYLDEIIEQISEFSKRVILADANLDKVLSAYNKHRDKPIREQAENIIHLFTLTNLGAPAAFKYFDTTIDRKRYTSTKEVLDATLIHQSITGLYETRIDLSQLGGDGGGGSGGSGGSGGTLNLEDEYRLYETSAEPEVSPGSTWLSDFPQAWAETGGMGLAVRQAPLIIPLKATSTPVSIKQYPMSQEAKLGIKPHIQRLLDQGILVPCQSPWNTPLLPVKKPGTNDYRPVQDLREVNKRVEDIHPTVPNPYNLLSGLPPSHRWYTVLDLKDAFFCLRLHPTSQPLFAFEWRDPGMGISGQLTWTRLPQGFKNSPTLFNEALHRDLADFRIQHPDLILLQYVDDILLAATSELDCQQGTRALLLTLGNLGYRASAKKAQLCQKQVKYLGYLLKEGQRWLTEARKETVMGQPTPKTPRQLREFLGKAGFCRLFIPGFAEMAAPLYPLTKPGTLFNWGPDQQKAYQEIKQALLTAPALGLPDLTKPFELFVDEKQGYAKGVLTQKLGPWRRPVAYLSKKLDPVAAGWPPCLRMVAAIAVLRKDAGKLTMGQPLVILAPHAVEALVKQPPDRWLSNARMTHYQAMLLDTDRVQFGPVVALNPATLLPLPEEGAPHDCLEILAETHGTRPDLTDQPIPDADHTWYTDGSSFLQEGQRKAGAAVTTETEVIWARALPAGTSAQRAELIALTQALKMAEGKRLNVYTDSRYAFATAHIHGEIYRRRGWLTSEGREIKNKSEILALLKALFLPKRLSIIHCLGHQKGDSAEARGNRLADQAAREAAIKTPPDTSTLLAGKRTADGSEFEKRTADGSEFESPKKKAKVE

SEQ ID NO: 6034 - protein, 2094 aa, synthetic construct
MPAAKRVKLDGGDKKYSIGLDIGTNSVGWAVITDEYKVPSKKFKVLGNTDRHSIKKNLIGALLFDSGETAEATRLKRTARRRYTRRKNRICYLQEIFSNEMAKVDDSFFHRLEESFLVEEDKKHERHPIFGNIVDEVAYHEKYPTIYHLRKKLVDSTDKADLRLIYLALAHMIKFRGHFLIEGDLNPDNSDVDKLFIQLVQTYNQLFEENPINASGVDAKAILSARLSKSRRLENLIAQLPGEKKNGLFGNLIALSLGLTPNFKSNFDLAEDAKLQLSKDTYDDDLDNLLAQIGDQYADLFLAAKNLSDAILLSDILRVNTEITKAPLSASMIKRYDEHHQDLTLLKALVRQQLPEKYKEIFFDQSKNGYAGYIDGGASQEEFYKFIKPILEKMDGTEELLVKLNREDLLRKQRTFDNGSIPHQIHLGELHAILRRQEDFYPFLKDNREKIEKILTFRIPYYVGPLARGNSRFAWMTRKSEETITPWNFEEVVDKGASAQSFIERMTNFDKNLPNEKVLPKHSLLYEYFTVYNELTKVKYVTEGMRKPAFLSGEQKKAIVDLLFKTNRKVTVKQLKEDYFKKIECFDSVEISGVEDRFNASLGTYHDLLKIIKDKDFLDNEENEDILEDIVLTLTLFEDREMIEERLKTYAHLFDDKVMKQLKRRRYTGWGRLSRKLINGIRDKQSGKTILDFLKSDGFANRNFMQLIHDDSLTFKEDIQKAQVSGQGDSLHEHIANLAGSPAIKKGILQTVKVVDELVKVMGRHKPENIVIEMARENQTTQKGQKNSRERMKRIEEGIKELGSQILKEHPVENTQLQNEKLYLYYLQNGRDMYVDQELDINRLSDYDVDHIVPQSFLKDDSIDNKVLTRSDKARGKSDNVPSEEVVKKMKNYWRQLLNAKLITQRKFDNLTKAERGGLSELDKAGFIKRQLVETRQITKHVAQILDSRMNTKYDENDKLIREVKVITLKSKLVSDFRKDFQFYKVREINNYHHAHDAYLNAVVGTALIKKYPKLESEFVYGDYKVYDVRKMIAKSEQEIGKATAKYFFYSNIMNFFKTEITLANGEIRKRPLIETNGETGEIVWDKGRDFATVRKVLSMPQVNIVKKTEVQTGGFSKESILPKRNSDKLIARKKDWDPKKYGGFDSPTVAYSVLVVAKVEKGKSKKLKSVKELLGITIMERSSFEKNPIDFLEAKGYKEVKKDLIIKLPKYSLFELENGRKRMLASAGELQKGNELALPSKYVNFLYLASHYEKLKGSPEDNEQKQLFVEQHKHYLDEIIEQISEFSKRVILADANLDKVLSAYNKHRDKPIREQAENIIHLFTLTNLGAPAAFKYFDTTIDRKRYTSTKEVLDATLIHQSITGLYETRIDLSQLGGDGGGGSGGSGGSGGLGIEDEYRLHETSTEPDVSLGSTWLSDFPQAWAETGGMGLAVRQAPLIIPLKATSTPVSIQQYPMSHEARLGIKPHIQRLLDQGILVPCQSPWNTPLLPVKKPGTNDYRPVQDLREVNKRVEDIHPTVPNPYNLLSGLPPSHQWYTVLDLKDAFFCLRLHPTSQPLFAFEWRDPGMGISGQLTWTRLPQGFKNSPTLFNEALHRDLADFRIQHPDLILLQYVDDILLAATSELDCQQGTRALLQTLGDLGYRASAKKAQICQKQVKYLGYLLREGQRWLTEARKETVMGQPVPKTPRQLREFLGKAGFCRLFIPGFAEMAAPLYPLTKPGTLFSWGPDQQKAYQEIKQALLTAPALGLPDLTKPFELFVDEKQGYAKGVLTQKLGPWRRPVAYLSKKLDPVAAGWPPCLRMVAAIAVLTKDAGKLTMGQPLVILAPHAVEALVKQPPDRWLSNARMTHYQAMLLDTDRVQFGPVVALNPATLLPLPEEGAPHDCLEILAETHGTRPDLTDQPIPDADHTWYTDGSSFLQEGQRKAGAAVTTETEVIWAGALPAGTSAQRAELIALTQALKMAEGKRLNVYTDSRYAFATAHIHGEIYRRRGWLTSEGREIKNKSEILALLKALFLPKRLSIIHCLGHQKGDSAEARGNRLADQAAREAAIKTPPDTSTLLIAGKRTADGSEFEKRTADGSEFESPKKKAKVE

SEQ ID NO: 6035 - protein, 2094 aa, synthetic construct
MPAAKRVKLDGGDKKYSIGLDIGTNSVGWAVITDEYKVPSKKFKVLGNTDRHSIKKNLIGALLFDSGETAEATRLKRTARRRYTRRKNRICYLQEIFSNEMAKVDDSFFHRLEESFLVEEDKKHERHPIFGNIVDEVAYHEKYPTIYHLRKKLVDSTDKADLRLIYLALAHMIKFRGHFLIEGDLNPDNSDVDKLFIQLVQTYNQLFEENPINASGVDAKAILSARLSKSRRLENLIAQLPGEKKNGLFGNLIALSLGLTPNFKSNFDLAEDAKLQLSKDTYDDDLDNLLAQIGDQYADLFLAAKNLSDAILLSDILRVNTEITKAPLSASMIKRYDEHHQDLTLLKALVRQQLPEKYKEIFFDQSKNGYAGYIDGGASQEEFYKFIKPILEKMDGTEELLVKLNREDLLRKQRTFDNGSIPHQIHLGELHAILRRQEDFYPFLKDNREKIEKILTFRIPYYVGPLARGNSRFAWMTRKSEETITPWNFEEVVDKGASAQSFIERMTNFDKNLPNEKVLPKHSLLYEYFTVYNELTKVKYVTEGMRKPAFLSGEQKKAIVDLLFKTNRKVTVKQLKEDYFKKIECFDSVEISGVEDRFNASLGTYHDLLKIIKDKDFLDNEENEDILEDIVLTLTLFEDREMIEERLKTYAHLFDDKVMKQLKRRRYTGWGRLSRKLINGIRDKQSGKTILDFLKSDGFANRNFMQLIHDDSLTFKEDIQKAQVSGQGDSLHEHIANLAGSPAIKKGILQTVKVVDELVKVMGRHKPENIVIEMARENQTTQKGQKNSRERMKRIEEGIKELGSQILKEHPVENTQLQNEKLYLYYLQNGRDMYVDQELDINRLSDYDVDHIVPQSFLKDDSIDNKVLTRSDKARGKSDNVPSEEVVKKMKNYWRQLLNAKLITQRKFDNLTKAERGGLSELDKAGFIKRQLVETRQITKHVAQILDSRMNTKYDENDKLIREVKVITLKSKLVSDFRKDFQFYKVREINNYHHAHDAYLNAVVGTALIKKYPKLESEFVYGDYKVYDVRKMIAKSEQEIGKATAKYFFYSNIMNFFKTEITLANGEIRKRPLIETNGETGEIVWDKGRDFATVRKVLSMPQVNIVKKTEVQTGGFSKESILPKRNSDKLIARKKDWDPKKYGGFDSPTVAYSVLVVAKVEKGKSKKLKSVKELLGITIMERSSFEKNPIDFLEAKGYKEVKKDLIIKLPKYSLFELENGRKRMLASAGELQKGNELALPSKYVNFLYLASHYEKLKGSPEDNEQKQLFVEQHKHYLDEIIEQISEFSKRVILADANLDKVLSAYNKHRDKPIREQAENIIHLFTLTNLGAPAAFKYFDTTIDRKRYTSTKEVLDATLIHQSITGLYETRIDLSQLGGDGGGGSGGSGGSGGTLGIEDEYRLHETSTEPDVSLGSTWLSDFPQAWAETGGMGLAVRQAPLIIPLKATSTPVSIQQYPMSHEARLGIKPHIQRLLDQGILVPCQSPWNTPLLPVKKPGTNDYRPVQDLREVNKRVEDIHPTVPNPYNLLSGLPPSHQWYTVLDLKDAFFCLRLHPTSQPLFAFEWRDPGMGISGQLTWTRLPQGFKNSPTLFNEALHRDLADFRIQHPDLILLQYVDDILLAATSELDCQQGTRALLQTLGDLGYRASAKKAQICQKQVKYLGYLLREGQRWLTEARKETVMGQPVPKTPRQLREFLGTAGFCRLWIPGFAEMAAPLYPLTKPGTLFSWGPDQQKAYQEIKQALLTAPALGLPDLTKPFELFVDEKQGYAKGVLTQKLGPWRRPVAYLSKKLDPVAAGWPPCLRMVAAIAVLTKDAGKLTMGQPLVILAPHAVEALVKQPPDRWLSNARMTHYQAMLLDTDRVQFGPVVALNPATLLPLPEEGAPHDCLEILAETHGTRPDLTDQPIPDADHTWYTDGSSFLQEGQRKAGAAVTTETEVIWAGALPAGTSAQRAELIALTQALKMAEGKRLNVYTDSRYAFATAHIHGEIYRRRGWLTSEGREIKNKSEILALLKALFLPKRLSIIHCLGHQKGDSAEARGNRLADQAAREAAIKTPPDTSTLLAGKRTADGSEFEKRTADGSEFESPKKKAKVE

SEQ ID NO: 6036 - protein, 2094 aa, synthetic construct; identical to SEQ ID NO: 6034

SEQ ID NO: 6037 - protein, 2094 aa, synthetic construct
MPAAKRVKLDGGDKKYSIGLDIGTNSVGWAVITDEYKVPSKKFKVLGNTDRHSIKKNLIGALLFDSGETAEATRLKRTARRRYTRRKNRICYLQEIFSNEMAKVDDSFFHRLEESFLVEEDKKHERHPIFGNIVDEVAYHEKYPTIYHLRKKLVDSTDKADLRLIYLALAHMIKFRGHFLIEGDLNPDNSDVDKLFIQLVQTYNQLFEENPINASGVDAKAILSARLSKSRRLENLIAQLPGEKKNGLFGNLIALSLGLTPNFKSNFDLAEDAKLQLSKDTYDDDLDNLLAQIGDQYADLFLAAKNLSDAILLSDILRVNTEITKAPLSASMIKRYDEHHQDLTLLKALVRQQLPEKYKEIFFDQSKNGYAGYIDGGASQEEFYKFIKPILEKMDGTEELLVKLNREDLLRKQRTFDNGSIPHQIHLGELHAILRRQEDFYPFLKDNREKIEKILTFRIPYYVGPLARGNSRFAWMTRKSEETITPWNFEEVVDKGASAQSFIERMTNFDKNLPNEKVLPKHSLLYEYFTVYNELTKVKYVTEGMRKPAFLSGEQKKAIVDLLFKTNRKVTVKQLKEDYFKKIECFDSVEISGVEDRFNASLGTYHDLLKIIKDKDFLDNEENEDILEDIVLTLTLFEDREMIEERLKTYAHLFDDKVMKQLKRRRYTGWGRLSRKLINGIRDKQSGKTILDFLKSDGFANRNFMQLIHDDSLTFKEDIQKAQVSGQGDSLHEHIANLAGSPAIKKGILQTVKVVDELVKVMGRHKPENIVIEMARENQTTQKGQKNSRERMKRIEEGIKELGSQILKEHPVENTQLQNEKLYLYYLQNGRDMYVDQELDINRLSDYDVDHIVPQSFLKDDSIDNKVLTRSDKARGKSDNVPSEEVVKKMKNYWRQLLNAKLITQRKFDNLTKAERGGLSELDKAGFIKRQLVETRQITKHVAQILDSRMNTKYDENDKLIREVKVITLKSKLVSDFRKDFQFYKVREINNYHHAHDAYLNAVVGTALIKKYPKLESEFVYGDYKVYDVRKMIAKSEQEIGKATAKYFFYSNIMNFFKTEITLANGEIRKRPLIETNGETGEIVWDKGRDFATVRKVLSMPQVNIVKKTEVQTGGFSKESILPKRNSDKLIARKKDWDPKKYGGFDSPTVAYSVLVVAKVEKGKSKKLKSVKELLGITIMERSSFEKNPIDFLEAKGYKEVKKDLIIKLPKYSLFELENGRKRMLASAGELQKGNELALPSKYVNFLYLASHYEKLKGSPEDNEQKQLFVEQHKHYLDEIIEQISEFSKRVILADANLDKVLSAYNKHRDKPIREQAENIIHLFTLTNLGAPAAFKYFDTTIDRKRYTSTKEVLDATLIHQSITGLYETRIDLSQLGGDGGGGSGGSGGSGGTLGIEDEYRLHETSTEPDVSLGSTWLSDFPQAWAETGGMGLAVRQAPLIIPLKATSTPVSIQQYPMSHEARLGIKPHIQRLLDQGILVPCQSPWNTPLLPVKKPGTNDYRPVQDLREVNKRVEDIHPTVPNPYNLLSGLPPSHQWYTVLDLKDAFFCLRLHPTSQPLFAFEWRDPGMGISGQLTWTRLPQGFKNSPTLFDEALHRDLADFRIQHPDLILLQYVDDILLAATSELDCQQGTRALLQTLGDLGYRASAKKAQICQKQVKYLGYLLREGQRWLTEARKETVMGQPVPKTPRQLREFLGTAGFCRLWIPGFAEMAAPLYPLTKTGTLFSWGPDQQKAYQEIKQALLTAPALGLPDLTKPFELFVDEKQGYAKGVLTQKLGPWRRPVAYLSKKLDPVAAGWPPCLRMVAAIAVLTKDAGKLTMGQPLVILAPHAVEALVKQPPDRWLSNARMTHYQAMLLDTDRVQFGPVVALNPATLLPLPEEGAPHDCLEILAETHGTRPDLTDQPIPDADHTWYTDGSSFLQEGQRKAGAAVTTETEVIWAGALPAGTSAQRAELIALTQALKMAEGKRLNVYTDSRYAFATAHIHGEIYRRRGLLTSEGREIKNKSEILALLKALFLPKRLSIIHCLGHQKGDSAEARGNRLADQAAREAAIKTPPDTSTLLAGKRTADGSEFEKRTADGSEFESPKKKAKVE

SEQ ID NO: 6038 - protein, 2094 aa, synthetic construct; identical to SEQ ID NO: 6035

SEQ ID NO: 6039 - protein, 2094 aa, synthetic construct
MPAAKRVKLDGGDKKYSIGLDIGTNSVGWAVITDEYKVPSKKFKVLGNTDRHSIKKNLIGALLFDSGETAEATRLKRTARRRYTRRKNRICYLQEIFSNEMAKVDDSFFHRLEESFLVEEDKKHERHPIFGNIVDEVAYHEKYPTIYHLRKKLVDSTDKADLRLIYLALAHMIKFRGHFLIEGDLNPDNSDVDKLFIQLVQTYNQLFEENPINASGVDAKAILSARLSKSRRLENLIAQLPGEKKNGLFGNLIALSLGLTPNFKSNFDLAEDAKLQLSKDTYDDDLDNLLAQIGDQYADLFLAAKNLSDAILLSDILRVNTEITKAPLSASMIKRYDEHHQDLTLLKALVRQQLPEKYKEIFFDQSKNGYAGYIDGGASQEEFYKFIKPILEKMDGTEELLVKLNREDLLRKQRTFDNGSIPHQIHLGELHAILRRQEDFYPFLKDNREKIEKILTFRIPYYVGPLARGNSRFAWMTRKSEETITPWNFEEVVDKGASAQSFIERMTNFDKNLPNEKVLPKHSLLYEYFTVYNELTKVKYVTEGMRKPAFLSGEQKKAIVDLLFKTNRKVTVKQLKEDYFKKIECFDSVEISGVEDRFNASLGTYHDLLKIIKDKDFLDNEENEDILEDIVLTLTLFEDREMIEERLKTYAHLFDDKVMKQLKRRRYTGWGRLSRKLINGIRDKQSGKTILDFLKSDGFANRNFMQLIHDDSLTFKEDIQKAQVSGQGDSLHEHIANLAGSPAIKKGILQTVKVVDELVKVMGRHKPENIVIEMARENQTTQKGQKNSRERMKRIEEGIKELGSQILKEHPVENTQLQNEKLYLYYLQNGRDMYVDQELDINRLSDYDVDHIVPQSFLKDDSIDNKVLTRSDKARGKSDNVPSEEVVKKMKNYWRQLLNAKLITQRKFDNLTKAERGGLSELDKAGFIKRQLVETRQITKHVAQILDSRMNTKYDENDKLIREVKVITLKSKLVSDFRKDFQFYKVREINNYHHAHDAYLNAVVGTALIKKYPKLESEFVYGDYKVYDVRKMIAKSEQEIGKATAKYFFYSNIMNFFKTEITLANGEIRKRPLIETNGETGEIVWDKGRDFATVRKVLSMPQVNIVKKTEVQTGGFSKESILPKRNSDKLIARKKDWDPKKYGGFDSPTVAYSVLVVAKVEKGKSKKLKSVKELLGITIMERSSFEKNPIDFLEAKGYKEVKKDLIIKLPKYSLFELENGRKRMLASAGELQKGNELALPSKYVNFLYLASHYEKLKGSPEDNEQKQLFVEQHKHYLDEIIEQISEFSKRVILADANLDKVLSAYNKHRDKPIREQAENIIHLFTLTNLGAPAAFKYFDTTIDRKRYTSTKEVLDATLIHQSITGLYETRIDLSQLGGDGGGGSGGSGGSGGTLNIEDEYRLHETSKGPDVPLGSTWLSDFPQAWAETGGMGLAFRQAPLIISLKATSTPVSIKQYPMSQEARLGIKPHIQRLLDQGILVPCQSPWNTPLLPVKKPGTNDYRPVQDLREVNKRVEDIHPTVPNPYNLLSGLPPSHQWYTVLDLKDAFFCLRLHPTSQSLFAFEWKDPEMGISGQLTWTRLPQGFKNSPTLFNEALHRDLADFRIQHPDLILLQYVDDLLLAATSELDCQQGTRALLQTLGDLGYRASAKKAQICQKQVKYLGYLLKEGQRWLTEARKETVMGQPTPKTPRQLREFLGKAGLCRLFIPGFAEMAAPLYPLTKPGTLFKWGPDQQKAYQEIKQALLTAPALGLPDLTKPFELFVDEKQGYAKGVLTQKLGPWRRPVAYLSKKLDPVAAGWPPCLRMVAAIAVLTKDVGKLTMGQPLVILAPHAVEALVKQPPDRWLSNARMTHYQALLLDTDRVQFGPIVALNPATLLPLPEEGLQHDCLDILAEAHGTRPDLTDQPLPDADHTWYTDGSSFLQEGQRRAGAAVTTETEVIWAKALPAGTSAQRAELIALTQALKMAAGKKLNVYTDSRYAFATAHIHGEIYRRRGWLTSEGKEIKNKDEILALLKALFLPKRLSIIHCPGHQKGNHAEARGNRMADQAAREVATRETPETSTLLAGKRTADGSEFEKRTADGSEFESPKKKAKVE

SEQ ID NO: 6040 - protein, 2094 aa, synthetic construct
MPAAKRVKLDGGDKKYSIGLDIGTNSVGWAVITDEYKVPSKKFKVLGNTDRHSIKKNLIGALLFDSGETAEATRLKRTARRRYTRRKNRICYLQEIFSNEMAKVDDSFFHRLEESFLVEEDKKHERHPIFGNIVDEVAYHEKYPTIYHLRKKLVDSTDKADLRLIYLALAHMIKFRGHFLIEGDLNPDNSDVDKLFIQLVQTYNQLFEENPINASGVDAKAILSARLSKSRRLENLIAQLPGEKKNGLFGNLIALSLGLTPNFKSNFDLAEDAKLQLSKDTYDDDLDNLLAQIGDQYADLFLAAKNLSDAILLSDILRVNTEITKAPLSASMIKRYDEHHQDLTLLKALVRQQLPEKYKEIFFDQSKNGYAGYIDGGASQEEFYKFIKPILEKMDGTEELLVKLNREDLLRKQRTFDNGSIPHQIHLGELHAILRRQEDFYPFLKDNREKIEKILTFRIPYYVGPLARGNSRFAWMTRKSEETITPWNFEEVVDKGASAQSFIERMTNFDKNLPNEKVLPKHSLLYEYFTVYNELTKVKYVTEGMRKPAFLSGEQKKAIVDLLFKTNRKVTVKQLKEDYFKKIECFDSVEISGVEDRFNASLGTYHDLLKIIKDKDFLDNEENEDILEDIVLTLTLFEDREMIEERLKTYAHLFDDKVMKQLKRRRYTGWGRLSRKLINGIRDKQSGKTILDFLKSDGFANRNFMQLIHDDSLTFKEDIQKAQVSGQGDSLHEHIANLAGSPAIKKGILQTVKVVDELVKVMGRHKPENIVIEMARENQTTQKGQKNSRERMKRIEEGIKELGSQILKEHPVENTQLQNEKLYLYYLQNGRDMYVDQELDINRLSDYDVDHIVPQSFLKDDSIDNKVLTRSDKARGKSDNVPSEEVVKKMKNYWRQLLNAKLITQRKFDNLTKAERGGLSELDKAGFIKRQLVETRQITKHVAQILDSRMNTKYDENDKLIREVKVITLKSKLVSDFRKDFQFYKVREINNYHHAHDAYLNAVVGTALIKKYPKLESEFVYGDYKVYDVRKMIAKSEQEIGKATAKYFFYSNIMNFFKTEITLANGEIRKRPLIETNGETGEIVWDKGRDFATVRKVLSMPQVNIVKKTEVQTGGFSKESILPKRNSDKLIARKKDWDPKKYGGFDSPTVAYSVLVVAKVEKGKSKKLKSVKELLGITIMERSSFEKNPIDFLEAKGYKEVKKDLIIKLPKYSLFELENGRKRMLASAGELQKGNELALPSKYVNFLYLASHYEKLKGSPEDNEQKQLFVEQHKHYLDEIIEQISEFSKRVILADANLDKVLSAYNKHRDKPIREQAENIIHLFTLTNLGAPAAFKYFDTTIDRKRYTSTKEVLDATLIHQSITGLYETRIDLSQLGGDGGGGSGGSGGSGGTLNIEDEYRLHETSKGPDVPLGSTWLSDFPQAWAETGGMGLAVRQAPLIIPLKATSTPVSIKQYPMSQEARLGIKPHIQRLLDQGILVPCQSPWNTPLLPVKKPGTNDYRPVQDLREVNKRVEDIHPTVPNPYNLLSGLPPSHQWYTVLDLKDAFFCLRLHPTSQSLFAFEWRDPEMGISGQLTWTRLPQGFKNSPTLFDEALHRDLADFRIQHPDLILLQYVDDLLLAATSELDCQQGTRALLQTLGDLGYRASAKKAQICQKQVKYLGYLLKEGQRWLTEARKETVMGQPTPKTPRQLREFLGTAGFCRLWIPGFAEMAAPLYPLTKTGTLFEWGPDQQKAYQEIKQALLTAPALGLPDLTKPFELFVDEKQGYAKGVLTQKLGPWRRPVAYLSKKLDPVAAGWPPCLRMVAAIAVLTKDAGKLTMGQPLVILAPHAVEALVKQPPDRWLSNARMTHYQALLLDTDRVQFGPIVALNPATLLPLPEEGLQHDCLDILAEAHGTRPDLTDQPLPDADHTWYTDGSSFLQEGQRKAGAAVTTETEVVWAKALPAGTSAQRAELIALTQALKMAEGKKLNVYTDSRYAFATAHIHGEIYRRRGLLTSEGKEIKNKDEILALLKALFLPKRLSIIHCPGHQKGNRAEARGNRMADQAAREVATRETPETSTLLAGKRTADGSEFEKRTADGSEFESPKKKAKVE

SEQ ID NO: 6041 - protein, 2094 aa, synthetic construct
MPAAKRVKLDGGDKKYSIGLDIGTNSVGWAVITDEYKVPSKKFKVLGNTDRHSIKKNLIGALLFDSGETAEATRLKRTARRRYTRRKNRICYLQEIFSNEMAKVDDSFFHRLEESFLVEEDKKHERHPIFGNIVDEVAYHEKYPTIYHLRKKLVDSTDKADLRLIYLALAHMIKFRGHFLIEGDLNPDNSDVDKLFIQLVQTYNQLFEENPINASGVDAKAILSARLSKSRRLENLIAQLPGEKKNGLFGNLIALSLGLTPNFKSNFDLAEDAKLQLSKDTYDDDLDNLLAQIGDQYADLFLAAKNLSDAILLSDILRVNTEITKAPLSASMIKRYDEHHQDLTLLKALVRQQLPEKYKEIFFDQSKNGYAGYIDGGASQEEFYKFIKPILEKMDGTEELLVKLNREDLLRKQRTFDNGSIPHQIHLGELHAILRRQEDFYPFLKDNREKIEKILTFRIPYYVGPLARGNSRFAWMTRKSEETITPWNFEEVVDKGASAQSFIERMTNFDKNLPNEKVLPKHSLLYEYFTVYNELTKVKYVTEGMRKPAFLSGEQKKAIVDLLFKTNRKVTVKQLKEDYFKKIECFDSVEISGVEDRFNASLGTYHDLLKIIKDKDFLDNEENEDILEDIVLTLTLFEDREMIEERLKTYAHLFDDKVMKQLKRRRYTGWGRLSRKLINGIRDKQSGKTILDFLKSDGFANRNFMQLIHDDSLTFKEDIQKAQVSGQGDSLHEHIANLAGSPAIKKGILQTVKVVDELVKVMGRHKPENIVIEMARENQTTQKGQKNSRERMKRIEEGIKELGSQILKEHPVENTQLQNEKLYLYYLQNGRDMYVDQELDINRLSDYDVDHIVPQSFLKDDSIDNKVLTRSDKARGKSDNVPSEEVVKKMKNYWRQLLNAKLITQRKFDNLTKAERGGLSELDKAGFIKRQLVETRQITKHVAQILDSRMNTKYDENDKLIREVKVITLKSKLVSDFRKDFQFYKVREINNYHHAHDAYLNAVVGTALIKKYPKLESEFVYGDYKVYDVRKMIAKSEQEIGKATAKYFFYSNIMNFFKTEITLANGEIRKRPLIETNGETGEIVWDKGRDFATVRKVLSMPQVNIVKKTEVQTGGFSKESILPKRNSDKLIARKKDWDPKKYGGFDSPTVAYSVLVVAKVEKGKSKKLKSVKELLGITIMERSSFEKNPIDFLEAKGYKEVKKDLIIKLPKYSLFELENGRKRMLASAGELQKGNELALPSKYVNFLYLASHYEKLKGSPEDNEQKQLFVEQHKHYLDEIIEQISEFSKRVILADANLDKVLSAYNKHRDKPIREQAENIIHLFTLTNLGAPAAFKYFDTTIDRKRYTSTKEVLDATLIHQSITGLYETRIDLSQLGGDGGGGSGGSGGSGGTLNIEDEHRLHETSKEPDVSLGSTWLSDFPQAWAETGGMGLAVRQAPLIIPLKATSTPVSIKQYPMSQEARLGIKPHIQRLLDQGILVPCQSPWNTPLLPVKKPGTNDYRPVQDLREVNKRVEDIHPTVPNPYNLLSGLPPSHQWYTVLDLKDAFFCLRLHPTSQPLFAFEWRDPEMGISGQLTWTRLPQGFKNSPTLFNEALHRDLADFRIQHPDLILLQYVDDLLLAATSELDCQQGTRALLQTLGNLGYRASAKKAQICQKQVKYLGYLLKEGQRWLTEARKETVMGQPTPKTPRQLREFLGTAGFCRLWIPGFAEMAAPLYPLTKPGTLFNWGPDQQKAYQEIKQALLTAPALGLPDLTKPFELFVDEKQGYAKGVLTQKLGPWRRPVAYLSKKLDPVAAGWPPCLRMVAAIAVLTKDAGKLTMGQPLVILAPHAVEALVKQPPDRWLSNARMTHYQALLLDTDRVQFGPVVALNPATLLPLPEEGLQHNCLDILAEAHGTRPDLTDQPLPDADHTWYTDGSSLLQEGQRKAGAAVTTETEVIWAKALPAGTSAQRAELIALTQALKMAEGKKLNVYTDSRYAFATAHIHGEIYRRRGWLTSEGKEIKNKDEILALLKALFLPKRLSIIHCPGHQKGHSAEARGNRMADQAARKAAITETPDTSTLLAGKRTADGSEFEKRTADGSEFESPKKKAKVE

SEQ ID NO: 6042 - protein, 2094 aa, synthetic construct
MPAAKRVKLDGGDKKYSIGLDIGTNSVGWAVITDEYKVPSKKFKVLGNTDRHSIKKNLIGALLFDSGETAEATRLKRTARRRYTRRKNRICYLQEIFSNEMAKVDDSFFHRLEESFLVEEDKKHERHPIFGNIVDEVAYHEKYPTIYHLRKKLVDSTDKADLRLIYLALAHMIKFRGHFLIEGDLNPDNSDVDKLFIQLVQTYNQLFEENPINASGVDAKAILSARLSKSRRLENLIAQLPGEKKNGLFGNLIALSLGLTPNFKSNFDLAEDAKLQLSKDTYDDDLDNLLAQIGDQYADLFLAAKNLSDAILLSDILRVNTEITKAPLSASMIKRYDEHHQDLTLLKALVRQQLPEKYKEIFFDQSKNGYAGYIDGGASQEEFYKFIKPILEKMDGTEELLVKLNREDLLRKQRTFDNGSIPHQIHLGELHAILRRQEDFYPFLKDNREKIEKILTFRIPYYVGPLARGNSRFAWMTRKSEETITPWNFEEVVDKGASAQSFIERMTNFDKNLPNEKVLPKHSLLYEYFTVYNELTKVKYVTEGMRKPAFLSGEQKKAIVDLLFKTNRKVTVKQLKEDYFKKIECFDSVEISGVEDRFNASLGTYHDLLKIIKDKDFLDNEENEDILEDIVLTLTLFEDREMIEERLKTYAHLFDDKVMKQLKRRRYTGWGRLSRKLINGIRDKQSGKTILDFLKSDGFANRNFMQLIHDDSLTFKEDIQKAQVSGQGDSLHEHIANLAGSPAIKKGILQTVKVVDELVKVMGRHKPENIVIEMARENQTTQKGQKNSRERMKRIEEGIKELGSQILKEHPVENTQLQNEKLYLYYLQNGRDMYVDQELDINRLSDYDVDHIVPQSFLKDDSIDNKVLTRSDKARGKSDNVPSEEVVKKMKNYWRQLLNAKLITQRKFDNLTKAERGGLSELDKAGFIKRQLVETRQITKHVAQILDSRMNTKYDENDKLIREVKVITLKSKLVSDFRKDFQFYKVREINNYHHAHDAYLNAVVGTALIKKYPKLESEFVYGDYKVYDVRKMIAKSEQEIGKATAKYFFYSNIMNFFKTEITLANGEIRKRPLIETNGETGEIVWDKGRDFATVRKVLSMPQVNIVKKTEVQTGGFSKESILPKRNSDKLIARKKDWDPKKYGGFDSPTVAYSVLVVAKVEKGKSKKLKSVKELLGITIMERSSFEKNPIDFLEAKGYKEVKKDLIIKLPKYSLFELENGRKRMLASAGELQKGNELALPSKYVNFLYLASHYEKLKGSPEDNEQKQLFVEQHKHYLDEIIEQISEFSKRVILADANLDKVLSAYNKHRDKPIREQAENIIHLFTLTNLGAPAAFKYFDTTIDRKRYTSTKEVLDATLIHQSITGLYETRIDLSQLGGDGGGGSGGSGGSGGTLNIEDEHRLHETSKEPDVSLGSTWLSDFPQAWAETGGMGLAVRQAPLIIPLKATSTPVSIKQYPMSQEARLGIKPHIQRLLDQGILVPCQSPWNTPLLPVKKPGTNDYRPVQDLREVNKRVEDIHPTVPNPYNLLSGLPPSHQWYTVLDLKDAFFCLRLHPTSQPLFAFEWRDPEMGISGQLTWTRLPQGFKNSPTLFDEALHRDLADFRIQHPDLILLQYVDDLLLAATSELDCQQGTRALLQTLGNLGYRASAKKAQICQKQVKYLGYLLKEGQRWLTEARKETVMGQPTPKTPRQLREFLGTAGFCRLWIPGFAEMAAPLYPLTKTGTLFNWGPDQQKAYQEIKQALLTAPALGLPDLTKPFELFVDEKQGYAKGVLTQKLGPWRRPVAYLSKKLDPVAAGWPPCLRMVAAIAVLTKDAGKLTMGQPLVILAPHAVEALVKQPPDRWLSNARMTHYQALLLDTDRVQFGPVVALNPATLLPLPEEGLQHNCLDILAEAHGTRPDLTDQPLPDADHTWYTDGSSLLQEGQRKAGAAVTTETEVIWAKALPAGTSAQRAELIALTQALKMAEGKKLNVYTDSRYAFATAHIHGEIYRRRGLLTSEGKEIKNKDEILALLKALFLPKRLSIIHCPGHQKGHSAEARGNRMADQAARKAAITETPDTSTLLAGKRTADGSEFEKRTADGSEFESPKKKAKVE

SEQ ID NO: 6043 - protein, 2094 aa, synthetic construct; identical to SEQ ID NO: 6041

SEQ ID NO: 6044 - protein, 2092 aa, synthetic construct
MPAAKRVKLDGGDKKYSIGLDIGTNSVGWAVITDEYKVPSKKFKVLGNTDRHSIKKNLIGALLFDSGETAEATRLKRTARRRYTRRKNRICYLQEIFSNEMAKVDDSFFHRLEESFLVEEDKKHERHPIFGNIVDEVAYHEKYPTIYHLRKKLVDSTDKADLRLIYLALAHMIKFRGHFLIEGDLNPDNSDVDKLFIQLVQTYNQLFEENPINASGVDAKAILSARLSKSRRLENLIAQLPGEKKNGLFGNLIALSLGLTPNFKSNFDLAEDAKLQLSKDTYDDDLDNLLAQIGDQYADLFLAAKNLSDAILLSDILRVNTEITKAPLSASMIKRYDEHHQDLTLLKALVRQQLPEKYKEIFFDQSKNGYAGYIDGGASQEEFYKFIKPILEKMDGTEELLVKLNREDLLRKQRTFDNGSIPHQIHLGELHAILRRQEDFYPFLKDNREKIEKILTFRIPYYVGPLARGNSRFAWMTRKSEETITPWNFEEVVDKGASAQSFIERMTNFDKNLPNEKVLPKHSLLYEYFTVYNELTKVKYVTEGMRKPAFLSGEQKKAIVDLLFKTNRKVTVKQLKEDYFKKIECFDSVEISGVEDRFNASLGTYHDLLKIIKDKDFLDNEENEDILEDIVLTLTLFEDREMIEERLKTYAHLFDDKVMKQLKRRRYTGWGRLSRKLINGIRDKQSGKTILDFLKSDGFANRNFMQLIHDDSLTFKEDIQKAQVSGQGDSLHEHIANLAGSPAIKKGILQTVKVVDELVKVMGRHKPENIVIEMARENQTTQKGQKNSRERMKRIEEGIKELGSQILKEHPVENTQLQNEKLYLYYLQNGRDMYVDQELDINRLSDYDVDHIVPQSFLKDDSIDNKVLTRSDKARGKSDNVPSEEVVKKMKNYWRQLLNAKLITQRKFDNLTKAERGGLSELDKAGFIKRQLVETRQITKHVAQILDSRMNTKYDENDKLIREVKVITLKSKLVSDFRKDFQFYKVREINNYHHAHDAYLNAVVGTALIKKYPKLESEFVYGDYKVYDVRKMIAKSEQEIGKATAKYFFYSNIMNFFKTEITLANGEIRKRPLIETNGETGEIVWDKGRDFATVRKVLSMPQVNIVKKTEVQTGGFSKESILPKRNSDKLIARKKDWDPKKYGGFDSPTVAYSVLVVAKVEKGKSKKLKSVKELLGITIMERSSFEKNPIDFLEAKGYKEVKKDLIIKLPKYSLFELENGRKRMLASAGELQKGNELALPSKYVNFLYLASHYEKLKGSPEDNEQKQLFVEQHKHYLDEIIEQISEFSKRVILADANLDKVLSAYNKHRDKPIREQAENIIHLFTLTNLGAPAAFKYFDTTIDRKRYTSTKEVLDATLIHQSITGLYETRIDLSQLGGDGGGGSGGSGGSGGVLNLEEEYRLHEKPVPSSIDPSWLQLFPTVWAERAGMGLANQVPPVVVELRSGASPVAVRQYPMSKEAREGIRPHIQRFLDLGVLVPCQSPWNTPLLPVKKPGTNDYRPVQDLREINKRVQDIHPTVPNPYNLLSSLPPSHTWYSVLDLKDAFFCLKLHPNSQPLFAFEWRDPEKGNTGQLTWTRLPQGFKNSPTLFDEALHRDLAPFRALNPQVVLLQYVDDLLVAAPTYRDCKEGTQKLLQELSKLGYRVSAKKAQLCQKEVTYLGYLLKEGKRWLTPARKATVMKIPPPTTPRQVREFLGTAGFCRLWIPGFASLAAPLYPLTKESIPFIWTEEHQKAFDRIKEALLSAPALALPDLTKPFTLYVDERAGVARGVLTQTLGPWRRPVAYLSKKLDPVASGWPTCLKAVAAVALLLKDADKLTLGQNVTVIASHSLESIVRQPPDRWMTNARMTHYQSLLLNERVSFAPPAVLNPATLLPVESEATPVHRCSEILAEETGTRRDLKDQPLPGVPAWYTDGSSFIAEGKRRAGAAIVDGKRTVWASSLPEGTSAQKAELVALTQALRLAEGKDINIYTDSRYAFATAHIHGAIYKQRGLLTSAGKDIKNKEEILALLEAIHLPKRVAIIHCPGHQKGNDPVATGNRRADEAAKQAALSTRVLAETTKPAGKRTADGSEFEKRTADGSEFESPKKKAKVE

SEQ ID NO: 6045 - protein, 2099 aa, synthetic construct
MPAAKRVKLDGGDKKYSIGLDIGTNSVGWAVITDEYKVPSKKFKVLGNTDRHSIKKNLIGALLFDSGETAEATRLKRTARRRYTRRKNRICYLQEIFSNEMAKVDDSFFHRLEESFLVEEDKKHERHPIFGNIVDEVAYHEKYPTIYHLRKKLVDSTDKADLRLIYLALAHMIKFRGHFLIEGDLNPDNSDVDKLFIQLVQTYNQLFEENPINASGVDAKAILSARLSKSRRLENLIAQLPGEKKNGLFGNLIALSLGLTPNFKSNFDLAEDAKLQLSKDTYDDDLDNLLAQIGDQYADLFLAAKNLSDAILLSDILRVNTEITKAPLSASMIKRYDEHHQDLTLLKALVRQQLPEKYKEIFFDQSKNGYAGYIDGGASQEEFYKFIKPILEKMDGTEELLVKLNREDLLRKQRTFDNGSIPHQIHLGELHAILRRQEDFYPFLKDNREKIEKILTFRIPYYVGPLARGNSRFAWMTRKSEETITPWNFEEVVDKGASAQSFIERMTNFDKNLPNEKVLPKHSLLYEYFTVYNELTKVKYVTEGMRKPAFLSGEQKKAIVDLLFKTNRKVTVKQLKEDYFKKIECFDSVEISGVEDRFNASLGTYHDLLKIIKDKDFLDNEENEDILEDIVLTLTLFEDREMIEERLKTYAHLFDDKVMKQLKRRRYTGWGRLSRKLINGIRDKQSGKTILDFLKSDGFANRNFMQLIHDDSLTFKEDIQKAQVSGQGDSLHEHIANLAGSPAIKKGILQTVKVVDELVKVMGRHKPENIVIEMARENQTTQKGQKNSRERMKRIEEGIKELGSQILKEHPVENTQLQNEKLYLYYLQNGRDMYVDQELDINRLSDYDVDHIVPQSFLKDDSIDNKVLTRSDKARGKSDNVPSEEVVKKMKNYWRQLLNAKLITQRKFDNLTKAERGGLSELDKAGFIKRQLVETRQITKHVAQILDSRMNTKYDENDKLIREVKVITLKSKLVSDFRKDFQFYKVREINNYHHAHDAYLNAVVGTALIKKYPKLESEFVYGDYKVYDVRKMIAKSEQEIGKATAKYFFYSNIMNFFKTEITLANGEIRKRPLIETNGETGEIVWDKGRDFATVRKVLSMPQVNIVKKTEVQTGGFSKESILPKRNSDKLIARKKDWDPKKYGGFDSPTVAYSVLVVAKVEKGKSKKLKSVKELLGITIMERSSFEKNPIDFLEAKGYKEVKKDLIIKLPKYSLFELENGRKRMLASAGELQKGNELALPSKYVNFLYLASHYEKLKGSPEDNEQKQLFVEQHKHYLDEIIEQISEFSKRVILADANLDKVLSAYNKHRDKPIREQAENIIHLFTLTNLGAPAAFKYFDTTIDRKRYTSTKEVLDATLIHQSITGLYETRIDLSQLGGDGGGGSGGSGGSGGSGGTAPLEEEYRLFLEAPIQNVTLLEQWKREIPKVWAEINPPGLASTQAPIHVQLLSTALPVRVRQYPITLEAKRSLRETIRKFRAAGILRPVHSPWNTPLLPVRKSGTSEYRMVQDLREVNKRVETIHPTVPNPYTLLSLLPPDRIWYSVLDLKDAFFCIPLAPESQLIFAFEWADAEEGESGQLTWTRLPQGFKNSPTLFNEALNRDLQGFRLDHPSVSLLQYVDDLLIAADTQAACLSATRDLLMTLAELGYRVSGKKAQLCQEEVTYLGFKIHKGSRSLSNSRTQAILQIPVPKTKRQVREFLGTIGYCRLWIPGFAELAQPLYAATRPGNDPLVWGEKEEEAFQSLKLALTQPPALALPSLDKPFQLFVEETSGAAKGVLTQALGPWKRPVAYLSKRLDPVAAGWPRCLRAIAAAALLTREASKLTFGQDIEITSSHNLESLLRSPPDKWLTNARITQYQVLLLDPPRVRFKQTAALNPATLLPETDDTLPIHHCLDTLDSLTSTRPDLTDQPLAQAEATLFTDGSSYIRDGKRYAGAAVVTLDSVIWAEPLPIGTSAQKAELIALTKALEWSKDKSVNIYTDSRYAFATLHVHGMIYRERGWLTAGGKAIKNAPEILALLTAVWLPKRVAVMHCKGHQKDDAPTSTGNRRADEVAREVAIRPLSTQATISAGKRTADGSEFEKRTADGSEFESPKKKAKVE

SEQ ID NO: 6046 - protein, 2103 aa, synthetic construct
MPAAKRVKLDGGDKKYSIGLDIGTNSVGWAVITDEYKVPSKKFKVLGNTDRHSIKKNLIGALLFDSGETAEATRLKRTARRRYTRRKNRICYLQEIFSNEMAKVDDSFFHRLEESFLVEEDKKHERHPIFGNIVDEVAYHEKYPTIYHLRKKLVDSTDKADLRLIYLALAHMIKFRGHFLIEGDLNPDNSDVDKLFIQLVQTYNQLFEENPINASGVDAKAILSARLSKSRRLENLIAQLPGEKKNGLFGNLIALSLGLTPNFKSNFDLAEDAKLQLSKDTYDDDLDNLLAQIGDQYADLFLAAKNLSDAILLSDILRVNTEITKAPLSASMIKRYDEHHQDLTLLKALVRQQLPEKYKEIFFDQSKNGYAGYIDGGASQEEFYKFIKPILEKMDGTEELLVKLNREDLLRKQRTFDNGSIPHQIHLGELHAILRRQEDFYPFLKDNREKIEKILTFRIPYYVGPLARGNSRFAWMTRKSEETITPWNFEEVVDKGASAQSFIERMTNFDKNLPNEKVLPKHSLLYEYFTVYNELTKVKYVTEGMRKPAFLSGEQKKAIVDLLFKTNRKVTVKQLKEDYFKKIECFDSVEISGVEDRFNASLGTYHDLLKIIKDKDFLDNEENEDILEDIVLTLTLFEDREMIEERLKTYAHLFDDKVMKQLKRRRYTGWGRLSRKLINGIRDKQSGKTILDFLKSDGFANRNFMQLIHDDSLTFKEDIQKAQVSGQGDSLHEHIANLAGSPAIKKGILQTVKVVDELVKVMGRHKPENIVIEMARENQTTQKGQKNSRERMKRIEEGIKELGSQILKEHPVENTQLQNEKLYLYYLQNGRDMYVDQELDINRLSDYDVDHIVPQSFLKDDSIDNKVLTRSDKARGKSDNVPSEEVVKKMKNYWRQLLNAKLITQRKFDNLTKAERGGLSELDKAGFIKRQLVETRQITKHVAQILDSRMNTKYDENDKLIREVKVITLKSKLVSDFRKDFQFYKVREINNYHHAHDAYLNAVVGTALIKKYPKLESEFVYGDYKVYDVRKMIAKSEQEIGKATAKYFFYSNIMNFFKTEITLANGEIRKRPLIETNGETGEIVWDKGRDFATVRKVLSMPQVNIVKKTEVQTGGFSKESILPKRNSDKLIARKKDWDPKKYGGFDSPTVAYSVLVVAKVEKGKSKKLKSVKELLGITIMERSSFEKNPIDFLEAKGYKEVKKDLIIKLPKYSLFELENGRKRMLASAGELQKGNELALPSKYVNFLYLASHYEKLKGSPEDNEQKQLFVEQHKHYLDEIIEQISEFSKRVILADANLDKVLSAYNKHRDKPIREQAENIIHLFTLTNLGAPAAFKYFDTTIDRKRYTSTKEVLDATLIHQSITGLYETRIDLSQLGGDGGGGSGGSGGSGGSGGTVSLQDEHRLFDIPVTTSLPDVWLQDFPQAWAETGGLGRAKCQAPIIIDLKPTAVPVSIKQYPMSLEAHMGIRQHIIKFLELGVLRPCRSPWNTPLLPVKKPGTQDYRPVQDLREINKRTVDIHPTVPNPYNLLSTLKPDYSWYTVLDLKDAFFCLPLAPQSQELFAFEWKDPERGISGQLTWTRLPQGFKNSPTLFNEALHRDLTDFRTQHPEVTLLQYVDDLLLAAPTKKACTQGTRHLLQELGEKGYRASAKKAQICQTKVTYLGYILSEGKRWLTPGRIETVARIPPPRNPREVREFLGTAGFCRLWIPGFAELAAPLYALTKPSTPFTWQTEHQLAFEALKKALLSAPALGLPDTSKPFTLFLDERQGIAKGVLTQKLGPWKRPVAYLSKKLDPVAAGWPPCLRIMAATAMLVKDSAKLTLGQPLTVITPHTLEAIVRQPPDRWITNARLTHYQALLLDTDRVQFGPPVTLNPATLLPVPENQPSPHDCRQVLAETHGTREDLKDQELPDADHTWYTDGSSYLDSGTRRAGAAVVDGHNTIWAQSLPPGTSAQKAELIALTKALELSKGKKANIYTDSRYAFATAHTHGSIYERRGWLTSEGKEIKNKAEIIALLKALFLPQEVAIIHCPGHQKGQDPVAVGNRQADRVARQAAMAEVLTLATEPDNTSHITAGKRTADGSEFEKRTADGSEFESPKKKAKVE

SEQ ID NO: 6047 - protein, 2088 aa, synthetic construct
MPAAKRVKLDGGDKKYSIGLDIGTNSVGWAVITDEYKVPSKKFKVLGNTDRHSIKKNLIGALLFDSGETAEATRLKRTARRRYTRRKNRICYLQEIFSNEMAKVDDSFFHRLEESFLVEEDKKHERHPIFGNIVDEVAYHEKYPTIYHLRKKLVDSTDKADLRLIYLALAHMIKFRGHFLIEGDLNPDNSDVDKLFIQLVQTYNQLFEENPINASGVDAKAILSARLSKSRRLENLIAQLPGEKKNGLFGNLIALSLGLTPNFKSNFDLAEDAKLQLSKDTYDDDLDNLLAQIGDQYADLFLAAKNLSDAILLSDILRVNTEITKAPLSASMIKRYDEHHQDLTLLKALVRQQLPEKYKEIFFDQSKNGYAGYIDGGASQEEFYKFIKPILEKMDGTEELLVKLNREDLLRKQRTFDNGSIPHQIHLGELHAILRRQEDFYPFLKDNREKIEKILTFRIPYYVGPLARGNSRFAWMTRKSEETITPWNFEEVVDKGASAQSFIERMTNFDKNLPNEKVLPKHSLLYEYFTVYNELTKVKYVTEGMRKPAFLSGEQKKAIVDLLFKTNRKVTVKQLKEDYFKKIECFDSVEISGVEDRFNASLGTYHDLLKIIKDKDFLDNEENEDILEDIVLTLTLFEDREMIEERLKTYAHLFDDKVMKQLKRRRYTGWGRLSRKLINGIRDKQSGKTILDFLKSDGFANRNFMQLIHDDSLTFKEDIQKAQVSGQGDSLHEHIANLAGSPAIKKGILQTVKVVDELVKVMGRHKPENIVIEMARENQTTQKGQKNSRERMKRIEEGIKELGSQILKEHPVENTQLQNEKLYLYYLQNGRDMYVDQELDINRLSDYDVDHIVPQSFLKDDSIDNKVLTRSDKARGKSDNVPSEEVVKKMKNYWRQLLNAKLITQRKFDNLTKAERGGLSELDKAGFIKRQLVETRQITKHVAQILDSRMNTKYDENDKLIREVKVITLKSKLVSDFRKDFQFYKVREINNYHHAHDAYLNAVVGTALIKKYPKLESEFVYGDYKVYDVRKMIAKSEQEIGKATAKYFFYSNIMNFFKTEITLANGEIRKRPLIETNGETGEIVWDKGRDFATVRKVLSMPQVNIVKKTEVQTGGFSKESILPKRNSDKLIARKKDWDPKKYGGFDSPTVAYSVLVVAKVEKGKSKKLKSVKELLGITIMERSSFEKNPIDFLEAKGYKEVKKDLIIKLPKYSLFELENGRKRMLASAGELQKGNELALPSKYVNFLYLASHYEKLKGSPEDNEQKQLFVEQHKHYLDEIIEQISEFSKRVILADANLDKVLSAYNKHRDKPIREQAENIIHLFTLTNLGAPAAFKYFDTTIDRKRYTSTKEVLDATLIHQSITGLYETRIDLSQLGGDGGGGSGGSGGSGGSGGVPWLTQQPLQLTILVPLQEYQEKILSKTALPEDQKQQLKTLFVKYDNLWQHWENQVGHRKIRPHNIATGDYPPRPQKQYPINPKAKPSIQIVIDDLLKQGVLTPQNSTMNTPVYPVPKPDGRWRMVLDYREVNKTIPLTAAQNQHSAGILATIVRQKYKTTLDLANGFWAHPITPESYWLTAFTWQGKQYCWTRLPQGFLNSPALFTADVVDLLKEIPNVQVYVDDIYLSHDDPKEHVQQLEKVFQILLQAGYVVSLKKSEIGQKTVEFLGFNITKEGRGLTDTFKTKLLNITPPKDLKQLQSILGLLNFARNFIPNFAELVQPLYNLIASAKGKYIEWSEENTKQLNMVIEALNTASNLEERLPEQRLVIKVNTSPSAGYVRYYNETGKKPIMYLNYVFSKAELKFSMLEKLLTTMHKALIKAMDLAMGQEILVYSPIVSMTKIQKTPLPERKALPIRWITWMTYLEDPRIQFHYDKTLPELKHIPDVYTSSQSPVKHPSQYEGVFYTDGSAIKSPDPTKSNNAGMGIVHATYKPEYQVLNQWSIPLGNHTAQMAEIAAVEFACKKALKIPGPVLVITDSFYVAESANKELPYWKSNGFVNNKKKPLKHISKWKSIAECLSMKPDITIQHEKGISLQIPVFILKGNALADKLATQGSYVVNAGKRTADGSEFEKRTADGSEFESPKKKAKVE

SEQ ID NO: 6048 - protein, 2128 aa, synthetic construct
MPAAKRVKLDGGDKKYSIGLDIGTNSVGWAVITDEYKVPSKKFKVLGNTDRHSIKKNLIGALLFDSGETAEATRLKRTARRRYTRRKNRICYLQEIFSNEMAKVDDSFFHRLEESFLVEEDKKHERHPIFGNIVDEVAYHEKYPTIYHLRKKLVDSTDKADLRLIYLALAHMIKFRGHFLIEGDLNPDNSDVDKLFIQLVQTYNQLFEENPINASGVDAKAILSARLSKSRRLENLIAQLPGEKKNGLFGNLIALSLGLTPNFKSNFDLAEDAKLQLSKDTYDDDLDNLLAQIGDQYADLFLAAKNLSDAILLSDILRVNTEITKAPLSASMIKRYDEHHQDLTLLKALVRQQLPEKYKEIFFDQSKNGYAGYIDGGASQEEFYKFIKPILEKMDGTEELLVKLNREDLLRKQRTFDNGSIPHQIHLGELHAILRRQEDFYPFLKDNREKIEKILTFRIPYYVGPLARGNSRFAWMTRKSEETITPWNFEEVVDKGASAQSFIERMTNFDKNLPNEKVLPKHSLLYEYFTVYNELTKVKYVTEGMRKPAFLSGEQKKAIVDLLFKTNRKVTVKQLKEDYFKKIECFDSVEISGVEDRFNASLGTYHDLLKIIKDKDFLDNEENEDILEDIVLTLTLFEDREMIEERLKTYAHLFDDKVMKQLKRRRYTGWGRLSRKLINGIRDKQSGKTILDFLKSDGFANRNFMQLIHDDSLTFKEDIQKAQVSGQGDSLHEHIANLAGSPAIKKGILQTVKVVDELVKVMGRHKPENIVIEMARENQTTQKGQKNSRERMKRIEEGIKELGSQILKEHPVENTQLQNEKLYLYYLQNGRDMYVDQELDINRLSDYDVDHIVPQSFLKDDSIDNKVLTRSDKARGKSDNVPSEEVVKKMKNYWRQLLNAKLITQRKFDNLTKAERGGLSELDKAGFIKRQLVETRQITKHVAQILDSRMNTKYDENDKLIREVKVITLKSKLVSDFRKDFQFYKVREINNYHHAHDAYLNAVVGTALIKKYPKLESEFVYGDYKVYDVRKMIAKSEQEIGKATAKYFFYSNIMNFFKTEITLANGEIRKRPLIETNGETGEIVWDKGRDFATVRKVLSMPQVNIVKKTEVQTGGFSKESILPKRNSDKLIARKKDWDPKKYGGFDSPTVAYSVLVVAKVEKGKSKKLKSVKELLGITIMERSSFEKNPIDFLEAKGYKEVKKDLIIKLPKYSLFELENGRKRMLASAGELQKGNELALPSKYVNFLYLASHYEKLKGSPEDNEQKQLFVEQHKHYLDEIIEQISEFSKRVILADANLDKVLSAYNKHRDKPIREQAENIIHLFTLTNLGAPAAFKYFDTTIDRKRYTSTKEVLDATLIHQSITGLYETRIDLSQLGGDGGGGSGGSGGSGGSGGLLGRDLLTKLKAQIQFSTEGPQVTWEDRPAMCLVLNLEEEYRLHEKPVPPSIDPSWLQLFPMVWAEKAGMGLANQVPPVVVELKSDASPVAVRQYPMSKEAREGIRPHIQRFLDLGILVPCQSPWNTPLLPVKKPGTNDYRPVQDLREVNKRVQDIHPTVPNPYNLLSSLPPSHTWYSVLDLKDAFFCLKLHPNSQPLFAFEWRDPEKGNTGQLTWTRLPQGFKNSPTLFNEALHRDLASFRALNPQVVMLQYVDDLLVAAPTYRDCKEGTRRLLQELSKLGYRVSAKKAQLCREEVTYLGYLLKGGKRWLTPARKATVMKIPTPTTPRQVREFLGTAGFCRLWIPGFASLAAPLYPLTRPKVPFTWTEAHQEAFGRIKEALLSAPALALPDLTKPFALYVDEKEGVARGVLTQTLGPWRRPVAYLSKKLDPVASGWPTCLKAIAAVALLLKDADKLTLGQNVLVIAPHNLESIVRQPPDRWMTNARMTHYQSLLLNERVSFAPPAILNPATLLPVESDDTPIHICSEILAEETGTRPDLRDQPLPGVPAWYTDGSSFIMDGRRQAGAAIVDNKRTVWASNLPEGTSAQKAELIALTQALRLAEGKSINIYTDSRYAFATAHVHGAIYKQRGWLTSAGKDIKNKEEILALLEAIHLPKRVAIIHCPGHQRGTDPVATGNRKADEAAKQAAQSTRILTETTKNAGKRTADGSEFEKRTADGSEFESPKKKAKVE

SEQ ID NO: 6049 - protein, 2219 aa, synthetic construct
MPAAKRVKLDGGDKKYSIGLDIGTNSVGWAVITDEYKVPSKKFKVLGNTDRHSIKKNLIGALLFDSGETAEATRLKRTARRRYTRRKNRICYLQEIFSNEMAKVDDSFFHRLEESFLVEEDKKHERHPIFGNIVDEVAYHEKYPTIYHLRKKLVDSTDKADLRLIYLALAHMIKFRGHFLIEGDLNPDNSDVDKLFIQLVQTYNQLFEENPINASGVDAKAILSARLSKSRRLENLIAQLPGEKKNGLFGNLIALSLGLTPNFKSNFDLAEDAKLQLSKDTYDDDLDNLLAQIGDQYADLFLAAKNLSDAILLSDILRVNTEITKAPLSASMIKRYDEHHQDLTLLKALVRQQLPEKYKEIFFDQSKNGYAGYIDGGASQEEFYKFIKPILEKMDGTEELLVKLNREDLLRKQRTFDNGSIPHQIHLGELHAILRRQEDFYPFLKDNREKIEKILTFRIPYYVGPLARGNSRFAWMTRKSEETITPWNFEEVVDKGASAQSFIERMTNFDKNLPNEKVLPKHSLLYEYFTVYNELTKVKYVTEGMRKPAFLSGEQKKAIVDLLFKTNRKVTVKQLKEDYFKKIECFDSVEISGVEDRFNASLGTYHDLLKIIKDKDFLDNEENEDILEDIVLTLTLFEDREMIEERLKTYAHLFDDKVMKQLKRRRYTGWGRLSRKLINGIRDKQSGKTILDFLKSDGFANRNFMQLIHDDSLTFKEDIQKAQVSGQGDSLHEHIANLAGSPAIKKGILQTVKVVDELVKVMGRHKPENIVIEMARENQTTQKGQKNSRERMKRIEEGIKELGSQILKEHPVENTQLQNEKLYLYYLQNGRDMYVDQELDINRLSDYDVDHIVPQSFLKDDSIDNKVLTRSDKARGKSDNVPSEEVVKKMKNYWRQLLNAKLITQRKFDNLTKAERGGLSELDKAGFIKRQLVETRQITKHVAQILDSRMNTKYDENDKLIREVKVITLKSKLVSDFRKDFQFYKVREINNYHHAHDAYLNAVVGTALIKKYPKLESEFVYGDYKVYDVRKMIAKSEQEIGKATAKYFFYSNIMNFFKTEITLANGEIRKRPLIETNGETGEIVWDKGRDFATVRKVLSMPQVNIVKKTEVQTGGFSKESILPKRNSDKLIARKKDWDPKKYGGFDSPTVAYSVLVVAKVEKGKSKKLKSVKELLGITIMERSSFEKNPIDFLEAKGYKEVKKDLIIKLPKYSLFELENGRKRMLASAGELQKGNELALPSKYVNFLYLASHYEKLKGSPEDNEQKQLFVEQHKHYLDEIIEQISEFSKRVILADANLDKVLSAYNKHRDKPIREQAENIIHLFTLTNLGAPAAFKYFDTTIDRKRYTSTKEVLDATLIHQSITGLYETRIDLSQLGGDGGGGSGGSGGSGGSGGTLGDQGSRGSDPLPEPRVTLTVEGIPTEFLVNTGAEHSVLTKPMGKMGSKRTVVAGATGSKVYPWTTKRLLKIGQKQVTHSFLVIPECPAPLLGRDLLTKLKAQIQFSTEGPQVTWEDRPAMCLVLNLEEEYRLHEKPVPPSIDPSWLQLFPMVWAEKAGMGLANQVPPVVVELKSDASPVAVRQYPMSKEAREGIRPHIQRFLDLGILVPCQSPWNTPLLPVKKPGTNDYRPVQDLREVNKRVQDIHPTVPNPYNLLSSLPPSHTWYSVLDLKDAFFCLKLHPNSQPLFAFEWRDPEKGNTGQLTWTRLPQGFKNSPTLFNEALHRDLASFRALNPQVVMLQYVDDLLVAAPTYRDCKEGTRRLLQELSKLGYRVSAKKAQLCREEVTYLGYLLKGGKRWLTPARKATVMKIPTPTTPRQVREFLGKAGFCRLFIPGFASLAAPLYPLTRPKVPFTWTEAHQEAFGRIKEALLSAPALALPDLTKPFALYVDEKEGVARGVLTQTLGPWRRPVAYLSKKLDPVASGWPTCLKAIAAVALLLKDADKLTLGQNVLVIAPHNLESIVRQPPDRWMTNARMTHYQSLLLNERVSFAPPAILNPATLLPVESDDTPIHICSEILAEETGTRPDLRDQPLPGVPAWYTDGSSFIMDGRRQAGAAIVDNKRTVWASNLPEGTSAQKAELIALTQALRLAEGKSINIYTDSRYAFATAHVHGAIYKQRGWLTSAGKDIKNKEEILALLEAIHLPKRVAIIHCPGHQRGTDPVATGNRKADEAAKQAAQSTRILTETTKNAGKRTADGSEFEKRTADGSEFESPKKKAKVE

SEQ ID NO: 6050 - protein, 2097 aa, synthetic construct
MPAAKRVKLDGGDKKYSIGLDIGTNSVGWAVITDEYKVPSKKFKVLGNTDRHSIKKNLIGALLFDSGETAEATRLKRTARRRYTRRKNRICYLQEIFSNEMAKVDDSFFHRLEESFLVEEDKKHERHPIFGNIVDEVAYHEKYPTIYHLRKKLVDSTDKADLRLIYLALAHMIKFRGHFLIEGDLNPDNSDVDKLFIQLVQTYNQLFEENPINASGVDAKAILSARLSKSRRLENLIAQLPGEKKNGLFGNLIALSLGLTPNFKSNFDLAEDAKLQLSKDTYDDDLDNLLAQIGDQYADLFLAAKNLSDAILLSDILRVNTEITKAPLSASMIKRYDEHHQDLTLLKALVRQQLPEKYKEIFFDQSKNGYAGYIDGGASQEEFYKFIKPILEKMDGTEELLVKLNREDLLRKQRTFDNGSIPHQIHLGELHAILRRQEDFYPFLKDNREKIEKILTFRIPYYVGPLARGNSRFAWMTRKSEETITPWNFEEVVDKGASAQSFIERMTNFDKNLPNEKVLPKHSLLYEYFTVYNELTKVKYVTEGMRKPAFLSGEQKKAIVDLLFKTNRKVTVKQLKEDYFKKIECFDSVEISGVEDRFNASLGTYHDLLKIIKDKDFLDNEENEDILEDIVLTLTLFEDREMIEERLKTYAHLFDDKVMKQLKRRRYTGWGRLSRKLINGIRDKQSGKTILDFLKSDGFANRNFMQLIHDDSLTFKEDIQKAQVSGQGDSLHEHIANLAGSPAIKKGILQTVKVVDELVKVMGRHKPENIVIEMARENQTTQKGQKNSRERMKRIEEGIKELGSQILKEHPVENTQLQNEKLYLYYLQNGRDMYVDQELDINRLSDYDVDHIVPQSFLKDDSIDNKVLTRSDKARGKSDNVPSEEVVKKMKNYWRQLLNAKLITQRKFDNLTKAERGGLSELDKAGFIKRQLVETRQITKHVAQILDSRMNTKYDENDKLIREVKVITLKSKLVSDFRKDFQFYKVREINNYHHAHDAYLNAVVGTALIKKYPKLESEFVYGDYKVYDVRKMIAKSEQEIGKATAKYFFYSNIMNFFKTEITLANGEIRKRPLIETNGETGEIVWDKGRDFATVRKVLSMPQVNIVKKTEVQTGGFSKESILPKRNSDKLIARKKDWDPKKYGGFDSPTVAYSVLVVAKVEKGKSKKLKSVKELLGITIMERSSFEKNPIDFLEAKGYKEVKKDLIIKLPKYSLFELENGRKRMLASAGELQKGNELALPSKYVNFLYLASHYEKLKGSPEDNEQKQLFVEQHKHYLDEIIEQISEFSKRVILADANLDKVLSAYNKHRDKPIREQAENIIHLFTLTNLGAPAAFKYFDTTIDRKRYTSTKEVLDATLIHQSITGLYETRIDLSQLGGDGGGGSGGSGGSGGSGGTLNIEDEYRLHETSKGPDVPLGSTWLSDFPQAWAETGGMGLAVRQAPLIIPLKATSTPVSIKQYPMSQEARLGIKPHIQRLLDQGILVPCQSPWNTPLLPVKKPGTNDYRPVQDLREVNKRVEDIHPTVPNPYNLLSGLPPSHQWYTVLDLKDAFFCLRLHPTSQSLFAFEWRDPEMGISGQLTWTRLPQGFKNSPTLFNEALHRDLADFRIQHPDLILLQYVDDLLLAATSELDCQQGTRALLQTLGDLGYRASAKKAQICQKQVKYLGYLLKEGQRWLTEARKETVMGQPTPKTPRQLREFLGTAGFCRLWIPGFAEMAAPLYPLTKPGTLFEWGPDQQKAYQEIKQALLTAPALGLPDLTKPFELFVDEKQGYAKGVLTQKLGPWRRPVAYLSKKLDPVAAGWPPCLRMVAAIAVLTKDAGKLTMGQPLVILAPHAVEALVKQPPDRWLSNARMTHYQALLLDTDRVQFGPIVALNPATLLPLPEEGLQHDCLDILAEAHGTRPDLTDQPLPDADHTWYTDGSSFLQEGQRKAGAAVTTETEVVWAKALPAGTSAQRAELIALTQALKMAEGKKLNVYTDSRYAFATAHIHGEIYRRRGWLTSEGKEIKNKDEILALLKALFLPKRLSIIHCPGHQKGNRAEARGNRMADQAAREVATRETPETSTLLAGKRTADGSEFEKRTADGSEFESPKKKAKVE

SEQ ID NO: 6051 - protein, 2088 aa, synthetic construct
MPAAKRVKLDGGDKKYSIGLDIGTNSVGWAVITDEYKVPSKKFKVLGNTDRHSIKKNLIGALLFDSGETAEATRLKRTARRRYTRRKNRICYLQEIFSNEMAKVDDSFFHRLEESFLVEEDKKHERHPIFGNIVDEVAYHEKYPTIYHLRKKLVDSTDKADLRLIYLALAHMIKFRGHFLIEGDLNPDNSDVDKLFIQLVQTYNQLFEENPINASGVDAKAILSARLSKSRRLENLIAQLPGEKKNGLFGNLIALSLGLTPNFKSNFDLAEDAKLQLSKDTYDDDLDNLLAQIGDQYADLFLAAKNLSDAILLSDILRVNTEITKAPLSASMIKRYDEHHQDLTLLKALVRQQLPEKYKEIFFDQSKNGYAGYIDGGASQEEFYKFIKPILEKMDGTEELLVKLNREDLLRKQRTFDNGSIPHQIHLGELHAILRRQEDFYPFLKDNREKIEKILTFRIPYYVGPLARGNSRFAWMTRKSEETITPWNFEEVVDKGASAQSFIERMTNFDKNLPNEKVLPKHSLLYEYFTVYNELTKVKYVTEGMRKPAFLSGEQKKAIVDLLFKTNRKVTVKQLKEDYFKKIECFDSVEISGVEDRFNASLGTYHDLLKIIKDKDFLDNEENEDILEDIVLTLTLFEDREMIEERLKTYAHLFDDKVMKQLKRRRYTGWGRLSRKLINGIRDKQSGKTILDFLKSDGFANRNFMQLIHDDSLTFKEDIQKAQVSGQGDSLHEHIANLAGSPAIKKGILQTVKVVDELVKVMGRHKPENIVIEMARENQTTQKGQKNSRERMKRIEEGIKELGSQILKEHPVENTQLQNEKLYLYYLQNGRDMYVDQELDINRLSDYDVDHIVPQSFLKDDSIDNKVLTRSDKARGKSDNVPSEEVVKKMKNYWRQLLNAKLITQRKFDNLTKAERGGLSELDKAGFIKRQLVETRQITKHVAQILDSRMNTKYDENDKLIREVKVITLKSKLVSDFRKDFQFYKVREINNYHHAHDAYLNAVVGTALIKKYPKLESEFVYGDYKVYDVRKMIAKSEQEIGKATAKYFFYSNIMNFFKTEITLANGEIRKRPLIETNGETGEIVWDKGRDFATVRKVLSMPQVNIVKKTEVQTGGFSKESILPKRNSDKLIARKKDWDPKKYGGFDSPTVAYSVLVVAKVEKGKSKKLKSVKELLGITIMERSSFEKNPIDFLEAKGYKEVKKDLIIKLPKYSLFELENGRKRMLASAGELQKGNELALPSKYVNFLYLASHYEKLKGSPEDNEQKQLFVEQHKHYLDEIIEQISEFSKRVILADANLDKVLSAYNKHRDKPIREQAENIIHLFTLTNLGAPAAFKYFDTTIDRKRYTSTKEVLDATLIHQSITGLYETRIDLSQLGGDGGGGSGGSGGSGGSGGIPWLMKKPLQLTTLVPLQEYEERLLKQTMLTGSYKEKLQSLFLKYDALWQHWENQVGHRRIKPHHIATGTVNPRPQKQYPINPKAKASIQTVINDLLKQGVLIQQNSIMNTPVYPVPKPDGKWRMVLDYREVNKTIPLIAAQNQHSAGILSSIFRGKYKTTLDLSNGFWAHSITPESYWLTAFTWLGQQYCWTRLPQGFLNSPALFNADVVDLLKEVPNVQVYVDDIYISHDDPREHLEQLEKVFSLLLNAGYVVSLKKSEIAQHEVEFLGFNITKEGRGLTETFKQKLLNITPPRDLKQLQSILGKLNFARNFIPNFSELVKPLYNIIATAPGKYITWTTDNSQQLQNIISMLNSAENLEERNPEVRLIMKVNTSPSAGYIRFYNEFAKRPIMYLNYVYTKAEVKFTNTEKLLTTIHKGLIKALDLGMGQEILVYSPIVSMTKIQKTPLPERKALPIRWITWMSYLEDPRIQFHYDKTLPELQQVPTVTDDIIAKIKHPSEFSMVFYTDGSAIKHPNVNKSHNAGMGIAQVQFKPEFTVINTWSIPLGDHTAQLAEVAAVEFACKKALKIDGPVLIVTDSFYVAESVNKELPYWQSNGFFNNKKKPLKHVSKWKSIADCIQLKPDIIIIHEKGHQPTASTFHTEGNNLADKLATQGSYVVNAGKRTADGSEFEKRTADGSEFESPKKKAKVE

SEQ ID NO: 6052 - protein, 2177 aa, synthetic construct
MPAAKRVKLDGGDKKYSIGLDIGTNSVGWAVITDEYKVPSKKFKVLGNTDRHSIKKNLIGALLFDSGETAEATRLKRTARRRYTRRKNRICYLQEIFSNEMAKVDDSFFHRLEESFLVEEDKKHERHPIFGNIVDEVAYHEKYPTIYHLRKKLVDSTDKADLRLIYLALAHMIKFRGHFLIEGDLNPDNSDVDKLFIQLVQTYNQLFEENPINASGVDAKAILSARLSKSRRLENLIAQLPGEKKNGLFGNLIALSLGLTPNFKSNFDLAEDAKLQLSKDTYDDDLDNLLAQIGDQYADLFLAAKNLSDAILLSDILRVNTEITKAPLSASMIKRYDEHHQDLTLLKALVRQQLPEKYKEIFFDQSKNGYAGYIDGGASQEEFYKFIKPILEKMDGTEELLVKLNREDLLRKQRTFDNGSIPHQIHLGELHAILRRQEDFYPFLKDNREKIEKILTFRIPYYVGPLARGNSRFAWMTRKSEETITPWNFEEVVDKGASAQSFIERMTNFDKNLPNEKVLPKHSLLYEYFTVYNELTKVKYVTEGMRKPAFLSGEQKKAIVDLLFKTNRKVTVKQLKEDYFKKIECFDSVEISGVEDRFNASLGTYHDLLKIIKDKDFLDNEENEDILEDIVLTLTLFEDREMIEERLKTYAHLFDDKVMKQLKRRRYTGWGRLSRKLINGIRDKQSGKTILDFLKSDGFANRNFMQLIHDDSLTFKEDIQKAQVSGQGDSLHEHIANLAGSPAIKKGILQTVKVVDELVKVMGRHKPENIVIEMARENQTTQKGQKNSRERMKRIEEGIKELGSQILKEHPVENTQLQNEKLYLYYLQNGRDMYVDQELDINRLSDYDVDHIVPQSFLKDDSIDNKVLTRSDKARGKSDNVPSEEVVKKMKNYWRQLLNAKLITQRKFDNLTKAERGGLSELDKAGFIKRQLVETRQITKHVAQILDSRMNTKYDENDKLIREVKVITLKSKLVSDFRKDFQFYKVREINNYHHAHDAYLNAVVGTALIKKYPKLESEFVYGDYKVYDVRKMIAKSEQEIGKATAKYFFYSNIMNFFKTEITLANGEIRKRPLIETNGETGEIVWDKGRDFATVRKVLSMPQVNIVKKTEVQTGGFSKESILPKRNSDKLIARKKDWDPKKYGGFDSPTVAYSVLVVAKVEKGKSKKLKSVKELLGITIMERSSFEKNPIDFLEAKGYKEVKKDLIIKLPKYSLFELENGRKRMLASAGELQKGNELALPSKYVNFLYLASHYEKLKGSPEDNEQKQLFVEQHKHYLDEIIEQISEFSKRVILADANLDKVLSAYNKHRDKPIREQAENIIHLFTLTNLGAPAAFKYFDTTIDRKRYTSTKEVLDATLIHQSITGLYETRIDLSQLGGDGGGGSGGSGGSGGSGGMDPLQLLQPLEAEIKGTKLKAHWNSGATITCVPQAFLEEEVPIKNIWIKTIHGEKEQPVYYLTFKIQGRKVEAEVISSPYDYILVSPSDIPWLMKKPLQLTTLVPLQEYEERLLKQTMLTGSYKEKLQSLFLKYDALWQHWENQVGHRRIKPHHIATGTVNPRPQKQYPINPKAKASIQTVINDLLKQGVLIQQNSIMNTPVYPVPKPDGKWRMVLDYREVNKTIPLIAAQNQHSAGILSSIFRGKYKTTLDLSNGFWAHSITPESYWLTAFTWLGQQYCWTRLPQGFLNSPALFNADVVDLLKEVPNVQVYVDDIYISHDDPREHLEQLEKVFSLLLNAGYVVSLKKSEIAQHEVEFLGFNITKEGRGLTETFKQKLLNITPPRDLKQLQSILGKLNFARNFIPNFSELVKPLYNIIATAPGKYITWTTDNSQQLQNIISMLNSAENLEERNPEVRLIMKVNTSPSAGYIRFYNEFAKRPIMYLNYVYTKAEVKFTNTEKLLTTIHKGLIKALDLGMGQEILVYSPIVSMTKIQKTPLPERKALPIRWITWMSYLEDPRIQFHYDKTLPELQQVPTVTDDIIAKIKHPSEFSMVFYTDGSAIKHPNVNKSHNAGMGIAQVQFKPEFTVINTWSIPLGDHTAQLAEVAAVEFACKKALKIDGPVLIVTDSFYVAESVNKELPYWQSNGFFNNKKKPLKHVSKWKSIADCIQLKPDIIIIHEKGHQPTASTFHTEGNNLADKLATQGSYVVNAGKRTADGSEFEKRTADGSEFESPKKKAKVE

SEQ ID NO: 6053 - protein, 2095 aa, synthetic construct
MPAAKRVKLDGGDKKYSIGLDIGTNSVGWAVITDEYKVPSKKFKVLGNTDRHSIKKNLIGALLFDSGETAEATRLKRTARRRYTRRKNRICYLQEIFSNEMAKVDDSFFHRLEESFLVEEDKKHERHPIFGNIVDEVAYHEKYPTIYHLRKKLVDSTDKADLRLIYLALAHMIKFRGHFLIEGDLNPDNSDVDKLFIQLVQTYNQLFEENPINASGVDAKAILSARLSKSRRLENLIAQLPGEKKNGLFGNLIALSLGLTPNFKSNFDLAEDAKLQLSKDTYDDDLDNLLAQIGDQYADLFLAAKNLSDAILLSDILRVNTEITKAPLSASMIKRYDEHHQDLTLLKALVRQQLPEKYKEIFFDQSKNGYAGYIDGGASQEEFYKFIKPILEKMDGTEELLVKLNREDLLRKQRTFDNGSIPHQIHLGELHAILRRQEDFYPFLKDNREKIEKILTFRIPYYVGPLARGNSRFAWMTRKSEETITPWNFEEVVDKGASAQSFIERMTNFDKNLPNEKVLPKHSLLYEYFTVYNELTKVKYVTEGMRKPAFLSGEQKKAIVDLLFKTNRKVTVKQLKEDYFKKIECFDSVEISGVEDRFNASLGTYHDLLKIIKDKDFLDNEENEDILEDIVLTLTLFEDREMIEERLKTYAHLFDDKVMKQLKRRRYTGWGRLSRKLINGIRDKQSGKTILDFLKSDGFANRNFMQLIHDDSLTFKEDIQKAQVSGQGDSLHEHIANLAGSPAIKKGILQTVKVVDELVKVMGRHKPENIVIEMARENQTTQKGQKNSRERMKRIEEGIKELGSQILKEHPVENTQLQNEKLYLYYLQNGRDMYVDQELDINRLSDYDVDHIVPQSFLKDDSIDNKVLTRSDKARGKSDNVPSEEVVKKMKNYWRQLLNAKLITQRKFDNLTKAERGGLSELDKAGFIKRQLVETRQITKHVAQILDSRMNTKYDENDKLIREVKVITLKSKLVSDFRKDFQFYKVREINNYHHAHDAYLNAVVGTALIKKYPKLESEFVYGDYKVYDVRKMIAKSEQEIGKATAKYFFYSNIMNFFKTEITLANGEIRKRPLIETNGETGEIVWDKGRDFATVRKVLSMPQVNIVKKTEVQTGGFSKESILPKRNSDKLIARKKDWDPKKYGGFDSPTVAYSVLVVAKVEKGKSKKLKSVKELLGITIMERSSFEKNPIDFLEAKGYKEVKKDLIIKLPKYSLFELENGRKRMLASAGELQKGNELALPSKYVNFLYLASHYEKLKGSPEDNEQKQLFVEQHKHYLDEIIEQISEFSKRVILADANLDKVLSAYNKHRDKPIREQAENIIHLFTLTNLGAPAAFKYFDTTIDRKRYTSTKEVLDATLIHQSITGLYETRIDLSQLGGDGGGGSGGSGGSGGSGGVLNLEEEYRLHEKPVPSSIDPSWLQLFPTVWAERAGMGLANQVPPVVVELRSGASPVAVRQYPMSKEAREGIRPHIQRFLDLGVLVPCQSPWNTPLLPVKKPGTNDYRPVQDLREINKRVQDIHPTVPNPYNLLSSLPPSHTWYSVLDLKDAFFCLKLHPNSQPLFAFEWRDPEKGNTGQLTWTRLPQGFKNSPTLFDEALHRDLAPFRALNPQVVLLQYVDDLLVAAPTYRDCKEGTQKLLQELSKLGYRVSAKKAQLCQKEVTYLGYLLKEGKRWLTPARKATVMKIPPPTTPRQVREFLGTAGFCRLWIPGFASLAAPLYPLTKESIPFIWTEEHQKAFDRIKEALLSAPALALPDLTKPFTLYVDERAGVARGVLTQTLGPWRRPVAYLSKKLDPVASGWPTCLKAVAAVALLLKDADKLTLGQNVTVIASHSLESIVRQPPDRWMTNARMTHYQSLLLNERVSFAPPAVLNPATLLPVESEATPVHRCSEILAEETGTRRDLKDQPLPGVPAWYTDGSSFIAEGKRRAGAAIVDGKRTVWASSLPEGTSAQKAELVALTQALRLAEGKDINIYTDSRYAFATAHIHGAIYKQRGLLTSAGKDIKNKEEILALLEAIHLPKRVAIIHCPGHQKGNDPVATGNRRADEAAKQAALSTRVLAETTKPAGKRTADGSEFEKRTADGSEFESPKKKAKVE

SEQ ID NO: 6054 - protein, 2097 aa, synthetic construct
MPAAKRVKLDGGDKKYSIGLDIGTNSVGWAVITDEYKVPSKKFKVLGNTDRHSIKKNLIGALLFDSGETAEATRLKRTARRRYTRRKNRICYLQEIFSNEMAKVDDSFFHRLEESFLVEEDKKHERHPIFGNIVDEVAYHEKYPTIYHLRKKLVDSTDKADLRLIYLALAHMIKFRGHFLIEGDLNPDNSDVDKLFIQLVQTYNQLFEENPINASGVDAKAILSARLSKSRRLENLIAQLPGEKKNGLFGNLIALSLGLTPNFKSNFDLAEDAKLQLSKDTYDDDLDNLLAQIGDQYADLFLAAKNLSDAILLSDILRVNTEITKAPLSASMIKRYDEHHQDLTLLKALVRQQLPEKYKEIFFDQSKNGYAGYIDGGASQEEFYKFIKPILEKMDGTEELLVKLNREDLLRKQRTFDNGSIPHQIHLGELHAILRRQEDFYPFLKDNREKIEKILTFRIPYYVGPLARGNSRFAWMTRKSEETITPWNFEEVVDKGASAQSFIERMTNFDKNLPNEKVLPKHSLLYEYFTVYNELTKVKYVTEGMRKPAFLSGEQKKAIVDLLFKTNRKVTVKQLKEDYFKKIECFDSVEISGVEDRFNASLGTYHDLLKIIKDKDFLDNEENEDILEDIVLTLTLFEDREMIEERLKTYAHLFDDKVMKQLKRRRYTGWGRLSRKLINGIRDKQSGKTILDFLKSDGFANRNFMQLIHDDSLTFKEDIQKAQVSGQGDSLHEHIANLAGSPAIKKGILQTVKVVDELVKVMGRHKPENIVIEMARENQTTQKGQKNSRERMKRIEEGIKELGSQILKEHPVENTQLQNEKLYLYYLQNGRDMYVDQELDINRLSDYDVDHIVPQSFLKDDSIDNKVLTRSDKARGKSDNVPSEEVVKKMKNYWRQLLNAKLITQRKFDNLTKAERGGLSELDKAGFIKRQLVETRQITKHVAQILDSRMNTKYDENDKLIREVKVITLKSKLVSDFRKDFQFYKVREINNYHHAHDAYLNAVVGTALIKKYPKLESEFVYGDYKVYDVRKMIAKSEQEIGKATAKYFFYSNIMNFFKTEITLANGEIRKRPLIETNGETGEIVWDKGRDFATVRKVLSMPQVNIVKKTEVQTGGFSKESILPKRNSDKLIARKKDWDPKKYGGFDSPTVAYSVLVVAKVEKGKSKKLKSVKELLGITIMERSSFEKNPIDFLEAKGYKEVKKDLIIKLPKYSLFELENGRKRMLASAGELQKGNELALPSKYVNFLYLASHYEKLKGSPEDNEQKQLFVEQHKHYLDEIIEQISEFSKRVILADANLDKVLSAYNKHRDKPIREQAENIIHLFTLTNLGAPAAFKYFDTTIDRKRYTSTKEVLDATLIHQSITGLYETRIDLSQLGGDGGGGSGGSGGSGGSGGTLNIEDEYRLHETSKEPDVPLGSTWLSDFPQAWAETGGMGLAVRQAPLIIPLKATSTPVSIKQYPMSQEARLGIKPHIQRLLDQGILVPCQSPWNTPLLPVKKPGTNDYRPVQDLREVNKRVEDIHPTVPNPYNLLSGLPPSHQWYTVLDLKDAFFCLRLHPTSQPLFAFEWRDPEMGISGQLTWTRLPQGFKNSPTLFNEALHRDLADFRIQHPDLILLQYVDDLLLAATSEQDCQRGTRALLQTLGNLGYRASAKKAQICQKQVKYLGYLLKEGQRWLTEARKETVMGQPTPKTPRQLREFLGTAGFCRLWIPGFAEMAAPLYPLTKPGTLFNWGPDQQKAYQEIKQALLTAPALGLPDLTKPFELFVDEKQGYAKGVLTQKLGPWRRPVAYLSKKLDPVAAGWPPCLRMVAAIAVLTKDAGKLTMGQPLVILAPHAVEALVKQPPDRWLSNARMTHYQAMLLDTDRVQFGPVVALNPATLLPLPEKEAPHDCLEILAETHGTRPDLTDQPIPDADYTWYTDGSSFLQEGQRRAGAAVTTETEVIWARALPAGTSAQRAELIALTQALKMAEGKKLNVYTDSRYAFATAHVHGEIYRRRGWLTSEGREIKNKNEILALLKALFLPKRLSIIHCPGHQKGNSAEARGNRMADQAAREAAMKAVLETSTLLAGKRTADGSEFEKRTADGSEFESPKKKAKVE

SEQ ID NO: 6055 - protein, 2005 aa, synthetic construct
MPAAKRVKLDGGDKKYSIGLDIGTNSVGWAVITDEYKVPSKKFKVLGNTDRHSIKKNLIGALLFDSGETAEATRLKRTARRRYTRRKNRICYLQEIFSNEMAKVDDSFFHRLEESFLVEEDKKHERHPIFGNIVDEVAYHEKYPTIYHLRKKLVDSTDKADLRLIYLALAHMIKFRGHFLIEGDLNPDNSDVDKLFIQLVQTYNQLFEENPINASGVDAKAILSARLSKSRRLENLIAQLPGEKKNGLFGNLIALSLGLTPNFKSNFDLAEDAKLQLSKDTYDDDLDNLLAQIGDQYADLFLAAKNLSDAILLSDILRVNTEITKAPLSASMIKRYDEHHQDLTLLKALVRQQLPEKYKEIFFDQSKNGYAGYIDGGASQEEFYKFIKPILEKMDGTEELLVKLNREDLLRKQRTFDNGSIPHQIHLGELHAILRRQEDFYPFLKDNREKIEKILTFRIPYYVGPLARGNSRFAWMTRKSEETITPWNFEEVVDKGASAQSFIERMTNFDKNLPNEKVLPKHSLLYEYFTVYNELTKVKYVTEGMRKPAFLSGEQKKAIVDLLFKTNRKVTVKQLKEDYFKKIECFDSVEISGVEDRFNASLGTYHDLLKIIKDKDFLDNEENEDILEDIVLTLTLFEDREMIEERLKTYAHLFDDKVMKQLKRRRYTGWGRLSRKLINGIRDKQSGKTILDFLKSDGFANRNFMQLIHDDSLTFKEDIQKAQVSGQGDSLHEHIANLAGSPAIKKGILQTVKVVDELVKVMGRHKPENIVIEMARENQTTQKGQKNSRERMKRIEEGIKELGSQILKEHPVENTQLQNEKLYLYYLQNGRDMYVDQELDINRLSDYDVDHIVPQSFLKDDSIDNKVLTRSDKARGKSDNVPSEEVVKKMKNYWRQLLNAKLITQRKFDNLTKAERGGLSELDKAGFIKRQLVETRQITKHVAQILDSRMNTKYDENDKLIREVKVITLKSKLVSDFRKDFQFYKVREINNYHHAHDAYLNAVVGTALIKKYPKLESEFVYGDYKVYDVRKMIAKSEQEIGKATAKYFFYSNIMNFFKTEITLANGEIRKRPLIETNGETGEIVWDKGRDFATVRKVLSMPQVNIVKKTEVQTGGFSKESILPKRNSDKLIARKKDWDPKKYGGFDSPTVAYSVLVVAKVEKGKSKKLKSVKELLGITIMERSSFEKNPIDFLEAKGYKEVKKDLIIKLPKYSLFELENGRKRMLASAGELQKGNELALPSKYVNFLYLASHYEKLKGSPEDNEQKQLFVEQHKHYLDEIIEQISEFSKRVILADANLDKVLSAYNKHRDKPIREQAENIIHLFTLTNLGAPAAFKYFDTTIDRKRYTSTKEVLDATLIHQSITGLYETRIDLSQLGGDGGGGSGGSGGSGGSGGSGGGVLDTPPSHIGLEHLPPPPEVPQFPLNLERLQALQDLVHRSLEAGYISPWDGPGNNPVFPVRKPNGAWRFVHDLRATNALTKPIPALSPGPPDLTAPPTHPPHIICLDLKDAFFQIPVEDRFRFYLSFTLPSPGGLQPHRRFAWRVLPQGFINSPALFQRALQEPLRQVSAAFSQSLLVSYMDDILYASPTEEQRSQCYQALAARLRDLGFQVASEKTSQTPSPVPFLGQMVHEQIVTYQSLPTLQISSPISLHQLQAVLGDLQWVSRGTPTTRRPLQLLYSSLKRHHDPRAIIQLSPEQLQGIAELRQALSHNARSRYNEQEPLLAYVHLTRAGSTLVLFQKGAQFPLAYFQTPLTDNQASPWGLLLLLGCQYLQTQALSSYAKPILKYYHNLPKTSLDNWIQSSEDPRVQELLQLWPQISSQGIQPPGPWKTLITRAEVFLTPQFSPDPIPAALCLFSDGATGRGAYCLWKDHLLDFQAVPAPESAQKGELAGLLAGLAAAPPEPVNIWVDSKYLYSLLRTWVLGAWLQPDPVPSYALLYKSLLRHPAIVVGHVRSHSSASHPIASLNNYVDQLAGKRTADGSEFEKRTADGSEFESPKKKAKVE

SEQ ID NO: 6056 - protein, 2177 aa, synthetic construct
MPAAKRVKLDGGDKKYSIGLDIGTNSVGWAVITDEYKVPSKKFKVLGNTDRHSIKKNLIGALLFDSGETAEATRLKRTARRRYTRRKNRICYLQEIFSNEMAKVDDSFFHRLEESFLVEEDKKHERHPIFGNIVDEVAYHEKYPTIYHLRKKLVDSTDKADLRLIYLALAHMIKFRGHFLIEGDLNPDNSDVDKLFIQLVQTYNQLFEENPINASGVDAKAILSARLSKSRRLENLIAQLPGEKKNGLFGNLIALSLGLTPNFKSNFDLAEDAKLQLSKDTYDDDLDNLLAQIGDQYADLFLAAKNLSDAILLSDILRVNTEITKAPLSASMIKRYDEHHQDLTLLKALVRQQLPEKYKEIFFDQSKNGYAGYIDGGASQEEFYKFIKPILEKMDGTEELLVKLNREDLLRKQRTFDNGSIPHQIHLGELHAILRRQEDFYPFLKDNREKIEKILTFRIPYYVGPLARGNSRFAWMTRKSEETITPWNFEEVVDKGASAQSFIERMTNFDKNLPNEKVLPKHSLLYEYFTVYNELTKVKYVTEGMRKPAFLSGEQKKAIVDLLFKTNRKVTVKQLKEDYFKKIECFDSVEISGVEDRFNASLGTYHDLLKIIKDKDFLDNEENEDILEDIVLTLTLFEDREMIEERLKTYAHLFDDKVMKQLKRRRYTGWGRLSRKLINGIRDKQSGKTILDFLKSDGFANRNFMQLIHDDSLTFKEDIQKAQVSGQGDSLHEHIANLAGSPAIKKGILQTVKVVDELVKVMGRHKPENIVIEMARENQTTQKGQKNSRERMKRIEEGIKELGSQILKEHPVENTQLQNEKLYLYYLQNGRDMYVDQELDINRLSDYDVDHIVPQSFLKDDSIDNKVLTRSDKARGKSDNVPSEEVVKKMKNYWRQLLNAKLITQRKFDNLTKAERGGLSELDKAGFIKRQLVETRQITKHVAQILDSRMNTKYDENDKLIREVKVITLKSKLVSDFRKDFQFYKVREINNYHHAHDAYLNAVVGTALIKKYPKLESEFVYGDYKVYDVRKMIAKSEQEIGKATAKYFFYSNIMNFFKTEITLANGEIRKRPLIETNGETGEIVWDKGRDFATVRKVLSMPQVNIVKKTEVQTGGFSKESILPKRNSDKLIARKKDWDPKKYGGFDSPTVAYSVLVVAKVEKGKSKKLKSVKELLGITIMERSSFEKNPIDFLEAKGYKEVKKDLIIKLPKYSLFELENGRKRMLASAGELQKGNELALPSKYVNFLYLASHYEKLKGSPEDNEQKQLFVEQHKHYLDEIIEQISEFSKRVILADANLDKVLSAYNKHRDKPIREQAENIIHLFTLTNLGAPAAFKYFDTTIDRKRYTSTKEVLDATLIHQSITGLYETRIDLSQLGGDGGGGSGGSGGSGGSGGSGGMDLLKPLTVERKGVKIKGYWNSQADITCVPKDLLQGEEPVRQQNVTTIHGTQEGDVYYVNLKIDGRRINTEVIGTTLDYAIITPGDVPWILKKPLELTIKLDLEEQQGTLLNNSILSKKGKEELKQLFEKYSALWQSWENQVGHRRIRPHKIATGTVKPTPQKQYHINPKAKPDIQIVINDLLKQGVLIQKESTMNTPVYPVPKPNGRWRMVLDYRAVNKVTPLIAVQNQHSYGILGSLFKGRYKTTIDLSNGFWAHPIVPEDYWITAFTWQGKQYCWTVLPQGFLNSPGLFTGDVVDLLQGIPNVEVYVDDVYISHDSEKEHLEYLDILFNRLKEAGYIISLKKSNIANSIVDFLGFQITNEGRGLTDTFKEKLENITAPTTLKQLQSILGLLNFARNFIPDFTELIAPLYALIPKSTKNYVPWQIEHSTTLETLITKLNGAEYLQGRKGDKTLIMKVNASYTTGYIRYYNEGEKKPISYVSIVFSKTELKFTELEKLLTTVHKGLLKALDLSMGQNIHVYSPIVSMQNIQKTPQTAKKALASRWLSWLSYLEDPRIRFFYDPQMPALKDLPAVDTGKDNKKHPSNFQHIFYTDGSAITSPTKEGHLNAGMGIVYFINKDGNLQKQQEWSISLGNHTAQFAEIAAFEFALKKCLPLGGNILVVTDSNYVAKAYNEELDVWASNGFVNNRKKPLKHISKWKSVADLKRLRPDVVVTHEPGHQKLDSSPHAYGNNLADQLATQASFKVHAGKRTADGSEFEKRTADGSEFESPKKKAKVE

SEQ ID NO: 6057 - protein, 2177 aa, synthetic construct
MPAAKRVKLDGGDKKYSIGLDIGTNSVGWAVITDEYKVPSKKFKVLGNTDRHSIKKNLIGALLFDSGETAEATRLKRTARRRYTRRKNRICYLQEIFSNEMAKVDDSFFHRLEESFLVEEDKKHERHPIFGNIVDEVAYHEKYPTIYHLRKKLVDSTDKADLRLIYLALAHMIKFRGHFLIEGDLNPDNSDVDKLFIQLVQTYNQLFEENPINASGVDAKAILSARLSKSRRLENLIAQLPGEKKNGLFGNLIALSLGLTPNFKSNFDLAEDAKLQLSKDTYDDDLDNLLAQIGDQYADLFLAAKNLSDAILLSDILRVNTEITKAPLSASMIKRYDEHHQDLTLLKALVRQQLPEKYKEIFFDQSKNGYAGYIDGGASQEEFYKFIKPILEKMDGTEELLVKLNREDLLRKQRTFDNGSIPHQIHLGELHAILRRQEDFYPFLKDNREKIEKILTFRIPYYVGPLARGNSRFAWMTRKSEETITPWNFEEVVDKGASAQSFIERMTNFDKNLPNEKVLPKHSLLYEYFTVYNELTKVKYVTEGMRKPAFLSGEQKKAIVDLLFKTNRKVTVKQLKEDYFKKIECFDSVEISGVEDRFNASLGTYHDLLKIIKDKDFLDNEENEDILEDIVLTLTLFEDREMIEERLKTYAHLFDDKVMKQLKRRRYTGWGRLSRKLINGIRDKQSGKTILDFLKSDGFANRNFMQLIHDDSLTFKEDIQKAQVSGQGDSLHEHIANLAGSPAIKKGILQTVKVVDELVKVMGRHKPENIVIEMARENQTTQKGQKNSRERMKRIEEGIKELGSQILKEHPVENTQLQNEKLYLYYLQNGRDMYVDQELDINRLSDYDVDHIVPQSFLKDDSIDNKVLTRSDKARGKSDNVPSEEVVKKMKNYWRQLLNAKLITQRKFDNLTKAERGGLSELDKAGFIKRQLVETRQITKHVAQILDSRMNTKYDENDKLIREVKVITLKSKLVSDFRKDFQFYKVREINNYHHAHDAYLNAVVGTALIKKYPKLESEFVYGDYKVYDVRKMIAKSEQEIGKATAKYFFYSNIMNFFKTEITLANGEIRKRPLIETNGETGEIVWDKGRDFATVRKVLSMPQVNIVKKTEVQTGGFSKESILPKRNSDKLIARKKDWDPKKYGGFDSPTVAYSVLVVAKVEKGKSKKLKSVKELLGITIMERSSFEKNPIDFLEAKGYKEVKKDLIIKLPKYSLFELENGRKRMLASAGELQKGNELALPSKYVNFLYLASHYEKLKGSPEDNEQKQLFVEQHKHYLDEIIEQISEFSKRVILADANLDKVLSAYNKHRDKPIREQAENIIHLFTLTNLGAPAAFKYFDTTIDRKRYTSTKEVLDATLIHQSITGLYETRIDLSQLGGDGGGGSGGSGGSGGSGGSGGMDLLKPLTVERKGVKIKGYWNSQADITCVPKDLLQGEEPVRQQNVTTIHGTQEGDVYYVNLKIDGRRINTEVIGTTLDYAIITPGDVPWILKKPLELTIKLDLEEQQGTLLNNSILSKKGKEELKQLFEKYSALWQSWENQVGHRRIRPHKIATGTVKPTPQKQYHINPKAKPDIQIVINDLLKQGVLIQKESTMNTPVYPVPKPNGRWRMVLDYRAVNKVTPLIAVQNQHSYGILGSLFKGRYKTTIDLSNGFWAHPIVPEDYWITAFTWQGKQYCWTVLPQGFLNSPGLFNGDVVDLLQGIPNVEVYVDDVYISHDSEKEHLEYLDILFNRLKEAGYIISLKKSNIANSIVDFLGFQITNEGRGLTDTFKEKLENITAPTTLKQLQSILGLLNFARNFIPDFTELIAPLYALIPKSPKNYVPWQIEHSTTLETLITKLNGAEYLQGRKGDKTLIMKVNASYTTGYIRYYNEGEKKPISYVSIVFSKTELKFTELEKLLTTVHKGLLKALDLSMGQNIHVYSPIVSMQNIQKTPQTAKKALASRWLSWLSYLEDPRIRFFYDPQMPALKDLPAVDTGKDNKKHPSNFQHIFYTDGSAITSPTKEGHLNAGMGIVYFINKDGNLQKQQEWSISLGNHTAQFAEIAAFEFALKKCLPLGGNILVVTDSNYVAKAYNEELDVWASNGFVNNRKKPLKHISKWKSVADLKRLRPDVVVTHEPGHQKLDSSPHAYGNNLADQLATQASFKVHAGKRTADGSEFEKRTADGSEFESPKKKAKVE

SEQ ID NO: 6058 - protein, 2099 aa, synthetic construct
MPAAKRVKLDGGDKKYSIGLDIGTNSVGWAVITDEYKVPSKKFKVLGNTDRHSIKKNLIGALLFDSGETAEATRLKRTARRRYTRRKNRICYLQEIFSNEMAKVDDSFFHRLEESFLVEEDKKHERHPIFGNIVDEVAYHEKYPTIYHLRKKLVDSTDKADLRLIYLALAHMIKFRGHFLIEGDLNPDNSDVDKLFIQLVQTYNQLFEENPINASGVDAKAILSARLSKSRRLENLIAQLPGEKKNGLFGNLIALSLGLTPNFKSNFDLAEDAKLQLSKDTYDDDLDNLLAQIGDQYADLFLAAKNLSDAILLSDILRVNTEITKAPLSASMIKRYDEHHQDLTLLKALVRQQLPEKYKEIFFDQSKNGYAGYIDGGASQEEFYKFIKPILEKMDGTEELLVKLNREDLLRKQRTFDNGSIPHQIHLGELHAILRRQEDFYPFLKDNREKIEKILTFRIPYYVGPLARGNSRFAWMTRKSEETITPWNFEEVVDKGASAQSFIERMTNFDKNLPNEKVLPKHSLLYEYFTVYNELTKVKYVTEGMRKPAFLSGEQKKAIVDLLFKTNRKVTVKQLKEDYFKKIECFDSVEISGVEDRFNASLGTYHDLLKIIKDKDFLDNEENEDILEDIVLTLTLFEDREMIEERLKTYAHLFDDKVMKQLKRRRYTGWGRLSRKLINGIRDKQSGKTILDFLKSDGFANRNFMQLIHDDSLTFKEDIQKAQVSGQGDSLHEHIANLAGSPAIKKGILQTVKVVDELVKVMGRHKPENIVIEMARENQTTQKGQKNSRERMKRIEEGIKELGSQILKEHPVENTQLQNEKLYLYYLQNGRDMYVDQELDINRLSDYDVDHIVPQSFLKDDSIDNKVLTRSDKARGKSDNVPSEEVVKKMKNYWRQLLNAKLITQRKFDNLTKAERGGLSELDKAGFIKRQLVETRQITKHVAQILDSRMNTKYDENDKLIREVKVITLKSKLVSDFRKDFQFYKVREINNYHHAHDAYLNAVVGTALIKKYPKLESEFVYGDYKVYDVRKMIAKSEQEIGKATAKYFFYSNIMNFFKTEITLANGEIRKRPLIETNGETGEIVWDKGRDFATVRKVLSMPQVNIVKKTEVQTGGFSKESILPKRNSDKLIARKKDWDPKKYGGFDSPTVAYSVLVVAKVEKGKSKKLKSVKELLGITIMERSSFEKNPIDFLEAKGYKEVKKDLIIKLPKYSLFELENGRKRMLASAGELQKGNELALPSKYVNFLYLASHYEKLKGSPEDNEQKQLFVEQHKHYLDEIIEQISEFSKRVILADANLDKVLSAYNKHRDKPIREQAENIIHLFTLTNLGAPAAFKYFDTTIDRKRYTSTKEVLDATLIHQSITGLYETRIDLSQLGGDGGGGSGGSGGSGGSGGSGGTLQLEEEYRLFEPESTQKQEMDIWLKNFPQAWAETGGMGTAHCQAPVLIQLKATATPISIRQYPMPHEAYQGIKPHIRRMLDQGILKPCQSPWNTPLLPVKKPGTEDYRPVQDLREVNKRVEDIHPTVPNPYNLLSTLPPSHPWYTVLDLKDAFFCLRLHSESQLLFAFEWRDPEIGLSGQLTWTRLPQGFKNSPTLFNEALHSDLADFRVRYPALVLLQYVDDLLLAAATRTECLEGTKALLETLGNKGYRASAKKAQICLQEVTYLGYSLKDGQRWLTKARKEAILSIPVPKNSRQVREFLGTAGYCRLWIPGFAELAAPLYPLTRPGTLFQWGTEQQLAFEDIKKALLSSPALGLPDITKPFELFIDENSGFAKGVLVQKLGPWKRPVAYLSKKLDTVASGWPPCLRMVAAIAILVKDAGKLTLGQPLTILTSHPVEALVRQPPNKWLSNARMTHYQAMLLDAERVHFGPTVSLNPATLLPLPSGGNHHDCLQILAETHGTRPDLTDQPLPDADLTWYTDGSSFIRNGEREAGAAVTTESEVIWAAPLPPGTSAQRAELIALTQALKMAEGKKLTVYTDSRYAFATTHVHGEIYRRRGWLTSEGKEIKNKNEILALLEALFLPKRLSIIHCPGHQKGDSPQAKGNRLADDTAKKAATETHSSLTVLPAGKRTADGSEFEKRTADGSEFESPKKKAKVE

SEQ ID NO: 6059 - protein, 2099 aa, synthetic construct
MPAAKRVKLDGGDKKYSIGLDIGTNSVGWAVITDEYKVPSKKFKVLGNTDRHSIKKNLIGALLFDSGETAEATRLKRTARRRYTRRKNRICYLQEIFSNEMAKVDDSFFHRLEESFLVEEDKKHERHPIFGNIVDEVAYHEKYPTIYHLRKKLVDSTDKADLRLIYLALAHMIKFRGHFLIEGDLNPDNSDVDKLFIQLVQTYNQLFEENPINASGVDAKAILSARLSKSRRLENLIAQLPGEKKNGLFGNLIALSLGLTPNFKSNFDLAEDAKLQLSKDTYDDDLDNLLAQIGDQYADLFLAAKNLSDAILLSDILRVNTEITKAPLSASMIKRYDEHHQDLTLLKALVRQQLPEKYKEIFFDQSKNGYAGYIDGGASQEEFYKFIKPILEKMDGTEELLVKLNREDLLRKQRTFDNGSIPHQIHLGELHAILRRQEDFYPFLKDNREKIEKILTFRIPYYVGPLARGNSRFAWMTRKSEETITPWNFEEVVDKGASAQSFIERMTNFDKNLPNEKVLPKHSLLYEYFTVYNELTKVKYVTEGMRKPAFLSGEQKKAIVDLLFKTNRKVTVKQLKEDYFKKIECFDSVEISGVEDRFNASLGTYHDLLKIIKDKDFLDNEENEDILEDIVLTLTLFEDREMIEERLKTYAHLFDDKVMKQLKRRRYTGWGRLSRKLINGIRDKQSGKTILDFLKSDGFANRNFMQLIHDDSLTFKEDIQKAQVSGQGDSLHEHIANLAGSPAIKKGILQTVKVVDELVKVMGRHKPENIVIEMARENQTTQKGQKNSRERMKRIEEGIKELGSQILKEHPVENTQLQNEKLYLYYLQNGRDMYVDQELDINRLSDYDVDHIVPQSFLKDDSIDNKVLTRSDKARGKSDNVPSEEVVKKMKNYWRQLLNAKLITQRKFDNLTKAERGGLSELDKAGFIKRQLVETRQITKHVAQILDSRMNTKYDENDKLIREVKVITLKSKLVSDFRKDFQFYKVREINNYHHAHDAYLNAVVGTALIKKYPKLESEFVYGDYKVYDVRKMIAKSEQEIGKATAKYFFYSNIMNFFKTEITLANGEIRKRPLIETNGETGEIVWDKGRDFATVRKVLSMPQVNIVKKTEVQTGGFSKESILPKRNSDKLIARKKDWDPKKYGGFDSPTVAYSVLVVAKVEKGKSKKLKSVKELLGITIMERSSFEKNPIDFLEAKGYKEVKKDLIIKLPKYSLFELENGRKRMLASAGELQKGNELALPSKYVNFLYLASHYEKLKGSPEDNEQKQLFVEQHKHYLDEIIEQISEFSKRVILADANLDKVLSAYNKHRDKPIREQAENIIHLFTLTNLGAPAAFKYFDTTIDRKRYTSTKEVLDATLIHQSITGLYETRIDLSQLGGDGGGGSGGSGGSGGSGGSGGTLQLEEEYRLFEPESTQKQEMDIWLKNFPQAWAETGGMGTAHCQAPVLIQLKATATPISIRQYPMPHEAYQGIKPHIRRMLDQGILKPCQSPWNTPLLPVKKPGTEDYRPVQDLREVNKRVEDIHPTVPNPYNLLSTLPPSHPWYTVLDLKDAFFCLRLHSESQLLFAFEWRDPEIGLSGQLTWTRLPQGFKNSPTLFNEALHSDLADFRVRYPALVLLQYVDDLLLAAATRTECLEGTKALLETLGNKGYRASAKKAQICLQEVTYLGYSLKDGQRWLTKARKEAILSIPVPKNSRQVREFLGKAGYCRLFIPGFAELAAPLYPLTRPGTLFQWGTEQQLAFEDIKKALLSSPALGLPDITKPFELFIDENSGFAKGVLVQKLGPWKRPVAYLSKKLDTVASGWPPCLRMVAAIAILVKDAGKLTLGQPLTILTSHPVEALVRQPPNKWLSNARMTHYQAMLLDAERVHFGPTVSLNPATLLPLPSGGNHHDCLQILAETHGTRPDLTDQPLPDADLTWYTDGSSFIRNGEREAGAAVTTESEVIWAAPLPPGTSAQRAELIALTQALKMAEGKKLTVYTDSRYAFATTHVHGEIYRRRGWLTSEGKEIKNKNEILALLEALFLPKRLSIIHCPGHQKGDSPQAKGNRLADDTAKKAATETHSSLTVLPAGKRTADGSEFEKRTADGSEFESPKKKAKVE

SEQ ID NO: 6060 - protein, 2180 aa, synthetic construct
MPAAKRVKLDGGDKKYSIGLDIGTNSVGWAVITDEYKVPSKKFKVLGNTDRHSIKKNLIGALLFDSGETAEATRLKRTARRRYTRRKNRICYLQEIFSNEMAKVDDSFFHRLEESFLVEEDKKHERHPIFGNIVDEVAYHEKYPTIYHLRKKLVDSTDKADLRLIYLALAHMIKFRGHFLIEGDLNPDNSDVDKLFIQLVQTYNQLFEENPINASGVDAKAILSARLSKSRRLENLIAQLPGEKKNGLFGNLIALSLGLTPNFKSNFDLAEDAKLQLSKDTYDDDLDNLLAQIGDQYADLFLAAKNLSDAILLSDILRVNTEITKAPLSASMIKRYDEHHQDLTLLKALVRQQLPEKYKEIFFDQSKNGYAGYIDGGASQEEFYKFIKPILEKMDGTEELLVKLNREDLLRKQRTFDNGSIPHQIHLGELHAILRRQEDFYPFLKDNREKIEKILTFRIPYYVGPLARGNSRFAWMTRKSEETITPWNFEEVVDKGASAQSFIERMTNFDKNLPNEKVLPKHSLLYEYFTVYNELTKVKYVTEGMRKPAFLSGEQKKAIVDLLFKTNRKVTVKQLKEDYFKKIECFDSVEISGVEDRFNASLGTYHDLLKIIKDKDFLDNEENEDILEDIVLTLTLFEDREMIEERLKTYAHLFDDKVMKQLKRRRYTGWGRLSRKLINGIRDKQSGKTILDFLKSDGFANRNFMQLIHDDSLTFKEDIQKAQVSGQGDSLHEHIANLAGSPAIKKGILQTVKVVDELVKVMGRHKPENIVIEMARENQTTQKGQKNSRERMKRIEEGIKELGSQILKEHPVENTQLQNEKLYLYYLQNGRDMYVDQELDINRLSDYDVDHIVPQSFLKDDSIDNKVLTRSDKARGKSDNVPSEEVVKKMKNYWRQLLNAKLITQRKFDNLTKAERGGLSELDKAGFIKRQLVETRQITKHVAQILDSRMNTKYDENDKLIREVKVITLKSKLVSDFRKDFQFYKVREINNYHHAHDAYLNAVVGTALIKKYPKLESEFVYGDYKVYDVRKMIAKSEQEIGKATAKYFFYSNIMNFFKTEITLANGEIRKRPLIETNGETGEIVWDKGRDFATVRKVLSMPQVNIVKKTEVQTGGFSKESILPKRNSDKLIARKKDWDPKKYGGFDSPTVAYSVLVVAKVEKGKSKKLKSVKELLGITIMERSSFEKNPIDFLEAKGYKEVKKDLIIKLPKYSLFELENGRKRMLASAGELQKGNELALPSKYVNFLYLASHYEKLKGSPEDNEQKQLFVEQHKHYLDEIIEQISEFSKRVILADANLDKVLSAYNKHRDKPIREQAENIIHLFTLTNLGAPAAFKYFDTTIDRKRYTSTKEVLDATLIHQSITGLYETRIDLSQLGGDGGGGSGGSGGSGGSGGSGGMNPLQLLQPLPAEIKGTKLLAHWNSGATITCIPESFLEDEQPIKKTLIKTIHGEKQQNVYYVTFKVKGRKVEAEVIASPYEYILLSPTDVPWLTQQPLQLTILVPLQEYQEKILSKTALPEDQKQQLKTLFVKYDNLWQHWENQVGHRKIRPHNIATGDYPPRPQKQYPINPKAKPSIQIVIDDLLKQGVLTPQNSTMNTPVYPVPKPDGRWRMVLDYREVNKTIPLTAAQNQHSAGILATIVRQKYKTTLDLANGFWAHPITPESYWLTAFTWQGKQYCWTRLPQGFLNSPALFNADVVDLLKEIPNVQVYVDDIYLSHDDPKEHVQQLEKVFQILLQAGYVVSLKKSEIGQKTVEFLGFNITKEGRGLTDTFKTKLLNITPPKDLKQLQSILGKLNFARNFIPNFAELVQPLYNLIAPAKGKYIEWSEENTKQLNMVIEALNTASNLEERLPEQRLVIKVNTSPSAGYVRYYNETGKKPIMYLNYVFSKAELKFSMLEKLLTTMHKALIKAMDLAMGQEILVYSPIVSMTKIQKTPLPERKALPIRWITWMTYLEDPRIQFHYDKTLPELKHIPDVYTSSQSPVKHPSQYEGVFYTDGSAIKSPDPTKSNNAGMGIVHATYKPEYQVLNQWSIPLGNHTAQMAEIAAVEFACKKALKIPGPVLVITDSFYVAESANKELPYWKSNGFVNNKKKPLKHISKWKSIAECLSMKPDITIQHEKGISLQIPVFILKGNALADKLATQGSYVVNAGKRTADGSEFEKRTADGSEFESPKKKAKVE

SEQ ID NO: 6061 - protein, 2098 aa, synthetic construct
MPAAKRVKLDGGDKKYSIGLDIGTNSVGWAVITDEYKVPSKKFKVLGNTDRHSIKKNLIGALLFDSGETAEATRLKRTARRRYTRRKNRICYLQEIFSNEMAKVDDSFFHRLEESFLVEEDKKHERHPIFGNIVDEVAYHEKYPTIYHLRKKLVDSTDKADLRLIYLALAHMIKFRGHFLIEGDLNPDNSDVDKLFIQLVQTYNQLFEENPINASGVDAKAILSARLSKSRRLENLIAQLPGEKKNGLFGNLIALSLGLTPNFKSNFDLAEDAKLQLSKDTYDDDLDNLLAQIGDQYADLFLAAKNLSDAILLSDILRVNTEITKAPLSASMIKRYDEHHQDLTLLKALVRQQLPEKYKEIFFDQSKNGYAGYIDGGASQEEFYKFIKPILEKMDGTEELLVKLNREDLLRKQRTFDNGSIPHQIHLGELHAILRRQEDFYPFLKDNREKIEKILTFRIPYYVGPLARGNSRFAWMTRKSEETITPWNFEEVVDKGASAQSFIERMTNFDKNLPNEKVLPKHSLLYEYFTVYNELTKVKYVTEGMRKPAFLSGEQKKAIVDLLFKTNRKVTVKQLKEDYFKKIECFDSVEISGVEDRFNASLGTYHDLLKIIKDKDFLDNEENEDILEDIVLTLTLFEDREMIEERLKTYAHLFDDKVMKQLKRRRYTGWGRLSRKLINGIRDKQSGKTILDFLKSDGFANRNFMQLIHDDSLTFKEDIQKAQVSGQGDSLHEHIANLAGSPAIKKGILQTVKVVDELVKVMGRHKPENIVIEMARENQTTQKGQKNSRERMKRIEEGIKELGSQILKEHPVENTQLQNEKLYLYYLQNGRDMYVDQELDINRLSDYDVDHIVPQSFLKDDSIDNKVLTRSDKARGKSDNVPSEEVVKKMKNYWRQLLNAKLITQRKFDNLTKAERGGLSELDKAGFIKRQLVETRQITKHVAQILDSRMNTKYDENDKLIREVKVITLKSKLVSDFRKDFQFYKVREINNYHHAHDAYLNAVVGTALIKKYPKLESEFVYGDYKVYDVRKMIAKSEQEIGKATAKYFFYSNIMNFFKTEITLANGEIRKRPLIETNGETGEIVWDKGRDFATVRKVLSMPQVNIVKKTEVQTGGFSKESILPKRNSDKLIARKKDWDPKKYGGFDSPTVAYSVLVVAKVEKGKSKKLKSVKELLGITIMERSSFEKNPIDFLEAKGYKEVKKDLIIKLPKYSLFELENGRKRMLASAGELQKGNELALPSKYVNFLYLASHYEKLKGSPEDNEQKQLFVEQHKHYLDEIIEQISEFSKRVILADANLDKVLSAYNKHRDKPIREQAENIIHLFTLTNLGAPAAFKYFDTTIDRKRYTSTKEVLDATLIHQSITGLYETRIDLSQLGGDGGGGSGGSGGSGGSGGSGGVLNLEEEYRLHEKPVPSSIDPSWLQLFPTVWAERAGMGLANQVPPVVVELRSGASPVAVRQYPMSKEAREGIRPHIQKFLDLGVLVPCRSPWNTPLLPVKKPGTNDYRPVQDLREINKRVQDIHPTVPNPYNLLSSLPPSYTWYSVLDLKDAFFCLRLHPNSQPLFAFEWKDPEKGNTGQLTWTRLPQGFKNSPTLFNEALHRDLAPFRALNPQVVLLQYVDDLLVAAPTYEDCKKGTQKLLQELSKLGYRVSAKKAQLCQREVTYLGYLLKEGKRWLTPARKATVMKIPVPTTPRQVREFLGKAGFCRLFIPGFASLAAPLYPLTKPSIPFIWTEEHQQAFDHIKKALLSAPALALPDLTKPFTLYIDERAGVARGVLTQTLGPWRRPVAYLSKKLDPVASGWPTCLKAVAAVALLLKDADKLTLGQNVTVIASHSLESIVRQPPDRWMTNARMTHYQSLLLNERVSFAPPAVLNPATLLPVESEATPVHRCSEILAEETGTRRDLEDQPLPGVPTWYTDGSSFITEGKRRAGAPIVDGKRTVWASSLPEGTSAQKAELVALTQALRLAEGKNINIYTDSRYAFATAHIHGAIYKQRGWLTSAGKDIKNKEEILALLEAIHLPRRVAIIHCPGHQRGSNPVATGNRRADEAAKQAALSTRVLAGTTKPAGKRTADGSEFEKRTADGSEFESPKKKAKVE

SEQ ID NO: 6062 - protein, 2010 aa, synthetic construct
MPAAKRVKLDGGDKKYSIGLDIGTNSVGWAVITDEYKVPSKKFKVLGNTDRHSIKKNLIGALLFDSGETAEATRLKRTARRRYTRRKNRICYLQEIFSNEMAKVDDSFFHRLEESFLVEEDKKHERHPIFGNIVDEVAYHEKYPTIYHLRKKLVDSTDKADLRLIYLALAHMIKFRGHFLIEGDLNPDNSDVDKLFIQLVQTYNQLFEENPINASGVDAKAILSARLSKSRRLENLIAQLPGEKKNGLFGNLIALSLGLTPNFKSNFDLAEDAKLQLSKDTYDDDLDNLLAQIGDQYADLFLAAKNLSDAILLSDILRVNTEITKAPLSASMIKRYDEHHQDLTLLKALVRQQLPEKYKEIFFDQSKNGYAGYIDGGASQEEFYKFIKPILEKMDGTEELLVKLNREDLLRKQRTFDNGSIPHQIHLGELHAILRRQEDFYPFLKDNREKIEKILTFRIPYYVGPLARGNSRFAWMTRKSEETITPWNFEEVVDKGASAQSFIERMTNFDKNLPNEKVLPKHSLLYEYFTVYNELTKVKYVTEGMRKPAFLSGEQKKAIVDLLFKTNRKVTVKQLKEDYFKKIECFDSVEISGVEDRFNASLGTYHDLLKIIKDKDFLDNEENEDILEDIVLTLTLFEDREMIEERLKTYAHLFDDKVMKQLKRRRYTGWGRLSRKLINGIRDKQSGKTILDFLKSDGFANRNFMQLIHDDSLTFKEDIQKAQVSGQGDSLHEHIANLAGSPAIKKGILQTVKVVDELVKVMGRHKPENIVIEMARENQTTQKGQKNSRERMKRIEEGIKELGSQILKEHPVENTQLQNEKLYLYYLQNGRDMYVDQELDINRLSDYDVDHIVPQSFLKDDSIDNKVLTRSDKARGKSDNVPSEEVVKKMKNYWRQLLNAKLITQRKFDNLTKAERGGLSELDKAGFIKRQLVETRQITKHVAQILDSRMNTKYDENDKLIREVKVITLKSKLVSDFRKDFQFYKVREINNYHHAHDAYLNAVVGTALIKKYPKLESEFVYGDYKVYDVRKMIAKSEQEIGKATAKYFFYSNIMNFFKTEITLANGEIRKRPLIETNGETGEIVWDKGRDFATVRKVLSMPQVNIVKKTEVQTGGFSKESILPKRNSDKLIARKKDWDPKKYGGFDSPTVAYSVLVVAKVEKGKSKKLKSVKELLGITIMERSSFEKNPIDFLEAKGYKEVKKDLIIKLPKYSLFELENGRKRMLASAGELQKGNELALPSKYVNFLYLASHYEKLKGSPEDNEQKQLFVEQHKHYLDEIIEQISEFSKRVILADANLDKVLSAYNKHRDKPIREQAENIIHLFTLTNLGAPAAFKYFDTTIDRKRYTSTKEVLDATLIHQSITGLYETRIDLSQLGGDGGGGSGGSGGSGGSGGSGGPLGTSDSPVTHADPIDWKSEEPVWVDQWPLTQEKLSAAQQLVQEQLRLGHIEPSTSAWNSPIFVIKKKSGKWRLLQDLRKVNETMMHMGALQPGLPTPSAIPDKSYIIVIDLKDCFYTIPLAPQDCKRFAFSLPSVNFKEPMQRYQWRVLPQGMTNSPTLCQKFVATAIAPVRQRFPQLYLVHYMDDILLAHTDEHLLYQAFSILKQHLSLNGLVIADEKIQTHFPYNYLGFSLYPRVYNTQLVKLQTDHLKTLNDFQKLLGDINWIRPYLKLPTYTLQPLFDILKGDSDPASPRTLSLEGRTALQSIEEAIRQQQITYCDYQRSWGLYILPTPRAPTGVLYQDKPLRWIYLSATPTKHLLPYYELVAKIIAKGRHEAIQYFGMEPPFICVPYALEQQDWLFQFSDNWSIAFANYPGQITHHYPSDKLLQFASSHAFIFPKIVRRQPIPEATLIFTDGSSNGTAALIINHQTYYAQTSFSSAQVVELFAVHQALLTVPTSFNLFTDSSYVVGALQMIETVPIIGTTSPEVLNLFTLIQQVLHCRQHPCFFGHIRAHSTLPGALVQGNHTADVLTKQVFFQSAGKRTADGSEFEKRTADGSEFESPKKKAKVE

SEQ ID NO: 6063 - protein, 2131 aa, synthetic construct
MPAAKRVKLDGGDKKYSIGLDIGTNSVGWAVITDEYKVPSKKFKVLGNTDRHSIKKNLIGALLFDSGETAEATRLKRTARRRYTRRKNRICYLQEIFSNEMAKVDDSFFHRLEESFLVEEDKKHERHPIFGNIVDEVAYHEKYPTIYHLRKKLVDSTDKADLRLIYLALAHMIKFRGHFLIEGDLNPDNSDVDKLFIQLVQTYNQLFEENPINASGVDAKAILSARLSKSRRLENLIAQLPGEKKNGLFGNLIALSLGLTPNFKSNFDLAEDAKLQLSKDTYDDDLDNLLAQIGDQYADLFLAAKNLSDAILLSDILRVNTEITKAPLSASMIKRYDEHHQDLTLLKALVRQQLPEKYKEIFFDQSKNGYAGYIDGGASQEEFYKFIKPILEKMDGTEELLVKLNREDLLRKQRTFDNGSIPHQIHLGELHAILRRQEDFYPFLKDNREKIEKILTFRIPYYVGPLARGNSRFAWMTRKSEETITPWNFEEVVDKGASAQSFIERMTNFDKNLPNEKVLPKHSLLYEYFTVYNELTKVKYVTEGMRKPAFLSGEQKKAIVDLLFKTNRKVTVKQLKEDYFKKIECFDSVEISGVEDRFNASLGTYHDLLKIIKDKDFLDNEENEDILEDIVLTLTLFEDREMIEERLKTYAHLFDDKVMKQLKRRRYTGWGRLSRKLINGIRDKQSGKTILDFLKSDGFANRNFMQLIHDDSLTFKEDIQKAQVSGQGDSLHEHIANLAGSPAIKKGILQTVKVVDELVKVMGRHKPENIVIEMARENQTTQKGQKNSRERMKRIEEGIKELGSQILKEHPVENTQLQNEKLYLYYLQNGRDMYVDQELDINRLSDYDVDHIVPQSFLKDDSIDNKVLTRSDKARGKSDNVPSEEVVKKMKNYWRQLLNAKLITQRKFDNLTKAERGGLSELDKAGFIKRQLVETRQITKHVAQILDSRMNTKYDENDKLIREVKVITLKSKLVSDFRKDFQFYKVREINNYHHAHDAYLNAVVGTALIKKYPKLESEFVYGDYKVYDVRKMIAKSEQEIGKATAKYFFYSNIMNFFKTEITLANGEIRKRPLIETNGETGEIVWDKGRDFATVRKVLSMPQVNIVKKTEVQTGGFSKESILPKRNSDKLIARKKDWDPKKYGGFDSPTVAYSVLVVAKVEKGKSKKLKSVKELLGITIMERSSFEKNPIDFLEAKGYKEVKKDLIIKLPKYSLFELENGRKRMLASAGELQKGNELALPSKYVNFLYLASHYEKLKGSPEDNEQKQLFVEQHKHYLDEIIEQISEFSKRVILADANLDKVLSAYNKHRDKPIREQAENIIHLFTLTNLGAPAAFKYFDTTIDRKRYTSTKEVLDATLIHQSITGLYETRIDLSQLGGDGGGGSGGSGGSGGSGGSGGLLGRDLLTKLKAQIQFSTEGPQVTWEDRPAMCLVLNLEEEYRLHEKPVPPSIDPSWLQLFPMVWAEKAGMGLANQVPPVVVELKSDASPVAVRQYPMSKEAREGIRPHIQRFLDLGILVPCQSPWNTPLLPVKKPGTNDYRPVQDLREVNKRVQDIHPTVPNPYNLLSSLPPSHTWYSVLDLKDAFFCLKLHPNSQPLFAFEWRDPEKGNTGQLTWTRLPQGFKNSPTLFNEALHRDLASFRALNPQVVMLQYVDDLLVAAPTYRDCKEGTRRLLQELSKLGYRVSAKKAQLCREEVTYLGYLLKGGKRWLTPARKATVMKIPTPTTPRQVREFLGTAGFCRLWIPGFASLAAPLYPLTRPKVPFTWTEAHQEAFGRIKEALLSAPALALPDLTKPFALYVDEKEGVARGVLTQTLGPWRRPVAYLSKKLDPVASGWPTCLKAIAAVALLLKDADKLTLGQNVLVIAPHNLESIVRQPPDRWMTNARMTHYQSLLLNERVSFAPPAILNPATLLPVESDDTPIHICSEILAEETGTRPDLRDQPLPGVPAWYTDGSSFIMDGRRQAGAAIVDNKRTVWASNLPEGTSAQKAELIALTQALRLAEGKSINIYTDSRYAFATAHVHGAIYKQRGWLTSAGKDIKNKEEILALLEAIHLPKRVAIIHCPGHQRGTDPVATGNRKADEAAKQAAQSTRILTETTKNAGKRTADGSEFEKRTADGSEFESPKKKAKVE

SEQ ID NO: 6064 - protein, 2222 aa, synthetic construct
MPAAKRVKLDGGDKKYSIGLDIGTNSVGWAVITDEYKVPSKKFKVLGNTDRHSIKKNLIGALLFDSGETAEATRLKRTARRRYTRRKNRICYLQEIFSNEMAKVDDSFFHRLEESFLVEEDKKHERHPIFGNIVDEVAYHEKYPTIYHLRKKLVDSTDKADLRLIYLALAHMIKFRGHFLIEGDLNPDNSDVDKLFIQLVQTYNQLFEENPINASGVDAKAILSARLSKSRRLENLIAQLPGEKKNGLFGNLIALSLGLTPNFKSNFDLAEDAKLQLSKDTYDDDLDNLLAQIGDQYADLFLAAKNLSDAILLSDILRVNTEITKAPLSASMIKRYDEHHQDLTLLKALVRQQLPEKYKEIFFDQSKNGYAGYIDGGASQEEFYKFIKPILEKMDGTEELLVKLNREDLLRKQRTFDNGSIPHQIHLGELHAILRRQEDFYPFLKDNREKIEKILTFRIPYYVGPLARGNSRFAWMTRKSEETITPWNFEEVVDKGASAQSFIERMTNFDKNLPNEKVLPKHSLLYEYFTVYNELTKVKYVTEGMRKPAFLSGEQKKAIVDLLFKTNRKVTVKQLKEDYFKKIECFDSVEISGVEDRFNASLGTYHDLLKIIKDKDFLDNEENEDILEDIVLTLTLFEDREMIEERLKTYAHLFDDKVMKQLKRRRYTGWGRLSRKLINGIRDKQSGKTILDFLKSDGFANRNFMQLIHDDSLTFKEDIQKAQVSGQGDSLHEHIANLAGSPAIKKGILQTVKVVDELVKVMGRHKPENIVIEMARENQTTQKGQKNSRERMKRIEEGIKELGSQILKEHPVENTQLQNEKLYLYYLQNGRDMYVDQELDINRLSDYDVDHIVPQSFLKDDSIDNKVLTRSDKARGKSDNVPSEEVVKKMKNYWRQLLNAKLITQRKFDNLTKAERGGLSELDKAGFIKRQLVETRQITKHVAQILDSRMNTKYDENDKLIREVKVITLKSKLVSDFRKDFQFYKVREINNYHHAHDAYLNAVVGTALIKKYPKLESEFVYGDYKVYDVRKMIAKSEQEIGKATAKYFFYSNIMNFFKTEITLANGEIRKRPLIETNGETGEIVWDKGRDFATVRKVLSMPQVNIVKKTEVQTGGFSKESILPKRNSDKLIARKKDWDPKKYGGFDSPTVAYSVLVVAKVEKGKSKKLKSVKELLGITIMERSSFEKNPIDFLEAKGYKEVKKDLIIKLPKYSLFELENGRKRMLASAGELQKGNELALPSKYVNFLYLASHYEKLKGSPEDNEQKQLFVEQHKHYLDEIIEQISEFSKRVILADANLDKVLSAYNKHRDKPIREQAENIIHLFTLTNLGAPAAFKYFDTTIDRKRYTSTKEVLDATLIHQSITGLYETRIDLSQLGGDGGGGSGGSGGSGGSGGSGGTLGDQGSRGSDPLPEPRVTLTVEGIPTEFLVNTGAEHSVLTKPMGKMGSKRTVVAGATGSKVYPWTTKRLLKIGQKQVTHSFLVIPECPAPLLGRDLLTKLKAQIQFSTEGPQVTWEDRPAMCLVLNLEEEYRLHEKPVPPSIDPSWLQLFPMVWAEKAGMGLANQVPPVVVELKSDASPVAVRQYPMSKEAREGIRPHIQRFLDLGILVPCQSPWNTPLLPVKKPGTNDYRPVQDLREVNKRVQDIHPTVPNPYNLLSSLPPSHTWYSVLDLKDAFFCLKLHPNSQPLFAFEWRDPEKGNTGQLTWTRLPQGFKNSPTLFNEALHRDLASFRALNPQVVMLQYVDDLLVAAPTYRDCKEGTRRLLQELSKLGYRVSAKKAQLCREEVTYLGYLLKGGKRWLTPARKATVMKIPTPTTPRQVREFLGTAGFCRLWIPGFASLAAPLYPLTRPKVPFTWTEAHQEAFGRIKEALLSAPALALPDLTKPFALYVDEKEGVARGVLTQTLGPWRRPVAYLSKKLDPVASGWPTCLKAIAAVALLLKDADKLTLGQNVLVIAPHNLESIVRQPPDRWMTNARMTHYQSLLLNERVSFAPPAILNPATLLPVESDDTPIHICSEILAEETGTRPDLRDQPLPGVPAWYTDGSSFIMDGRRQAGAAIVDNKRTVWASNLPEGTSAQKAELIALTQALRLAEGKSINIYTDSRYAFATAHVHGAIYKQRGWLTSAGKDIKNKEEILALLEAIHLPKRVAIIHCPGHQRGTDPVATGNRKADEAAKQAAQSTRILTETTKNAGKRTADGSEFEKRTADGSEFESPKKKAKVE

SEQ ID NO: 6065 - protein, 2222 aa, synthetic construct
MPAAKRVKLDGGDKKYSIGLDIGTNSVGWAVITDEYKVPSKKFKVLGNTDRHSIKKNLIGALLFDSGETAEATRLKRTARRRYTRRKNRICYLQEIFSNEMAKVDDSFFHRLEESFLVEEDKKHERHPIFGNIVDEVAYHEKYPTIYHLRKKLVDSTDKADLRLIYLALAHMIKFRGHFLIEGDLNPDNSDVDKLFIQLVQTYNQLFEENPINASGVDAKAILSARLSKSRRLENLIAQLPGEKKNGLFGNLIALSLGLTPNFKSNFDLAEDAKLQLSKDTYDDDLDNLLAQIGDQYADLFLAAKNLSDAILLSDILRVNTEITKAPLSASMIKRYDEHHQDLTLLKALVRQQLPEKYKEIFFDQSKNGYAGYIDGGASQEEFYKFIKPILEKMDGTEELLVKLNREDLLRKQRTFDNGSIPHQIHLGELHAILRRQEDFYPFLKDNREKIEKILTFRIPYYVGPLARGNSRFAWMTRKSEETITPWNFEEVVDKGASAQSFIERMTNFDKNLPNEKVLPKHSLLYEYFTVYNELTKVKYVTEGMRKPAFLSGEQKKAIVDLLFKTNRKVTVKQLKEDYFKKIECFDSVEISGVEDRFNASLGTYHDLLKIIKDKDFLDNEENEDILEDIVLTLTLFEDREMIEERLKTYAHLFDDKVMKQLKRRRYTGWGRLSRKLINGIRDKQSGKTILDFLKSDGFANRNFMQLIHDDSLTFKEDIQKAQVSGQGDSLHEHIANLAGSPAIKKGILQTVKVVDELVKVMGRHKPENIVIEMARENQTTQKGQKNSRERMKRIEEGIKELGSQILKEHPVENTQLQNEKLYLYYLQNGRDMYVDQELDINRLSDYDVDHIVPQSFLKDDSIDNKVLTRSDKARGKSDNVPSEEVVKKMKNYWRQLLNAKLITQRKFDNLTKAERGGLSELDKAGFIKRQLVETRQITKHVAQILDSRMNTKYDENDKLIREVKVITLKSKLVSDFRKDFQFYKVREINNYHHAHDAYLNAVVGTALIKKYPKLESEFVYGDYKVYDVRKMIAKSEQEIGKATAKYFFYSNIMNFFKTEITLANGEIRKRPLIETNGETGEIVWDKGRDFATVRKVLSMPQVNIVKKTEVQTGGFSKESILPKRNSDKLIARKKDWDPKKYGGFDSPTVAYSVLVVAKVEKGKSKKLKSVKELLGITIMERSSFEKNPIDFLEAKGYKEVKKDLIIKLPKYSLFELENGRKRMLASAGELQKGNELALPSKYVNFLYLASHYEKLKGSPEDNEQKQLFVEQHKHYLDEIIEQISEFSKRVILADANLDKVLSAYNKHRDKPIREQAENIIHLFTLTNLGAPAAFKYFDTTIDRKRYTSTKEVLDATLIHQSITGLYETRIDLSQLGGDGGGGSGGSGGSGGSGGSGGTLGDQGSRGSDPLPEPRVTLTVEGIPTEFLVNTGAEHSVLTKPMGKMGSKRTVVAGATGSKVYPWTTKRLLKIGQKQVTHSFLVIPECPAPLLGRDLLTKLKAQIQFSTEGPQVTWEDRPAMCLVLNLEEEYRLHEKPVPPSIDPSWLQLFPMVWAEKAGMGLANQVPPVVVELKSDASPVAVRQYPMSKEAREGIRPHIQRFLDLGILVPCQSPWNTPLLPVKKPGTNDYRPVQDLREVNKRVQDIHPTVPNPYNLLSSLPPSHTWYSVLDLKDAFFCLKLHPNSQPLFAFEWRDPEKGNTGQLTWTRLPQGFKNSPTLFNEALHRDLASFRALNPQVVMLQYVDDLLVAAPTYRDCKEGTRRLLQELSKLGYRVSAKKAQLCREEVTYLGYLLKGGKRWLTPARKATVMKIPTPTTPRQVREFLGKAGFCRLFIPGFASLAAPLYPLTRPKVPFTWTEAHQEAFGRIKEALLSAPALALPDLTKPFALYVDEKEGVARGVLTQTLGPWRRPVAYLSKKLDPVASGWPTCLKAIAAVALLLKDADKLTLGQNVLVIAPHNLESIVRQPPDRWMTNARMTHYQSLLLNERVSFAPPAILNPATLLPVESDDTPIHICSEILAEETGTRPDLRDQPLPGVPAWYTDGSSFIMDGRRQAGAAIVDNKRTVWASNLPEGTSAQKAELIALTQALRLAEGKSINIYTDSRYAFATAHVHGAIYKQRGWLTSAGKDIKNKEEILALLEAIHLPKRVAIIHCPGHQRGTDPVATGNRKADEAAKQAAQSTRILTETTKNAGKRTADGSEFEKRTADGSEFESPKKKAKVE

SEQ ID NO: 6066 - protein, 2100 aa, synthetic construct
MPAAKRVKLDGGDKKYSIGLDIGTNSVGWAVITDEYKVPSKKFKVLGNTDRHSIKKNLIGALLFDSGETAEATRLKRTARRRYTRRKNRICYLQEIFSNEMAKVDDSFFHRLEESFLVEEDKKHERHPIFGNIVDEVAYHEKYPTIYHLRKKLVDSTDKADLRLIYLALAHMIKFRGHFLIEGDLNPDNSDVDKLFIQLVQTYNQLFEENPINASGVDAKAILSARLSKSRRLENLIAQLPGEKKNGLFGNLIALSLGLTPNFKSNFDLAEDAKLQLSKDTYDDDLDNLLAQIGDQYADLFLAAKNLSDAILLSDILRVNTEITKAPLSASMIKRYDEHHQDLTLLKALVRQQLPEKYKEIFFDQSKNGYAGYIDGGASQEEFYKFIKPILEKMDGTEELLVKLNREDLLRKQRTFDNGSIPHQIHLGELHAILRRQEDFYPFLKDNREKIEKILTFRIPYYVGPLARGNSRFAWMTRKSEETITPWNFEEVVDKGASAQSFIERMTNFDKNLPNEKVLPKHSLLYEYFTVYNELTKVKYVTEGMRKPAFLSGEQKKAIVDLLFKTNRKVTVKQLKEDYFKKIECFDSVEISGVEDRFNASLGTYHDLLKIIKDKDFLDNEENEDILEDIVLTLTLFEDREMIEERLKTYAHLFDDKVMKQLKRRRYTGWGRLSRKLINGIRDKQSGKTILDFLKSDGFANRNFMQLIHDDSLTFKEDIQKAQVSGQGDSLHEHIANLAGSPAIKKGILQTVKVVDELVKVMGRHKPENIVIEMARENQTTQKGQKNSRERMKRIEEGIKELGSQILKEHPVENTQLQNEKLYLYYLQNGRDMYVDQELDINRLSDYDVDHIVPQSFLKDDSIDNKVLTRSDKARGKSDNVPSEEVVKKMKNYWRQLLNAKLITQRKFDNLTKAERGGLSELDKAGFIKRQLVETRQITKHVAQILDSRMNTKYDENDKLIREVKVITLKSKLVSDFRKDFQFYKVREINNYHHAHDAYLNAVVGTALIKKYPKLESEFVYGDYKVYDVRKMIAKSEQEIGKATAKYFFYSNIMNFFKTEITLANGEIRKRPLIETNGETGEIVWDKGRDFATVRKVLSMPQVNIVKKTEVQTGGFSKESILPKRNSDKLIARKKDWDPKKYGGFDSPTVAYSVLVVAKVEKGKSKKLKSVKELLGITIMERSSFEKNPIDFLEAKGYKEVKKDLIIKLPKYSLFELENGRKRMLASAGELQKGNELALPSKYVNFLYLASHYEKLKGSPEDNEQKQLFVEQHKHYLDEIIEQISEFSKRVILADANLDKVLSAYNKHRDKPIREQAENIIHLFTLTNLGAPAAFKYFDTTIDRKRYTSTKEVLDATLIHQSITGLYETRIDLSQLGGDGGGGSGGSGGSGGSGGSGGTLGIEDEYRLHETSTEPDVSLGSTWLSDFPQAWAETGGMGLAVRQAPLIIPLKATSTPVSIQQYPMSHEARLGIKPHIQRLLDQGILVPCQSPWNTPLLPVKKPGTNDYRPVQDLREVNKRVEDIHPTVPNPYNLLSGLPPSHQWYTVLDLKDAFFCLRLHPTSQPLFAFEWRDPGMGISGQLTWTRLPQGFKNSPTLFNEALHRDLADFRIQHPDLILLQYVDDILLAATSELDCQQGTRALLQTLGDLGYRASAKKAQICQKQVKYLGYLLREGQRWLTEARKETVMGQPVPKTPRQLREFLGTAGFCRLWIPGFAEMAAPLYPLTKPGTLFSWGPDQQKAYQEIKQALLTAPALGLPDLTKPFELFVDEKQGYAKGVLTQKLGPWRRPVAYLSKKLDPVAAGWPPCLRMVAAIAVLTKDAGKLTMGQPLVILAPHAVEALVKQPPDRWLSNARMTHYQAMLLDTDRVQFGPVVALNPATLLPLPEEGAPHDCLEILAETHGTRPDLTDQPIPDADHTWYTDGSSFLQEGQRKAGAAVTTETEVIWAGALPAGTSAQRAELIALTQALKMAEGKRLNVYTDSRYAFATAHIHGEIYRRRGWLTSEGREIKNKSEILALLKALFLPKRLSIIHCLGHQKGDSAEARGNRLADQAAREAAIKTPPDTSTLLAGKRTADGSEFEKRTADGSEFESPKKKAKVE

SEQ ID NO: 6067 - protein, 2100 aa, synthetic construct
MPAAKRVKLDGGDKKYSIGLDIGTNSVGWAVITDEYKVPSKKFKVLGNTDRHSIKKNLIGALLFDSGETAEATRLKRTARRRYTRRKNRICYLQEIFSNEMAKVDDSFFHRLEESFLVEEDKKHERHPIFGNIVDEVAYHEKYPTIYHLRKKLVDSTDKADLRLIYLALAHMIKFRGHFLIEGDLNPDNSDVDKLFIQLVQTYNQLFEENPINASGVDAKAILSARLSKSRRLENLIAQLPGEKKNGLFGNLIALSLGLTPNFKSNFDLAEDAKLQLSKDTYDDDLDNLLAQIGDQYADLFLAAKNLSDAILLSDILRVNTEITKAPLSASMIKRYDEHHQDLTLLKALVRQQLPEKYKEIFFDQSKNGYAGYIDGGASQEEFYKFIKPILEKMDGTEELLVKLNREDLLRKQRTFDNGSIPHQIHLGELHAILRRQEDFYPFLKDNREKIEKILTFRIPYYVGPLARGNSRFAWMTRKSEETITPWNFEEVVDKGASAQSFIERMTNFDKNLPNEKVLPKHSLLYEYFTVYNELTKVKYVTEGMRKPAFLSGEQKKAIVDLLFKTNRKVTVKQLKEDYFKKIECFDSVEISGVEDRFNASLGTYHDLLKIIKDKDFLDNEENEDILEDIVLTLTLFEDREMIEERLKTYAHLFDDKVMKQLKRRRYTGWGRLSRKLINGIRDKQSGKTILDFLKSDGFANRNFMQLIHDDSLTFKEDIQKAQVSGQGDSLHEHIANLAGSPAIKKGILQTVKVVDELVKVMGRHKPENIVIEMARENQTTQKGQKNSRERMKRIEEGIKELGSQILKEHPVENTQLQNEKLYLYYLQNGRDMYVDQELDINRLSDYDVDHIVPQSFLKDDSIDNKVLTRSDKARGKSDNVPSEEVVKKMKNYWRQLLNAKLITQRKFDNLTKAERGGLSELDKAGFIKRQLVETRQITKHVAQILDSRMNTKYDENDKLIREVKVITLKSKLVSDFRKDFQFYKVREINNYHHAHDAYLNAVVGTALIKKYPKLESEFVYGDYKVYDVRKMIAKSEQEIGKATAKYFFYSNIMNFFKTEITLANGEIRKRPLIETNGETGEIVWDKGRDFATVRKVLSMPQVNIVKKTEVQTGGFSKESILPKRNSDKLIARKKDWDPKKYGGFDSPTVAYSVLVVAKVEKGKSKKLKSVKELLGITIMERSSFEKNPIDFLEAKGYKEVKKDLIIKLPKYSLFELENGRKRMLASAGELQKGNELALPSKYVNFLYLASHYEKLKGSPEDNEQKQLFVEQHKHYLDEIIEQISEFSKRVILADANLDKVLSAYNKHRDKPIREQAENIIHLFTLTNLGAPAAFKYFDTTIDRKRYTSTKEVLDATLIHQSITGLYETRIDLSQLGGDGGGGSGGSGGSGGSGGSGGTLNIEDEYRLHETSKEPDVSLGSTWLSDFPQAWAETGGMGLAVRQAPLIIPLKATSTPVSIKQYPMSQEARLGIKPHIQRLLDQGILVPCQSPWNTPLLPVKKPGTNDYRPVQDLREVNKRVEDIHPTVPNPYNLLSGLPPSHQWYTVLDLKDAFFCLRLHPTSQPLFAFEWRDPEMGISGQLTWTRLPQGFKNSPTLFNEALHRDLAGFRIQHPDLILLQYVDDLLLAATSELDCQQGTRALLQTLGDLGYRASAKKAQICQKQVKYLGYLLKEGQRWLTEARKETVMGQPIPKTPRQLREFLGTAGFCRLWIPGFAEMAAPLYPLTKPGTLFNWGPDQQKAFQEIKQALLTAPALGLPDLTKPFELFVDEKQGYAKGVLTQKLGPWRRPVAYLSKKLDPVAAGWPPCLRMVAAIAVLTKDAGKLTMGQPLVILAPHAVEALVKQPPDRWLSNARMTHYQALLLDTDRVQFGPVVALNPATLLPLPEEGLQHDCLDILAEAHGTRSDLMDQPLPDADHTWYTDGSSFLQEGQRKAGAAVTTETEVIWARALPAGTSAQRAELIALTQALKMAEGKKLNVYTDSRYAFATAHIHGEIYRRRGWLTSEGKEIKNKDEILALLKALFLPKRLSIIHCPGHQKGNSAEARGNRMADQAAREVATRETPETSTLLAGKRTADGSEFEKRTADGSEFESPKKKAKVE

SEQ ID NO: 6068 - protein, 2100 aa, synthetic construct
MPAAKRVKLDGGDKKYSIGLDIGTNSVGWAVITDEYKVPSKKFKVLGNTDRHSIKKNLIGALLFDSGETAEATRLKRTARRRYTRRKNRICYLQEIFSNEMAKVDDSFFHRLEESFLVEEDKKHERHPIFGNIVDEVAYHEKYPTIYHLRKKLVDSTDKADLRLIYLALAHMIKFRGHFLIEGDLNPDNSDVDKLFIQLVQTYNQLFEENPINASGVDAKAILSARLSKSRRLENLIAQLPGEKKNGLFGNLIALSLGLTPNFKSNFDLAEDAKLQLSKDTYDDDLDNLLAQIGDQYADLFLAAKNLSDAILLSDILRVNTEITKAPLSASMIKRYDEHHQDLTLLKALVRQQLPEKYKEIFFDQSKNGYAGYIDGGASQEEFYKFIKPILEKMDGTEELLVKLNREDLLRKQRTFDNGSIPHQIHLGELHAILRRQEDFYPFLKDNREKIEKILTFRIPYYVGPLARGNSRFAWMTRKSEETITPWNFEEVVDKGASAQSFIERMTNFDKNLPNEKVLPKHSLLYEYFTVYNELTKVKYVTEGMRKPAFLSGEQKKAIVDLLFKTNRKVTVKQLKEDYFKKIECFDSVEISGVEDRFNASLGTYHDLLKIIKDKDFLDNEENEDILEDIVLTLTLFEDREMIEERLKTYAHLFDDKVMKQLKRRRYTGWGRLSRKLINGIRDKQSGKTILDFLKSDGFANRNFMQLIHDDSLTFKEDIQKAQVSGQGDSLHEHIANLAGSPAIKKGILQTVKVVDELVKVMGRHKPENIVIEMARENQTTQKGQKNSRERMKRIEEGIKELGSQILKEHPVENTQLQNEKLYLYYLQNGRDMYVDQELDINRLSDYDVDHIVPQSFLKDDSIDNKVLTRSDKARGKSDNVPSEEVVKKMKNYWRQLLNAKLITQRKFDNLTKAERGGLSELDKAGFIKRQLVETRQITKHVAQILDSRMNTKYDENDKLIREVKVITLKSKLVSDFRKDFQFYKVREINNYHHAHDAYLNAVVGTALIKKYPKLESEFVYGDYKVYDVRKMIAKSEQEIGKATAKYFFYSNIMNFFKTEITLANGEIRKRPLIETNGETGEIVWDKGRDFATVRKVLSMPQVNIVKKTEVQTGGFSKESILPKRNSDKLIARKKDWDPKKYGGFDSPTVAYSVLVVAKVEKGKSKKLKSVKELLGITIMERSSFEKNPIDFLEAKGYKEVKKDLIIKLPKYSLFELENGRKRMLASAGELQKGNELALPSKYVNFLYLASHYEKLKGSPEDNEQKQLFVEQHKHYLDEIIEQISEFSKRVILADANLDKVLSAYNKHRDKPIREQAENIIHLFTLTNLGAPAAFKYFDTTIDRKRYTSTKEVLDATLIHQSITGLYETRIDLSQLGGDGGGGSGGSGGSGGSGGSGGTLNIEDEHRLHETSKEPDVSLGSTWLSDFPQAWAETGGMGLAVRQAPLIIPLKATSTPVSIKQYPMSQEARLGIKPHIQRLLDQGILVPCQSPWNTPLLPVKKPGTNDYRPVQDLREVNKRVEDIHPTVPNPYNLLSGLPPSHQWYTVLDLKDAFFCLRLHPTSQPLFAFEWRDPEMGISGQLTWTRLPQGFKNSPTLFDEALHRDLADFRIQHPDLILLQYVDDLLLAATSELDCQQGTRALLQTLGNLGYRASAKKAQICQKQVKYLGYLLKEGQRWLTEARKETVMGQPTPKTPRQLREFLGTAGFCRLWIPGFAEMAAPLYPLTKTGTLFNWGPDQQKAYQEIKQALLTAPALGLPDLTKPFELFVDEKQGYAKGVLTQKLGPWRRPVAYLSKKLDPVAAGWPPCLRMVAAIAVLTKDAGKLTMGQPLVILAPHAVEALVKQPPDRWLSNARMTHYQALLLDTDRVQFGPVVALNPATLLPLPEEGLQHNCLDILAEAHGTRPDLTDQPLPDADHTWYTDGSSLLQEGQRKAGAAVTTETEVIWAKALPAGTSAQRAELIALTQALKMAEGKKLNVYTDSRYAFATAHIHGEIYRRRGLLTSEGKEIKNKDEILALLKALFLPKRLSIIHCPGHQKGHSAEARGNRMADQAARKAAITETPDTSTLLAGKRTADGSEFEKRTADGSEFESPKKKAKVE

SEQ ID NO: 6069 - protein, 2094 aa, synthetic construct
MPAAKRVKLDGGDKKYSIGLDIGTNSVGWAVITDEYKVPSKKFKVLGNTDRHSIKKNLIGALLFDSGETAEATRLKRTARRRYTRRKNRICYLQEIFSNEMAKVDDSFFHRLEESFLVEEDKKHERHPIFGNIVDEVAYHEKYPTIYHLRKKLVDSTDKADLRLIYLALAHMIKFRGHFLIEGDLNPDNSDVDKLFIQLVQTYNQLFEENPINASGVDAKAILSARLSKSRRLENLIAQLPGEKKNGLFGNLIALSLGLTPNFKSNFDLAEDAKLQLSKDTYDDDLDNLLAQIGDQYADLFLAAKNLSDAILLSDILRVNTEITKAPLSASMIKRYDEHHQDLTLLKALVRQQLPEKYKEIFFDQSKNGYAGYIDGGASQEEFYKFIKPILEKMDGTEELLVKLNREDLLRKQRTFDNGSIPHQIHLGELHAILRRQEDFYPFLKDNREKIEKILTFRIPYYVGPLARGNSRFAWMTRKSEETITPWNFEEVVDKGASAQSFIERMTNFDKNLPNEKVLPKHSLLYEYFTVYNELTKVKYVTEGMRKPAFLSGEQKKAIVDLLFKTNRKVTVKQLKEDYFKKIECFDSVEISGVEDRFNASLGTYHDLLKIIKDKDFLDNEENEDILEDIVLTLTLFEDREMIEERLKTYAHLFDDKVMKQLKRRRYTGWGRLSRKLINGIRDKQSGKTILDFLKSDGFANRNFMQLIHDDSLTFKEDIQKAQVSGQGDSLHEHIANLAGSPAIKKGILQTVKVVDELVKVMGRHKPENIVIEMARENQTTQKGQKNSRERMKRIEEGIKELGSQILKEHPVENTQLQNEKLYLYYLQNGRDMYVDQELDINRLSDYDVDHIVPQSFLKDDSIDNKVLTRSDKARGKSDNVPSEEVVKKMKNYWRQLLNAKLITQRKFDNLTKAERGGLSELDKAGFIKRQLVETRQITKHVAQILDSRMNTKYDENDKLIREVKVITLKSKLVSDFRKDFQFYKVREINNYHHAHDAYLNAVVGTALIKKYPKLESEFVYGDYKVYDVRKMIAKSEQEIGKATAKYFFYSNIMNFFKTEITLANGEIRKRPLIETNGETGEIVWDKGRDFATVRKVLSMPQVNIVKKTEVQTGGFSKESILPKRNSDKLIARKKDWDPKKYGGFDSPTVAYSVLVVAKVEKGKSKKLKSVKELLGITIMERSSFEKNPIDFLEAKGYKEVKKDLIIKLPKYSLFELENGRKRMLASAGELQKGNELALPSKYVNFLYLASHYEKLKGSPEDNEQKQLFVEQHKHYLDEIIEQISEFSKRVILADANLDKVLSAYNKHRDKPIREQAENIIHLFTLTNLGAPAAFKYFDTTIDRKRYTSTKEVLDATLIHQSITGLYETRIDLSQLGGDGGGGSGGSGGSGGSGGSGGTLQLDDEYRLYSPLVKPDQNIQFWLEQFPQAWAETAGMGLAKQVPPQVIQLKASATPVSVRQYPLSKEAQEGIRPHVQRLIQQGILVPVQSPWNTPLLPVRKPGTNDYRPVQDLREVNKRVQDIHPTVPNPYNLLCALPPQRSWYTVLDLKDAFFCLRLHPTSQPLFAFEWRDPGTGRTGQLTWTRLPQGFKNSPTIFDEALHRDLANFRIQHPQVTLLQYVDDLLLAGATKQDCLEGTKALLLELSDLGYRASAKKAQICRREVTYLGYSLRDGQRWLTEARKKTVVQIPAPTTAKQVREFLGTAGFCRLWIPGFATLAAPLYPLTKEKGEFSWAPEHQKAFDAIKKALLSAPALALPDVTKPFTLYVDERKGVARGVLTQTLGPWRRPVAYLSKKLDPVASGWPVCLKAIAAVAILVKDADKLTLGQNITVIAPHALENIVRQPPDRWMTNARMTHYQSLLLTERVTFAPPAALNPATLLPEETDEPVTHDCHQLLIEETGVRKDLTDIPLTGEVLTWFTDGSSYVVEGKRMAGAAVVDGTRTIWASSLPEGTSAQKAELMALTQALRLAEGKSINIYTDSRYAFATAHVHGAIYKQRGLLTSAGREIKNKEEILSLLEALHLPKRLAIIHCPGHQKAKDPISRGNQMADRVAKQAAQGVNLLAGKRTADGSEFEKRTADGSEFESPKKKAKVE

SEQ ID NO: 6070 - protein, 2094 aa, synthetic construct; identical to SEQ ID NO: 6069

SEQ ID NO: 6071 - protein, 2180 aa, synthetic construct
MPAAKRVKLDGGDKKYSIGLDIGTNSVGWAVITDEYKVPSKKFKVLGNTDRHSIKKNLIGALLFDSGETAEATRLKRTARRRYTRRKNRICYLQEIFSNEMAKVDDSFFHRLEESFLVEEDKKHERHPIFGNIVDEVAYHEKYPTIYHLRKKLVDSTDKADLRLIYLALAHMIKFRGHFLIEGDLNPDNSDVDKLFIQLVQTYNQLFEENPINASGVDAKAILSARLSKSRRLENLIAQLPGEKKNGLFGNLIALSLGLTPNFKSNFDLAEDAKLQLSKDTYDDDLDNLLAQIGDQYADLFLAAKNLSDAILLSDILRVNTEITKAPLSASMIKRYDEHHQDLTLLKALVRQQLPEKYKEIFFDQSKNGYAGYIDGGASQEEFYKFIKPILEKMDGTEELLVKLNREDLLRKQRTFDNGSIPHQIHLGELHAILRRQEDFYPFLKDNREKIEKILTFRIPYYVGPLARGNSRFAWMTRKSEETITPWNFEEVVDKGASAQSFIERMTNFDKNLPNEKVLPKHSLLYEYFTVYNELTKVKYVTEGMRKPAFLSGEQKKAIVDLLFKTNRKVTVKQLKEDYFKKIECFDSVEISGVEDRFNASLGTYHDLLKIIKDKDFLDNEENEDILEDIVLTLTLFEDREMIEERLKTYAHLFDDKVMKQLKRRRYTGWGRLSRKLINGIRDKQSGKTILDFLKSDGFANRNFMQLIHDDSLTFKEDIQKAQVSGQGDSLHEHIANLAGSPAIKKGILQTVKVVDELVKVMGRHKPENIVIEMARENQTTQKGQKNSRERMKRIEEGIKELGSQILKEHPVENTQLQNEKLYLYYLQNGRDMYVDQELDINRLSDYDVDHIVPQSFLKDDSIDNKVLTRSDKARGKSDNVPSEEVVKKMKNYWRQLLNAKLITQRKFDNLTKAERGGLSELDKAGFIKRQLVETRQITKHVAQILDSRMNTKYDENDKLIREVKVITLKSKLVSDFRKDFQFYKVREINNYHHAHDAYLNAVVGTALIKKYPKLESEFVYGDYKVYDVRKMIAKSEQEIGKATAKYFFYSNIMNFFKTEITLANGEIRKRPLIETNGETGEIVWDKGRDFATVRKVLSMPQVNIVKKTEVQTGGFSKESILPKRNSDKLIARKKDWDPKKYGGFDSPTVAYSVLVVAKVEKGKSKKLKSVKELLGITIMERSSFEKNPIDFLEAKGYKEVKKDLIIKLPKYSLFELENGRKRMLASAGELQKGNELALPSKYVNFLYLASHYEKLKGSPEDNEQKQLFVEQHKHYLDEIIEQISEFSKRVILADANLDKVLSAYNKHRDKPIREQAENIIHLFTLTNLGAPAAFKYFDTTIDRKRYTSTKEVLDATLIHQSITGLYETRIDLSQLGGDGGGGSGGSGGSGGSGGSGGMDPLQLLQPLEAEIKGTKLKAHWNSGATITCVPQAFLEEEVPIKNIWIKTIHGEKEQPVYYLTFKIQGRKVEAEVISSPYDYILVSPSDIPWLMKKPLQLTTLVPLQEYEERLLKQTMLTGSYKEKLQSLFLKYDALWQHWENQVGHRRIKPHHIATGTVNPRPQKQYPINPKAKASIQTVINDLLKQGVLIQQNSIMNTPVYPVPKPDGKWRMVLDYREVNKTIPLIAAQNQHSAGILSSIFRGKYKTTLDLSNGFWAHSITPESYWLTAFTWLGQQYCWTRLPQGFLNSPALFNADVVDLLKEVPNVQVYVDDIYISHDDPREHLEQLEKVFSLLLNAGYVVSLKKSEIAQHEVEFLGFNITKEGRGLTETFKQKLLNITPPRDLKQLQSILGLLNFARNFIPNFSELVKPLYNIIATAPGKYITWTTDNSQQLQNIISMLNSAENLEERNPEVRLIMKVNTSPSAGYIRFYNEFAKRPIMYLNYVYTKAEVKFTNTEKLLTTIHKGLIKALDLGMGQEILVYSPIVSMTKIQKTPLPERKALPIRWITWMSYLEDPRIQFHYDKTLPELQQVPTVTDDIIAKIKHPSEFSMVFYTDGSAIKHPNVNKSHNAGMGIAQVQFKPEFTVINTWSIPLGDHTAQLAEVAAVEFACKKALKIDGPVLIVTDSFYVAESVNKELPYWQSNGFFNNKKKPLKHVSKWKSIADCIQLKPDIIIIHEKGHQPTASTFHTEGNNLADKLATQGSYVVNAGKRTADGSEFEKRTADGSEFESPKKKAKVE

SEQ ID NO: 6072 - protein, 2180 aa, synthetic construct
MPAAKRVKLDGGDKKYSIGLDIGTNSVGWAVITDEYKVPSKKFKVLGNTDRHSIKKNLIGALLFDSGETAEATRLKRTARRRYTRRKNRICYLQEIFSNEMAKVDDSFFHRLEESFLVEEDKKHERHPIFGNIVDEVAYHEKYPTIYHLRKKLVDSTDKADLRLIYLALAHMIKFRGHFLIEGDLNPDNSDVDKLFIQLVQTYNQLFEENPINASGVDAKAILSARLSKSRRLENLIAQLPGEKKNGLFGNLIALSLGLTPNFKSNFDLAEDAKLQLSKDTYDDDLDNLLAQIGDQYADLFLAAKNLSDAILLSDILRVNTEITKAPLSASMIKRYDEHHQDLTLLKALVRQQLPEKYKEIFFDQSKNGYAGYIDGGASQEEFYKFIKPILEKMDGTEELLVKLNREDLLRKQRTFDNGSIPHQIHLGELHAILRRQEDFYPFLKDNREKIEKILTFRIPYYVGPLARGNSRFAWMTRKSEETITPWNFEEVVDKGASAQSFIERMTNFDKNLPNEKVLPKHSLLYEYFTVYNELTKVKYVTEGMRKPAFLSGEQKKAIVDLLFKTNRKVTVKQLKEDYFKKIECFDSVEISGVEDRFNASLGTYHDLLKIIKDKDFLDNEENEDILEDIVLTLTLFEDREMIEERLKTYAHLFDDKVMKQLKRRRYTGWGRLSRKLINGIRDKQSGKTILDFLKSDGFANRNFMQLIHDDSLTFKEDIQKAQVSGQGDSLHEHIANLAGSPAIKKGILQTVKVVDELVKVMGRHKPENIVIEMARENQTTQKGQKNSRERMKRIEEGIKELGSQILKEHPVENTQLQNEKLYLYYLQNGRDMYVDQELDINRLSDYDVDHIVPQSFLKDDSIDNKVLTRSDKARGKSDNVPSEEVVKKMKNYWRQLLNAKLITQRKFDNLTKAERGGLSELDKAGFIKRQLVETRQITKHVAQILDSRMNTKYDENDKLIREVKVITLKSKLVSDFRKDFQFYKVREINNYHHAHDAYLNAVVGTALIKKYPKLESEFVYGDYKVYDVRKMIAKSEQEIGKATAKYFFYSNIMNFFKTEITLANGEIRKRPLIETNGETGEIVWDKGRDFATVRKVLSMPQVNIVKKTEVQTGGFSKESILPKRNSDKLIARKKDWDPKKYGGFDSPTVAYSVLVVAKVEKGKSKKLKSVKELLGITIMERSSFEKNPIDFLEAKGYKEVKKDLIIKLPKYSLFELENGRKRMLASAGELQKGNELALPSKYVNFLYLASHYEKLKGSPEDNEQKQLFVEQHKHYLDEIIEQISEFSKRVILADANLDKVLSAYNKHRDKPIREQAENIIHLFTLTNLGAPAAFKYFDTTIDRKRYTSTKEVLDATLIHQSITGLYETRIDLSQLGGDGGGGSGGSGGSGGSGGSGGMDPLQLLQPLEAEIKGTKLKAHWNSGATITCVPQAFLEEEVPIKNIWIKTIHGEKEQPVYYLTFKIQGRKVEAEVISSPYDYILVSPSDIPWLMKKPLQLTTLVPLQEYEERLLKQTMLTGSYKEKLQSLFLKYDALWQHWENQVGHRRIKPHHIATGTVNPRPQKQYPINPKAKASIQTVINDLLKQGVLIQQNSIMNTPVYPVPKPDGKWRMVLDYREVNKTIPLIAAQNQHSAGILSSIFRGKYKTTLDLSNGFWAHSITPESYWLTAFTWLGQQYCWTRLPQGFLNSPALFNADVVDLLKEVPNVQVYVDDIYISHDDPREHLEQLEKVFSLLLNAGYVVSLKKSEIAQHEVEFLGFNITKEGRGLTETFKQKLLNITPPRDLKQLQSILGKLNFARNFIPNFSELVKPLYNIIATAPGKYITWTTDNSQQLQNIISMLNSAENLEERNPEVRLIMKVNTSPSAGYIRFYNEFAKRPIMYLNYVYTKAEVKFTNTEKLLTTIHKGLIKALDLGMGQEILVYSPIVSMTKIQKTPLPERKALPIRWITWMSYLEDPRIQFHYDKTLPELQQVPTVTDDIIAKIKHPSEFSMVFYTDGSAIKHPNVNKSHNAGMGIAQVQFKPEFTVINTWSIPLGDHTAQLAEVAAVEFACKKALKIDGPVLIVTDSFYVAESVNKELPYWQSNGFFNNKKKPLKHVSKWKSIADCIQLKPDIIIIHEKGHQPTASTFHTEGNNLADKLATQGSYVVNAGKRTADGSEFEKRTADGSEFESPKKKAKVE

SEQ ID NO: 6073 - protein, 2098 aa, synthetic construct; identical to SEQ ID NO: 4502

SEQ ID NO: 6074 - protein, 2098 aa, synthetic construct
MPAAKRVKLDGGDKKYSIGLDIGTNSVGWAVITDEYKVPSKKFKVLGNTDRHSIKKNLIGALLFDSGETAEATRLKRTARRRYTRRKNRICYLQEIFSNEMAKVDDSFFHRLEESFLVEEDKKHERHPIFGNIVDEVAYHEKYPTIYHLRKKLVDSTDKADLRLIYLALAHMIKFRGHFLIEGDLNPDNSDVDKLFIQLVQTYNQLFEENPINASGVDAKAILSARLSKSRRLENLIAQLPGEKKNGLFGNLIALSLGLTPNFKSNFDLAEDAKLQLSKDTYDDDLDNLLAQIGDQYADLFLAAKNLSDAILLSDILRVNTEITKAPLSASMIKRYDEHHQDLTLLKALVRQQLPEKYKEIFFDQSKNGYAGYIDGGASQEEFYKFIKPILEKMDGTEELLVKLNREDLLRKQRTFDNGSIPHQIHLGELHAILRRQEDFYPFLKDNREKIEKILTFRIPYYVGPLARGNSRFAWMTRKSEETITPWNFEEVVDKGASAQSFIERMTNFDKNLPNEKVLPKHSLLYEYFTVYNELTKVKYVTEGMRKPAFLSGEQKKAIVDLLFKTNRKVTVKQLKEDYFKKIECFDSVEISGVEDRFNASLGTYHDLLKIIKDKDFLDNEENEDILEDIVLTLTLFEDREMIEERLKTYAHLFDDKVMKQLKRRRYTGWGRLSRKLINGIRDKQSGKTILDFLKSDGFANRNFMQLIHDDSLTFKEDIQKAQVSGQGDSLHEHIANLAGSPAIKKGILQTVKVVDELVKVMGRHKPENIVIEMARENQTTQKGQKNSRERMKRIEEGIKELGSQILKEHPVENTQLQNEKLYLYYLQNGRDMYVDQELDINRLSDYDVDHIVPQSFLKDDSIDNKVLTRSDKARGKSDNVPSEEVVKKMKNYWRQLLNAKLITQRKFDNLTKAERGGLSELDKAGFIKRQLVETRQITKHVAQILDSRMNTKYDENDKLIREVKVITLKSKLVSDFRKDFQFYKVREINNYHHAHDAYLNAVVGTALIKKYPKLESEFVYGDYKVYDVRKMIAKSEQEIGKATAKYFFYSNIMNFFKTEITLANGEIRKRPLIETNGETGEIVWDKGRDFATVRKVLSMPQVNIVKKTEVQTGGFSKESILPKRNSDKLIARKKDWDPKKYGGFDSPTVAYSVLVVAKVEKGKSKKLKSVKELLGITIMERSSFEKNPIDFLEAKGYKEVKKDLIIKLPKYSLFELENGRKRMLASAGELQKGNELALPSKYVNFLYLASHYEKLKGSPEDNEQKQLFVEQHKHYLDEIIEQISEFSKRVILADANLDKVLSAYNKHRDKPIREQAENIIHLFTLTNLGAPAAFKYFDTTIDRKRYTSTKEVLDATLIHQSITGLYETRIDLSQLGGDGGGGSGGSGGSGGSGGSGGVLNLEEEYRLHEKPVPSSIDPSWLQLFPTVWAERAGMGLANQVPPVVVELRSGASPVAVRQYPMSKEAREGIRPHIQRFLDLGVLVPCQSPWNTPLLPVKKPGTNDYRPVQDLREINKRVQDIHPTVPNPYNLLSSLPPSHTWYSVLDLKDAFFCLKLHPNSQPLFAFEWRDPEKGNTGQLTWTRLPQGFKNSPTLFNEALHRDLAPFRALNPQVVLLQYVDDLLVAAPTYRDCKEGTQKLLQELSKLGYRVSAKKAQLCQKEVTYLGYLLKEGKRWLTPARKATVMKIPPPTTPRQVREFLGKAGFCRLFIPGFASLAAPLYPLTKPSIPFIWTEEHQKAFDRIKEALLSAPALALPDLTKPFTLYVDERAGVARGVLTQTLGPWRRPVAYLSKKLDPVASGWPTCLKAVAAVALLLKDADKLTLGQNVTVIASHSLESIVRQPPDRWMTNARMTHYQSLLLNERVSFAPPAVLNPATLLPVESEATPVHRCSEILAEETGTRRDLKDQPLPGVPAWYTDGSSFIAEGKRRAGAAIVDGKRTVWASSLPEGTSAQKAELVALTQALRLAEGKDINIYTDSRYAFATAHIHGAIYKQRGWLTSAGKDIKNKEEILALLEAIHLPKRVAIIHCPGHQKGNDPVATGNRRADEAAKQAALSTRVLAETTKPAGKRTADGSEFEKRTADGSEFESPKKKAKVE

SEQ ID NO: 6075 - protein, 2100 aa, synthetic construct
MPAAKRVKLDGGDKKYSIGLDIGTNSVGWAVITDEYKVPSKKFKVLGNTDRHSIKKNLIGALLFDSGETAEATRLKRTARRRYTRRKNRICYLQEIFSNEMAKVDDSFFHRLEESFLVEEDKKHERHPIFGNIVDEVAYHEKYPTIYHLRKKLVDSTDKADLRLIYLALAHMIKFRGHFLIEGDLNPDNSDVDKLFIQLVQTYNQLFEENPINASGVDAKAILSARLSKSRRLENLIAQLPGEKKNGLFGNLIALSLGLTPNFKSNFDLAEDAKLQLSKDTYDDDLDNLLAQIGDQYADLFLAAKNLSDAILLSDILRVNTEITKAPLSASMIKRYDEHHQDLTLLKALVRQQLPEKYKEIFFDQSKNGYAGYIDGGASQEEFYKFIKPILEKMDGTEELLVKLNREDLLRKQRTFDNGSIPHQIHLGELHAILRRQEDFYPFLKDNREKIEKILTFRIPYYVGPLARGNSRFAWMTRKSEETITPWNFEEVVDKGASAQSFIERMTNFDKNLPNEKVLPKHSLLYEYFTVYNELTKVKYVTEGMRKPAFLSGEQKKAIVDLLFKTNRKVTVKQLKEDYFKKIECFDSVEISGVEDRFNASLGTYHDLLKIIKDKDFLDNEENEDILEDIVLTLTLFEDREMIEERLKTYAHLFDDKVMKQLKRRRYTGWGRLSRKLINGIRDKQSGKTILDFLKSDGFANRNFMQLIHDDSLTFKEDIQKAQVSGQGDSLHEHIANLAGSPAIKKGILQTVKVVDELVKVMGRHKPENIVIEMARENQTTQKGQKNSRERMKRIEEGIKELGSQILKEHPVENTQLQNEKLYLYYLQNGRDMYVDQELDINRLSDYDVDHIVPQSFLKDDSIDNKVLTRSDKARGKSDNVPSEEVVKKMKNYWRQLLNAKLITQRKFDNLTKAERGGLSELDKAGFIKRQLVETRQITKHVAQILDSRMNTKYDENDKLIREVKVITLKSKLVSDFRKDFQFYKVREINNYHHAHDAYLNAVVGTALIKKYPKLESEFVYGDYKVYDVRKMIAKSEQEIGKATAKYFFYSNIMNFFKTEITLANGEIRKRPLIETNGETGEIVWDKGRDFATVRKVLSMPQVNIVKKTEVQTGGFSKESILPKRNSDKLIARKKDWDPKKYGGFDSPTVAYSVLVVAKVEKGKSKKLKSVKELLGITIMERSSFEKNPIDFLEAKGYKEVKKDLIIKLPKYSLFELENGRKRMLASAGELQKGNELALPSKYVNFLYLASHYEKLKGSPEDNEQKQLFVEQHKHYLDEIIEQISEFSKRVILADANLDKVLSAYNKHRDKPIREQAENIIHLFTLTNLGAPAAFKYFDTTIDRKRYTSTKEVLDATLIHQSITGLYETRIDLSQLGGDGGGGSGGSGGSGGSGGSGGTLNIEDEYRLHETSKEPDVPLGSTWLSDFPQAWAETGGMGLAVRQAPLIIPLKATSTPVSIKQYPMSQEARLGIKPHIQRLLDQGILVPCQSPWNTPLLPVKKPGTNDYRPVQDLREVNKRVEDIHPTVPNPYNLLSGLPPSHQWYTVLDLKDAFFCLRLHPTSQPLFAFEWRDPEMGISGQLTWTRLPQGFKNSPTLFNEALHRDLADFRIQHPDLILLQYVDDLLLAATSEQDCQRGTRALLQTLGNLGYRASAKKAQICQKQVKYLGYLLKEGQRWLTEARKETVMGQPTPKTPRQLREFLGKAGFCRLFIPGFAEMAAPLYPLTKPGTLFNWGPDQQKAYQEIKQALLTAPALGLPDLTKPFELFVDEKQGYAKGVLTQKLGPWRRPVAYLSKKLDPVAAGWPPCLRMVAAIAVLTKDAGKLTMGQPLVILAPHAVEALVKQPPDRWLSNARMTHYQAMLLDTDRVQFGPVVALNPATLLPLPEKEAPHDCLEILAETHGTRPDLTDQPIPDADYTWYTDGSSFLQEGQRRAGAAVTTETEVIWARALPAGTSAQRAELIALTQALKMAEGKKLNVYTDSRYAFATAHVHGEIYRRRGWLTSEGREIKNKNEILALLKALFLPKRLSIIHCPGHQKGNSAEARGNRMADQAAREAAMKAVLETSTLLAGKRTADGSEFEKRTADGSEFESPKKKAKVE

SEQ ID NO: 6076 - protein, 2105 aa, synthetic construct
MPAAKRVKLDGGDKKYSIGLDIGTNSVGWAVITDEYKVPSKKFKVLGNTDRHSIKKNLIGALLFDSGETAEATRLKRTARRRYTRRKNRICYLQEIFSNEMAKVDDSFFHRLEESFLVEEDKKHERHPIFGNIVDEVAYHEKYPTIYHLRKKLVDSTDKADLRLIYLALAHMIKFRGHFLIEGDLNPDNSDVDKLFIQLVQTYNQLFEENPINASGVDAKAILSARLSKSRRLENLIAQLPGEKKNGLFGNLIALSLGLTPNFKSNFDLAEDAKLQLSKDTYDDDLDNLLAQIGDQYADLFLAAKNLSDAILLSDILRVNTEITKAPLSASMIKRYDEHHQDLTLLKALVRQQLPEKYKEIFFDQSKNGYAGYIDGGASQEEFYKFIKPILEKMDGTEELLVKLNREDLLRKQRTFDNGSIPHQIHLGELHAILRRQEDFYPFLKDNREKIEKILTFRIPYYVGPLARGNSRFAWMTRKSEETITPWNFEEVVDKGASAQSFIERMTNFDKNLPNEKVLPKHSLLYEYFTVYNELTKVKYVTEGMRKPAFLSGEQKKAIVDLLFKTNRKVTVKQLKEDYFKKIECFDSVEISGVEDRFNASLGTYHDLLKIIKDKDFLDNEENEDILEDIVLTLTLFEDREMIEERLKTYAHLFDDKVMKQLKRRRYTGWGRLSRKLINGIRDKQSGKTILDFLKSDGFANRNFMQLIHDDSLTFKEDIQKAQVSGQGDSLHEHIANLAGSPAIKKGILQTVKVVDELVKVMGRHKPENIVIEMARENQTTQKGQKNSRERMKRIEEGIKELGSQILKEHPVENTQLQNEKLYLYYLQNGRDMYVDQELDINRLSDYDVDHIVPQSFLKDDSIDNKVLTRSDKARGKSDNVPSEEVVKKMKNYWRQLLNAKLITQRKFDNLTKAERGGLSELDKAGFIKRQLVETRQITKHVAQILDSRMNTKYDENDKLIREVKVITLKSKLVSDFRKDFQFYKVREINNYHHAHDAYLNAVVGTALIKKYPKLESEFVYGDYKVYDVRKMIAKSEQEIGKATAKYFFYSNIMNFFKTEITLANGEIRKRPLIETNGETGEIVWDKGRDFATVRKVLSMPQVNIVKKTEVQTGGFSKESILPKRNSDKLIARKKDWDPKKYGGFDSPTVAYSVLVVAKVEKGKSKKLKSVKELLGITIMERSSFEKNPIDFLEAKGYKEVKKDLIIKLPKYSLFELENGRKRMLASAGELQKGNELALPSKYVNFLYLASHYEKLKGSPEDNEQKQLFVEQHKHYLDEIIEQISEFSKRVILADANLDKVLSAYNKHRDKPIREQAENIIHLFTLTNLGAPAAFKYFDTTIDRKRYTSTKEVLDATLIHQSITGLYETRIDLSQLGGDGGGGSGGSGGSGGSGGSGGSGGTAPLEEEYRLFLEAPIQNVTLLEQWKREIPKVWAEINPPGLASTQAPIHVQLLSTALPVRVRQYPITLEAKRSLRETIRKFRAAGILRPVHSPWNTPLLPVRKSGTSEYRMVQDLREVNKRVETIHPTVPNPYTLLSLLPPDRIWYSVLDLKDAFFCIPLAPESQLIFAFEWADAEEGESGQLTWTRLPQGFKNSPTLFDEALNRDLQGFRLDHPSVSLLQYVDDLLIAADTQAACLSATRDLLMTLAELGYRVSGKKAQLCQEEVTYLGFKIHKGSRSLSNSRTQAILQIPVPKTKRQVREFLGTIGYCRLWIPGFAELAQPLYAATRGGNDPLVWGEKEEEAFQSLKLALTQPPALALPSLDKPFQLFVEETSGAAKGVLTQALGPWKRPVAYLSKRLDPVAAGWPRCLRAIAAAALLTREASKLTFGQDIEITSSHNLESLLRSPPDKWLTNARITQYQVLLLDPPRVRFKQTAALNPATLLPETDDTLPIHHCLDTLDSLTSTRPDLTDQPLAQAEATLFTDGSSYIRDGKRYAGAAVVTLDSVIWAEPLPIGTSAQKAELIALTKALEWSKDKSVNIYTDSRYAFATLHVHGMIYRERGLLTAGGKAIKNAPEILALLTAVWLPKRVAVMHCKGHQKDDAPTSTGNRRADEVAREVAIRPLSTQATISAGKRTADGSEFEKRTADGSEFESPKKKAKVE

SEQ ID NO: 6077 - protein, 2105 aa, synthetic construct
MPAAKRVKLDGGDKKYSIGLDIGTNSVGWAVITDEYKVPSKKFKVLGNTDRHSIKKNLIGALLFDSGETAEATRLKRTARRRYTRRKNRICYLQEIFSNEMAKVDDSFFHRLEESFLVEEDKKHERHPIFGNIVDEVAYHEKYPTIYHLRKKLVDSTDKADLRLIYLALAHMIKFRGHFLIEGDLNPDNSDVDKLFIQLVQTYNQLFEENPINASGVDAKAILSARLSKSRRLENLIAQLPGEKKNGLFGNLIALSLGLTPNFKSNFDLAEDAKLQLSKDTYDDDLDNLLAQIGDQYADLFLAAKNLSDAILLSDILRVNTEITKAPLSASMIKRYDEHHQDLTLLKALVRQQLPEKYKEIFFDQSKNGYAGYIDGGASQEEFYKFIKPILEKMDGTEELLVKLNREDLLRKQRTFDNGSIPHQIHLGELHAILRRQEDFYPFLKDNREKIEKILTFRIPYYVGPLARGNSRFAWMTRKSEETITPWNFEEVVDKGASAQSFIERMTNFDKNLPNEKVLPKHSLLYEYFTVYNELTKVKYVTEGMRKPAFLSGEQKKAIVDLLFKTNRKVTVKQLKEDYFKKIECFDSVEISGVEDRFNASLGTYHDLLKIIKDKDFLDNEENEDILEDIVLTLTLFEDREMIEERLKTYAHLFDDKVMKQLKRRRYTGWGRLSRKLINGIRDKQSGKTILDFLKSDGFANRNFMQLIHDDSLTFKEDIQKAQVSGQGDSLHEHIANLAGSPAIKKGILQTVKVVDELVKVMGRHKPENIVIEMARENQTTQKGQKNSRERMKRIEEGIKELGSQILKEHPVENTQLQNEKLYLYYLQNGRDMYVDQELDINRLSDYDVDHIVPQSFLKDDSIDNKVLTRSDKARGKSDNVPSEEVVKKMKNYWRQLLNAKLITQRKFDNLTKAERGGLSELDKAGFIKRQLVETRQITKHVAQILDSRMNTKYDENDKLIREVKVITLKSKLVSDFRKDFQFYKVREINNYHHAHDAYLNAVVGTALIKKYPKLESEFVYGDYKVYDVRKMIAKSEQEIGKATAKYFFYSNIMNFFKTEITLANGEIRKRPLIETNGETGEIVWDKGRDFATVRKVLSMPQVNIVKKTEVQTGGFSKESILPKRNSDKLIARKKDWDPKKYGGFDSPTVAYSVLVVAKVEKGKSKKLKSVKELLGITIMERSSFEKNPIDFLEAKGYKEVKKDLIIKLPKYSLFELENGRKRMLASAGELQKGNELALPSKYVNFLYLASHYEKLKGSPEDNEQKQLFVEQHKHYLDEIIEQISEFSKRVILADANLDKVLSAYNKHRDKPIREQAENIIHLFTLTNLGAPAAFKYFDTTIDRKRYTSTKEVLDATLIHQSITGLYETRIDLSQLGGDGGGGSGGSGGSGGSGGSGGSGGTAPLEEEYRLFLEAPIQNVTLLEQWKREIPKVWAEINPPGLASTQAPIHVQLLSTALPVRVRQYPITLEAKRSLRETIRKFRAAGILRPVHSPWNTPLLPVRKSGTSEYRMVQDLREVNKRVETIHPTVPNPYTLLSLLPPDRIWYSVLDLKDAFFCIPLAPESQLIFAFEWADAEEGESGQLTWTRLPQGFKNSPTLFNEALNRDLQGFRLDHPSVSLLQYVDDLLIAADTQAACLSATRDLLMTLAELGYRVSGKKAQLCQEEVTYLGFKIHKGSRSLSNSRTQAILQIPVPKTKRQVREFLGTIGYCRLWIPGFAELAQPLYAATRPGNDPLVWGEKEEEAFQSLKLALTQPPALALPSLDKPFQLFVEETSGAAKGVLTQALGPWKRPVAYLSKRLDPVAAGWPRCLRAIAAAALLTREASKLTFGQDIEITSSHNLESLLRSPPDKWLTNARITQYQVLLLDPPRVRFKQTAALNPATLLPETDDTLPIHHCLDTLDSLTSTRPDLTDQPLAQAEATLFTDGSSYIRDGKRYAGAAVVTLDSVIWAEPLPIGTSAQKAELIALTKALEWSKDKSVNIYTDSRYAFATLHVHGMIYRERGWLTAGGKAIKNAPEILALLTAVWLPKRVAVMHCKGHQKDDAPTSTGNRRADEVAREVAIRPLSTQATISAGKRTADGSEFEKRTADGSEFESPKKKAKVE

SEQ ID NO: 6078 - protein, 2105 aa, synthetic construct
MPAAKRVKLDGGDKKYSIGLDIGTNSVGWAVITDEYKVPSKKFKVLGNTDRHSIKKNLIGALLFDSGETAEATRLKRTARRRYTRRKNRICYLQEIFSNEMAKVDDSFFHRLEESFLVEEDKKHERHPIFGNIVDEVAYHEKYPTIYHLRKKLVDSTDKADLRLIYLALAHMIKFRGHFLIEGDLNPDNSDVDKLFIQLVQTYNQLFEENPINASGVDAKAILSARLSKSRRLENLIAQLPGEKKNGLFGNLIALSLGLTPNFKSNFDLAEDAKLQLSKDTYDDDLDNLLAQIGDQYADLFLAAKNLSDAILLSDILRVNTEITKAPLSASMIKRYDEHHQDLTLLKALVRQQLPEKYKEIFFDQSKNGYAGYIDGGASQEEFYKFIKPILEKMDGTEELLVKLNREDLLRKQRTFDNGSIPHQIHLGELHAILRRQEDFYPFLKDNREKIEKILTFRIPYYVGPLARGNSRFAWMTRKSEETITPWNFEEVVDKGASAQSFIERMTNFDKNLPNEKVLPKHSLLYEYFTVYNELTKVKYVTEGMRKPAFLSGEQKKAIVDLLFKTNRKVTVKQLKEDYFKKIECFDSVEISGVEDRFNASLGTYHDLLKIIKDKDFLDNEENEDILEDIVLTLTLFEDREMIEERLKTYAHLFDDKVMKQLKRRRYTGWGRLSRKLINGIRDKQSGKTILDFLKSDGFANRNFMQLIHDDSLTFKEDIQKAQVSGQGDSLHEHIANLAGSPAIKKGILQTVKVVDELVKVMGRHKPENIVIEMARENQTTQKGQKNSRERMKRIEEGIKELGSQILKEHPVENTQLQNEKLYLYYLQNGRDMYVDQELDINRLSDYDVDHIVPQSFLKDDSIDNKVLTRSDKARGKSDNVPSEEVVKKMKNYWRQLLNAKLITQRKFDNLTKAERGGLSELDKAGFIKRQLVETRQITKHVAQILDSRMNTKYDENDKLIREVKVITLKSKLVSDFRKDFQFYKVREINNYHHAHDAYLNAVVGTALIKKYPKLESEFVYGDYKVYDVRKMIAKSEQEIGKATAKYFFYSNIMNFFKTEITLANGEIRKRPLIETNGETGEIVWDKGRDFATVRKVLSMPQVNIVKKTEVQTGGFSKESILPKRNSDKLIARKKDWDPKKYGGFDSPTVAYSVLVVAKVEKGKSKKLKSVKELLGITIMERSSFEKNPIDFLEAKGYKEVKKDLIIKLPKYSLFELENGRKRMLASAGELQKGNELALPSKYVNFLYLASHYEKLKGSPEDNEQKQLFVEQHKHYLDEIIEQISEFSKRVILADANLDKVLSAYNKHRDKPIREQAENIIHLFTLTNLGAPAAFKYFDTTIDRKRYTSTKEVLDATLIHQSITGLYETRIDLSQLGGDGGGGSGGSGGSGGSGGSGGSGGTAPLEEEYRLFLEAPIQNVTLLEQWKREIPKVWAEINPPGLASTQAPIHVQLLSTALPVRVRQYPITLEAKRSLRETIRKFRAAGILRPVHSPWNTPLLPVRKSGTSEYRMVQDLREVNKRVETIHPTVPNPYTLLSLLPPDRIWYSVLDLKDAFFCIPLAPESQLIFAFEWADAEEGESGQLTWTRLPQGFKNSPTLFNEALNRDLQGFRLDHPSVSLLQYVDDLLIAADTQAACLSATRDLLMTLAELGYRVSGKKAQLCQEEVTYLGFKIHKGSRSLSNSRTQAILQIPVPKTKRQVREFLGKIGYCRLFIPGFAELAQPLYAATRPGNDPLVWGEKEEEAFQSLKLALTQPPALALPSLDKPFQLFVEETSGAAKGVLTQALGPWKRPVAYLSKRLDPVAAGWPRCLRAIAAAALLTREASKLTFGQDIEITSSHNLESLLRSPPDKWLTNARITQYQVLLLDPPRVRFKQTAALNPATLLPETDDTLPIHHCLDTLDSLTSTRPDLTDQPLAQAEATLFTDGSSYIRDGKRYAGAAVVTLDSVIWAEPLPIGTSAQKAELIALTKALEWSKDKSVNIYTDSRYAFATLHVHGMIYRERGWLTAGGKAIKNAPEILALLTAVWLPKRVAVMHCKGHQKDDAPTSTGNRRADEVAREVAIRPLSTQATISAGKRTADGSEFEKRTADGSEFESPKKKAKVE

SEQ ID NO: 6079 - protein, 2109 aa, synthetic construct
MPAAKRVKLDGGDKKYSIGLDIGTNSVGWAVITDEYKVPSKKFKVLGNTDRHSIKKNLIGALLFDSGETAEATRLKRTARRRYTRRKNRICYLQEIFSNEMAKVDDSFFHRLEESFLVEEDKKHERHPIFGNIVDEVAYHEKYPTIYHLRKKLVDSTDKADLRLIYLALAHMIKFRGHFLIEGDLNPDNSDVDKLFIQLVQTYNQLFEENPINASGVDAKAILSARLSKSRRLENLIAQLPGEKKNGLFGNLIALSLGLTPNFKSNFDLAEDAKLQLSKDTYDDDLDNLLAQIGDQYADLFLAAKNLSDAILLSDILRVNTEITKAPLSASMIKRYDEHHQDLTLLKALVRQQLPEKYKEIFFDQSKNGYAGYIDGGASQEEFYKFIKPILEKMDGTEELLVKLNREDLLRKQRTFDNGSIPHQIHLGELHAILRRQEDFYPFLKDNREKIEKILTFRIPYYVGPLARGNSRFAWMTRKSEETITPWNFEEVVDKGASAQSFIERMTNFDKNLPNEKVLPKHSLLYEYFTVYNELTKVKYVTEGMRKPAFLSGEQKKAIVDLLFKTNRKVTVKQLKEDYFKKIECFDSVEISGVEDRFNASLGTYHDLLKIIKDKDFLDNEENEDILEDIVLTLTLFEDREMIEERLKTYAHLFDDKVMKQLKRRRYTGWGRLSRKLINGIRDKQSGKTILDFLKSDGFANRNFMQLIHDDSLTFKEDIQKAQVSGQGDSLHEHIANLAGSPAIKKGILQTVKVVDELVKVMGRHKPENIVIEMARENQTTQKGQKNSRERMKRIEEGIKELGSQILKEHPVENTQLQNEKLYLYYLQNGRDMYVDQELDINRLSDYDVDHIVPQSFLKDDSIDNKVLTRSDKARGKSDNVPSEEVVKKMKNYWRQLLNAKLITQRKFDNLTKAERGGLSELDKAGFIKRQLVETRQITKHVAQILDSRMNTKYDENDKLIREVKVITLKSKLVSDFRKDFQFYKVREINNYHHAHDAYLNAVVGTALIKKYPKLESEFVYGDYKVYDVRKMIAKSEQEIGKATAKYFFYSNIMNFFKTEITLANGEIRKRPLIETNGETGEIVWDKGRDFATVRKVLSMPQVNIVKKTEVQTGGFSKESILPKRNSDKLIARKKDWDPKKYGGFDSPTVAYSVLVVAKVEKGKSKKLKSVKELLGITIMERSSFEKNPIDFLEAKGYKEVKKDLIIKLPKYSLFELENGRKRMLASAGELQKGNELALPSKYVNFLYLASHYEKLKGSPEDNEQKQLFVEQHKHYLDEIIEQISEFSKRVILADANLDKVLSAYNKHRDKPIREQAENIIHLFTLTNLGAPAAFKYFDTTIDRKRYTSTKEVLDATLIHQSITGLYETRIDLSQLGGDGGGGSGGSGGSGGSGGSGGSGGTVSLQDEHRLFDIPVTTSLPDVWLQDFPQAWAETGGLGRAKCQAPIIIDLKPTAVPVSIKQYPMSLEAHMGIRQHIIKFLELGVLRPCRSPWNTPLLPVKKPGTQDYRPVQDLREINKRTVDIHPTVPNPYNLLSTLKPDYSWYTVLDLKDAFFCLPLAPQSQELFAFEWKDPERGISGQLTWTRLPQGFKNSPTLFNEALHRDLTDFRTQHPEVTLLQYVDDLLLAAPTKKACTQGTRHLLQELGEKGYRASAKKAQICQTKVTYLGYILSEGKRWLTPGRIETVARIPPPRNPREVREFLGTAGFCRLWIPGFAELAAPLYALTKPSTPFTWQTEHQLAFEALKKALLSAPALGLPDTSKPFTLFLDERQGIAKGVLTQKLGPWKRPVAYLSKKLDPVAAGWPPCLRIMAATAMLVKDSAKLTLGQPLTVITPHTLEAIVRQPPDRWITNARLTHYQALLLDTDRVQFGPPVTLNPATLLPVPENQPSPHDCRQVLAETHGTREDLKDQELPDADHTWYTDGSSYLDSGTRRAGAAVVDGHNTIWAQSLPPGTSAQKAELIALTKALELSKGKKANIYTDSRYAFATAHTHGSIYERRGWLTSEGKEIKNKAEIIALLKALFLPQEVAIIHCPGHQKGQDPVAVGNRQADRVARQAAMAEVLTLATEPDNTSHITAGKRTADGSEFEKRTADGSEFESPKKKAKVE

SEQ ID NO: 6080 - protein, 2094 aa, synthetic construct
MPAAKRVKLDGGDKKYSIGLDIGTNSVGWAVITDEYKVPSKKFKVLGNTDRHSIKKNLIGALLFDSGETAEATRLKRTARRRYTRRKNRICYLQEIFSNEMAKVDDSFFHRLEESFLVEEDKKHERHPIFGNIVDEVAYHEKYPTIYHLRKKLVDSTDKADLRLIYLALAHMIKFRGHFLIEGDLNPDNSDVDKLFIQLVQTYNQLFEENPINASGVDAKAILSARLSKSRRLENLIAQLPGEKKNGLFGNLIALSLGLTPNFKSNFDLAEDAKLQLSKDTYDDDLDNLLAQIGDQYADLFLAAKNLSDAILLSDILRVNTEITKAPLSASMIKRYDEHHQDLTLLKALVRQQLPEKYKEIFFDQSKNGYAGYIDGGASQEEFYKFIKPILEKMDGTEELLVKLNREDLLRKQRTFDNGSIPHQIHLGELHAILRRQEDFYPFLKDNREKIEKILTFRIPYYVGPLARGNSRFAWMTRKSEETITPWNFEEVVDKGASAQSFIERMTNFDKNLPNEKVLPKHSLLYEYFTVYNELTKVKYVTEGMRKPAFLSGEQKKAIVDLLFKTNRKVTVKQLKEDYFKKIECFDSVEISGVEDRFNASLGTYHDLLKIIKDKDFLDNEENEDILEDIVLTLTLFEDREMIEERLKTYAHLFDDKVMKQLKRRRYTGWGRLSRKLINGIRDKQSGKTILDFLKSDGFANRNFMQLIHDDSLTFKEDIQKAQVSGQGDSLHEHIANLAGSPAIKKGILQTVKVVDELVKVMGRHKPENIVIEMARENQTTQKGQKNSRERMKRIEEGIKELGSQILKEHPVENTQLQNEKLYLYYLQNGRDMYVDQELDINRLSDYDVDHIVPQSFLKDDSIDNKVLTRSDKARGKSDNVPSEEVVKKMKNYWRQLLNAKLITQRKFDNLTKAERGGLSELDKAGFIKRQLVETRQITKHVAQILDSRMNTKYDENDKLIREVKVITLKSKLVSDFRKDFQFYKVREINNYHHAHDAYLNAVVGTALIKKYPKLESEFVYGDYKVYDVRKMIAKSEQEIGKATAKYFFYSNIMNFFKTEITLANGEIRKRPLIETNGETGEIVWDKGRDFATVRKVLSMPQVNIVKKTEVQTGGFSKESILPKRNSDKLIARKKDWDPKKYGGFDSPTVAYSVLVVAKVEKGKSKKLKSVKELLGITIMERSSFEKNPIDFLEAKGYKEVKKDLIIKLPKYSLFELENGRKRMLASAGELQKGNELALPSKYVNFLYLASHYEKLKGSPEDNEQKQLFVEQHKHYLDEIIEQISEFSKRVILADANLDKVLSAYNKHRDKPIREQAENIIHLFTLTNLGAPAAFKYFDTTIDRKRYTSTKEVLDATLIHQSITGLYETRIDLSQLGGDGGGGSGGSGGSGGSGGSGGSGGVPWILKKPLELTIKLDLEEQQGTLLNNSILSKKGKEELKQLFEKYSALWQSWENQVGHRRIRPHKIATGTVKPTPQKQYHINPKAKPDIQIVINDLLKQGVLIQKESTMNTPVYPVPKPNGRWRMVLDYRAVNKVTPLIAVQNQHSYGILGSLFKGRYKTTIDLSNGFWAHPIVPEDYWITAFTWQGKQYCWTVLPQGFLNSPGLFTGDVVDLLQGIPNVEVYVDDVYISHDSEKEHLEYLDILFNRLKEAGYIISLKKSNIANSIVDFLGFQITNEGRGLTDTFKEKLENITAPTTLKQLQSILGLLNFARNFIPDFTELIAPLYALIPKSTKNYVPWQIEHSTTLETLITKLNGAEYLQGRKGDKTLIMKVNASYTTGYIRYYNEGEKKPISYVSIVFSKTELKFTELEKLLTTVHKGLLKALDLSMGQNIHVYSPIVSMQNIQKTPQTAKKALASRWLSWLSYLEDPRIRFFYDPQMPALKDLPAVDTGKDNKKHPSNFQHIFYTDGSAITSPTKEGHLNAGMGIVYFINKDGNLQKQQEWSISLGNHTAQFAEIAAFEFALKKCLPLGGNILVVTDSNYVAKAYNEELDVWASNGFVNNRKKPLKHISKWKSVADLKRLRPDVVVTHEPGHQKLDSSPHAYGNNLADQLATQASFKVHAGKRTADGSEFEKRTADGSEFESPKKKAKVE

SEQ ID NO: 6081 - protein, 2180 aa, synthetic construct
MPAAKRVKLDGGDKKYSIGLDIGTNSVGWAVITDEYKVPSKKFKVLGNTDRHSIKKNLIGALLFDSGETAEATRLKRTARRRYTRRKNRICYLQEIFSNEMAKVDDSFFHRLEESFLVEEDKKHERHPIFGNIVDEVAYHEKYPTIYHLRKKLVDSTDKADLRLIYLALAHMIKFRGHFLIEGDLNPDNSDVDKLFIQLVQTYNQLFEENPINASGVDAKAILSARLSKSRRLENLIAQLPGEKKNGLFGNLIALSLGLTPNFKSNFDLAEDAKLQLSKDTYDDDLDNLLAQIGDQYADLFLAAKNLSDAILLSDILRVNTEITKAPLSASMIKRYDEHHQDLTLLKALVRQQLPEKYKEIFFDQSKNGYAGYIDGGASQEEFYKFIKPILEKMDGTEELLVKLNREDLLRKQRTFDNGSIPHQIHLGELHAILRRQEDFYPFLKDNREKIEKILTFRIPYYVGPLARGNSRFAWMTRKSEETITPWNFEEVVDKGASAQSFIERMTNFDKNLPNEKVLPKHSLLYEYFTVYNELTKVKYVTEGMRKPAFLSGEQKKAIVDLLFKTNRKVTVKQLKEDYFKKIECFDSVEISGVEDRFNASLGTYHDLLKIIKDKDFLDNEENEDILEDIVLTLTLFEDREMIEERLKTYAHLFDDKVMKQLKRRRYTGWGRLSRKLINGIRDKQSGKTILDFLKSDGFANRNFMQLIHDDSLTFKEDIQKAQVSGQGDSLHEHIANLAGSPAIKKGILQTVKVVDELVKVMGRHKPENIVIEMARENQTTQKGQKNSRERMKRIEEGIKELGSQILKEHPVENTQLQNEKLYLYYLQNGRDMYVDQELDINRLSDYDVDHIVPQSFLKDDSIDNKVLTRSDKARGKSDNVPSEEVVKKMKNYWRQLLNAKLITQRKFDNLTKAERGGLSELDKAGFIKRQLVETRQITKHVAQILDSRMNTKYDENDKLIREVKVITLKSKLVSDFRKDFQFYKVREINNYHHAHDAYLNAVVGTALIKKYPKLESEFVYGDYKVYDVRKMIAKSEQEIGKATAKYFFYSNIMNFFKTEITLANGEIRKRPLIETNGETGEIVWDKGRDFATVRKVLSMPQVNIVKKTEVQTGGFSKESILPKRNSDKLIARKKDWDPKKYGGFDSPTVAYSVLVVAKVEKGKSKKLKSVKELLGITIMERSSFEKNPIDFLEAKGYKEVKKDLIIKLPKYSLFELENGRKRMLASAGELQKGNELALPSKYVNFLYLASHYEKLKGSPEDNEQKQLFVEQHKHYLDEIIEQISEFSKRVILADANLDKVLSAYNKHRDKPIREQAENIIHLFTLTNLGAPAAFKYFDTTIDRKRYTSTKEVLDATLIHQSITGLYETRIDLSQLGGDGGGGSGGSGGSGGSGGSGGSGGMDLLKPLTVERKGVKIKGYWNSQADITCVPKDLLQGEEPVRQQNVTTIHGTQEGDVYYVNLKIDGRRINTEVIGTTLDYAIITPGDVPWILKKPLELTIKLDLEEQQGTLLNNSILSKKGKEELKQLFEKYSALWQSWENQVGHRRIRPHKIATGTVKPTPQKQYHINPKAKPDIQIVINDLLKQGVLIQKESTMNTPVYPVPKPNGRWRMVLDYRAVNKVTPLIAVQNQHSYGILGSLFKGRYKTTIDLSNGFWAHPIVPEDYWITAFTWQGKQYCWTVLPQGFLNSPGLFNGDVVDLLQGIPNVEVYVDDVYISHDSEKEHLEYLDILFNRLKEAGYIISLKKSNIANSIVDFLGFQITNEGRGLTDTFKEKLENITAPTTLKQLQSILGLLNFARNFIPDFTELIAPLYALIPKSPKNYVPWQIEHSTTLETLITKLNGAEYLQGRKGDKTLIMKVNASYTTGYIRYYNEGEKKPISYVSIVFSKTELKFTELEKLLTTVHKGLLKALDLSMGQNIHVYSPIVSMQNIQKTPQTAKKALASRWLSWLSYLEDPRIRFFYDPQMPALKDLPAVDTGKDNKKHPSNFQHIFYTDGSAITSPTKEGHLNAGMGIVYFINKDGNLQKQQEWSISLGNHTAQFAEIAAFEFALKKCLPLGGNILVVTDSNYVAKAYNEELDVWASNGFVNNRKKPLKHISKWKSVADLKRLRPDVVVTHEPGHQKLDSSPHAYGNNLADQLATQASFKVHAGKRTADGSEFEKRTADGSEFESPKKKAKVE

SEQ ID NO: 6082 - protein, 2102 aa, synthetic construct
MPAAKRVKLDGGDKKYSIGLDIGTNSVGWAVITDEYKVPSKKFKVLGNTDRHSIKKNLIGALLFDSGETAEATRLKRTARRRYTRRKNRICYLQEIFSNEMAKVDDSFFHRLEESFLVEEDKKHERHPIFGNIVDEVAYHEKYPTIYHLRKKLVDSTDKADLRLIYLALAHMIKFRGHFLIEGDLNPDNSDVDKLFIQLVQTYNQLFEENPINASGVDAKAILSARLSKSRRLENLIAQLPGEKKNGLFGNLIALSLGLTPNFKSNFDLAEDAKLQLSKDTYDDDLDNLLAQIGDQYADLFLAAKNLSDAILLSDILRVNTEITKAPLSASMIKRYDEHHQDLTLLKALVRQQLPEKYKEIFFDQSKNGYAGYIDGGASQEEFYKFIKPILEKMDGTEELLVKLNREDLLRKQRTFDNGSIPHQIHLGELHAILRRQEDFYPFLKDNREKIEKILTFRIPYYVGPLARGNSRFAWMTRKSEETITPWNFEEVVDKGASAQSFIERMTNFDKNLPNEKVLPKHSLLYEYFTVYNELTKVKYVTEGMRKPAFLSGEQKKAIVDLLFKTNRKVTVKQLKEDYFKKIECFDSVEISGVEDRFNASLGTYHDLLKIIKDKDFLDNEENEDILEDIVLTLTLFEDREMIEERLKTYAHLFDDKVMKQLKRRRYTGWGRLSRKLINGIRDKQSGKTILDFLKSDGFANRNFMQLIHDDSLTFKEDIQKAQVSGQGDSLHEHIANLAGSPAIKKGILQTVKVVDELVKVMGRHKPENIVIEMARENQTTQKGQKNSRERMKRIEEGIKELGSQILKEHPVENTQLQNEKLYLYYLQNGRDMYVDQELDINRLSDYDVDHIVPQSFLKDDSIDNKVLTRSDKARGKSDNVPSEEVVKKMKNYWRQLLNAKLITQRKFDNLTKAERGGLSELDKAGFIKRQLVETRQITKHVAQILDSRMNTKYDENDKLIREVKVITLKSKLVSDFRKDFQFYKVREINNYHHAHDAYLNAVVGTALIKKYPKLESEFVYGDYKVYDVRKMIAKSEQEIGKATAKYFFYSNIMNFFKTEITLANGEIRKRPLIETNGETGEIVWDKGRDFATVRKVLSMPQVNIVKKTEVQTGGFSKESILPKRNSDKLIARKKDWDPKKYGGFDSPTVAYSVLVVAKVEKGKSKKLKSVKELLGITIMERSSFEKNPIDFLEAKGYKEVKKDLIIKLPKYSLFELENGRKRMLASAGELQKGNELALPSKYVNFLYLASHYEKLKGSPEDNEQKQLFVEQHKHYLDEIIEQISEFSKRVILADANLDKVLSAYNKHRDKPIREQAENIIHLFTLTNLGAPAAFKYFDTTIDRKRYTSTKEVLDATLIHQSITGLYETRIDLSQLGGDGGGGSGGSGGSGGSGGSGGSGGTLQLEEEYRLFEPESTQKQEMDIWLKNFPQAWAETGGMGTAHCQAPVLIQLKATATPISIRQYPMPHEAYQGIKPHIRRMLDQGILKPCQSPWNTPLLPVKKPGTEDYRPVQDLREVNKRVEDIHPTVPNPYNLLSTLPPSHPWYTVLDLKDAFFCLRLHSESQLLFAFEWRDPEIGLSGQLTWTRLPQGFKNSPTLFNEALHSDLADFRVRYPALVLLQYVDDLLLAAATRTECLEGTKALLETLGNKGYRASAKKAQICLQEVTYLGYSLKDGQRWLTKARKEAILSIPVPKNSRQVREFLGKAGYCRLFIPGFAELAAPLYPLTRPGTLFQWGTEQQLAFEDIKKALLSSPALGLPDITKPFELFIDENSGFAKGVLVQKLGPWKRPVAYLSKKLDTVASGWPPCLRMVAAIAILVKDAGKLTLGQPLTILTSHPVEALVRQPPNKWLSNARMTHYQAMLLDAERVHFGPTVSLNPATLLPLPSGGNHHDCLQILAETHGTRPDLTDQPLPDADLTWYTDGSSFIRNGEREAGAAVTTESEVIWAAPLPPGTSAQRAELIALTQALKMAEGKKLTVYTDSRYAFATTHVHGEIYRRRGWLTSEGKEIKNKNEILALLEALFLPKRLSIIHCPGHQKGDSPQAKGNRLADDTAKKAATETHSSLTVLPAGKRTADGSEFEKRTADGSEFESPKKKAKVE

SEQ ID NO: 6083 - protein, 2094 aa, synthetic construct
MPAAKRVKLDGGDKKYSIGLDIGTNSVGWAVITDEYKVPSKKFKVLGNTDRHSIKKNLIGALLFDSGETAEATRLKRTARRRYTRRKNRICYLQEIFSNEMAKVDDSFFHRLEESFLVEEDKKHERHPIFGNIVDEVAYHEKYPTIYHLRKKLVDSTDKADLRLIYLALAHMIKFRGHFLIEGDLNPDNSDVDKLFIQLVQTYNQLFEENPINASGVDAKAILSARLSKSRRLENLIAQLPGEKKNGLFGNLIALSLGLTPNFKSNFDLAEDAKLQLSKDTYDDDLDNLLAQIGDQYADLFLAAKNLSDAILLSDILRVNTEITKAPLSASMIKRYDEHHQDLTLLKALVRQQLPEKYKEIFFDQSKNGYAGYIDGGASQEEFYKFIKPILEKMDGTEELLVKLNREDLLRKQRTFDNGSIPHQIHLGELHAILRRQEDFYPFLKDNREKIEKILTFRIPYYVGPLARGNSRFAWMTRKSEETITPWNFEEVVDKGASAQSFIERMTNFDKNLPNEKVLPKHSLLYEYFTVYNELTKVKYVTEGMRKPAFLSGEQKKAIVDLLFKTNRKVTVKQLKEDYFKKIECFDSVEISGVEDRFNASLGTYHDLLKIIKDKDFLDNEENEDILEDIVLTLTLFEDREMIEERLKTYAHLFDDKVMKQLKRRRYTGWGRLSRKLINGIRDKQSGKTILDFLKSDGFANRNFMQLIHDDSLTFKEDIQKAQVSGQGDSLHEHIANLAGSPAIKKGILQTVKVVDELVKVMGRHKPENIVIEMARENQTTQKGQKNSRERMKRIEEGIKELGSQILKEHPVENTQLQNEKLYLYYLQNGRDMYVDQELDINRLSDYDVDHIVPQSFLKDDSIDNKVLTRSDKARGKSDNVPSEEVVKKMKNYWRQLLNAKLITQRKFDNLTKAERGGLSELDKAGFIKRQLVETRQITKHVAQILDSRMNTKYDENDKLIREVKVITLKSKLVSDFRKDFQFYKVREINNYHHAHDAYLNAVVGTALIKKYPKLESEFVYGDYKVYDVRKMIAKSEQEIGKATAKYFFYSNIMNFFKTEITLANGEIRKRPLIETNGETGEIVWDKGRDFATVRKVLSMPQVNIVKKTEVQTGGFSKESILPKRNSDKLIARKKDWDPKKYGGFDSPTVAYSVLVVAKVEKGKSKKLKSVKELLGITIMERSSFEKNPIDFLEAKGYKEVKKDLIIKLPKYSLFELENGRKRMLASAGELQKGNELALPSKYVNFLYLASHYEKLKGSPEDNEQKQLFVEQHKHYLDEIIEQISEFSKRVILADANLDKVLSAYNKHRDKPIREQAENIIHLFTLTNLGAPAAFKYFDTTIDRKRYTSTKEVLDATLIHQSITGLYETRIDLSQLGGDGGGGSGGSGGSGGSGGSGGSGGVPWLTQQPLQLTILVPLQEYQEKILSKTALPEDQKQQLKTLFVKYDNLWQHWENQVGHRKIRPHNIATGDYPPRPQKQYPINPKAKPSIQIVIDDLLKQGVLTPQNSTMNTPVYPVPKPDGRWRMVLDYREVNKTIPLTAAQNQHSAGILATIVRQKYKTTLDLANGFWAHPITPESYWLTAFTWQGKQYCWTRLPQGFLNSPALFNADVVDLLKEIPNVQVYVDDIYLSHDDPKEHVQQLEKVFQILLQAGYVVSLKKSEIGQKTVEFLGFNITKEGRGLTDTFKTKLLNITPPKDLKQLQSILGLLNFARNFIPNFAELVQPLYNLIAPAKGKYIEWSEENTKQLNMVIEALNTASNLEERLPEQRLVIKVNTSPSAGYVRYYNETGKKPIMYLNYVFSKAELKFSMLEKLLTTMHKALIKAMDLAMGQEILVYSPIVSMTKIQKTPLPERKALPIRWITWMTYLEDPRIQFHYDKTLPELKHIPDVYTSSQSPVKHPSQYEGVFYTDGSAIKSPDPTKSNNAGMGIVHATYKPEYQVLNQWSIPLGNHTAQMAEIAAVEFACKKALKIPGPVLVITDSFYVAESANKELPYWKSNGFVNNKKKPLKHISKWKSIAECLSMKPDITIQHEKGISLQIPVFILKGNALADKLATQGSYVVNAGKRTADGSEFEKRTADGSEFESPKKKAKVE

SEQ ID NO: 6084 - protein, 2101 aa, synthetic construct
MPAAKRVKLDGGDKKYSIGLDIGTNSVGWAVITDEYKVPSKKFKVLGNTDRHSIKKNLIGALLFDSGETAEATRLKRTARRRYTRRKNRICYLQEIFSNEMAKVDDSFFHRLEESFLVEEDKKHERHPIFGNIVDEVAYHEKYPTIYHLRKKLVDSTDKADLRLIYLALAHMIKFRGHFLIEGDLNPDNSDVDKLFIQLVQTYNQLFEENPINASGVDAKAILSARLSKSRRLENLIAQLPGEKKNGLFGNLIALSLGLTPNFKSNFDLAEDAKLQLSKDTYDDDLDNLLAQIGDQYADLFLAAKNLSDAILLSDILRVNTEITKAPLSASMIKRYDEHHQDLTLLKALVRQQLPEKYKEIFFDQSKNGYAGYIDGGASQEEFYKFIKPILEKMDGTEELLVKLNREDLLRKQRTFDNGSIPHQIHLGELHAILRRQEDFYPFLKDNREKIEKILTFRIPYYVGPLARGNSRFAWMTRKSEETITPWNFEEVVDKGASAQSFIERMTNFDKNLPNEKVLPKHSLLYEYFTVYNELTKVKYVTEGMRKPAFLSGEQKKAIVDLLFKTNRKVTVKQLKEDYFKKIECFDSVEISGVEDRFNASLGTYHDLLKIIKDKDFLDNEENEDILEDIVLTLTLFEDREMIEERLKTYAHLFDDKVMKQLKRRRYTGWGRLSRKLINGIRDKQSGKTILDFLKSDGFANRNFMQLIHDDSLTFKEDIQKAQVSGQGDSLHEHIANLAGSPAIKKGILQTVKVVDELVKVMGRHKPENIVIEMARENQTTQKGQKNSRERMKRIEEGIKELGSQILKEHPVENTQLQNEKLYLYYLQNGRDMYVDQELDINRLSDYDVDHIVPQSFLKDDSIDNKVLTRSDKARGKSDNVPSEEVVKKMKNYWRQLLNAKLITQRKFDNLTKAERGGLSELDKAGFIKRQLVETRQITKHVAQILDSRMNTKYDENDKLIREVKVITLKSKLVSDFRKDFQFYKVREINNYHHAHDAYLNAVVGTALIKKYPKLESEFVYGDYKVYDVRKMIAKSEQEIGKATAKYFFYSNIMNFFKTEITLANGEIRKRPLIETNGETGEIVWDKGRDFATVRKVLSMPQVNIVKKTEVQTGGFSKESILPKRNSDKLIARKKDWDPKKYGGFDSPTVAYSVLVVAKVEKGKSKKLKSVKELLGITIMERSSFEKNPIDFLEAKGYKEVKKDLIIKLPKYSLFELENGRKRMLASAGELQKGNELALPSKYVNFLYLASHYEKLKGSPEDNEQKQLFVEQHKHYLDEIIEQISEFSKRVILADANLDKVLSAYNKHRDKPIREQAENIIHLFTLTNLGAPAAFKYFDTTIDRKRYTSTKEVLDATLIHQSITGLYETRIDLSQLGGDGGGGSGGSGGSGGSGGSGGSGGVLNLEEEYRLHEKPVPSSIDPSWLQLFPTVWAERAGMGLANQVPPVVVELRSGASPVAVRQYPMSKEAREGIRPHIQKFLDLGVLVPCRSPWNTPLLPVKKPGTNDYRPVQDLREINKRVQDIHPTVPNPYNLLSSLPPSYTWYSVLDLKDAFFCLRLHPNSQPLFAFEWKDPEKGNTGQLTWTRLPQGFKNSPTLFNEALHRDLAPFRALNPQVVLLQYVDDLLVAAPTYEDCKKGTQKLLQELSKLGYRVSAKKAQLCQREVTYLGYLLKEGKRWLTPARKATVMKIPVPTTPRQVREFLGKAGFCRLFIPGFASLAAPLYPLTKPSIPFIWTEEHQQAFDHIKKALLSAPALALPDLTKPFTLYIDERAGVARGVLTQTLGPWRRPVAYLSKKLDPVASGWPTCLKAVAAVALLLKDADKLTLGQNVTVIASHSLESIVRQPPDRWMTNARMTHYQSLLLNERVSFAPPAVLNPATLLPVESEATPVHRCSEILAEETGTRRDLEDQPLPGVPTWYTDGSSFITEGKRRAGAPIVDGKRTVWASSLPEGTSAQKAELVALTQALRLAEGKNINIYTDSRYAFATAHIHGAIYKQRGWLTSAGKDIKNKEEILALLEAIHLPRRVAIIHCPGHQRGSNPVATGNRRADEAAKQAALSTRVLAGTTKPAGKRTADGSEFEKRTADGSEFESPKKKAKVE

SEQ ID NO: 6085 - protein, 2020 aa, synthetic construct
MPAAKRVKLDGGDKKYSIGLDIGTNSVGWAVITDEYKVPSKKFKVLGNTDRHSIKKNLIGALLFDSGETAEATRLKRTARRRYTRRKNRICYLQEIFSNEMAKVDDSFFHRLEESFLVEEDKKHERHPIFGNIVDEVAYHEKYPTIYHLRKKLVDSTDKADLRLIYLALAHMIKFRGHFLIEGDLNPDNSDVDKLFIQLVQTYNQLFEENPINASGVDAKAILSARLSKSRRLENLIAQLPGEKKNGLFGNLIALSLGLTPNFKSNFDLAEDAKLQLSKDTYDDDLDNLLAQIGDQYADLFLAAKNLSDAILLSDILRVNTEITKAPLSASMIKRYDEHHQDLTLLKALVRQQLPEKYKEIFFDQSKNGYAGYIDGGASQEEFYKFIKPILEKMDGTEELLVKLNREDLLRKQRTFDNGSIPHQIHLGELHAILRRQEDFYPFLKDNREKIEKILTFRIPYYVGPLARGNSRFAWMTRKSEETITPWNFEEVVDKGASAQSFIERMTNFDKNLPNEKVLPKHSLLYEYFTVYNELTKVKYVTEGMRKPAFLSGEQKKAIVDLLFKTNRKVTVKQLKEDYFKKIECFDSVEISGVEDRFNASLGTYHDLLKIIKDKDFLDNEENEDILEDIVLTLTLFEDREMIEERLKTYAHLFDDKVMKQLKRRRYTGWGRLSRKLINGIRDKQSGKTILDFLKSDGFANRNFMQLIHDDSLTFKEDIQKAQVSGQGDSLHEHIANLAGSPAIKKGILQTVKVVDELVKVMGRHKPENIVIEMARENQTTQKGQKNSRERMKRIEEGIKELGSQILKEHPVENTQLQNEKLYLYYLQNGRDMYVDQELDINRLSDYDVDHIVPQSFLKDDSIDNKVLTRSDKARGKSDNVPSEEVVKKMKNYWRQLLNAKLITQRKFDNLTKAERGGLSELDKAGFIKRQLVETRQITKHVAQILDSRMNTKYDENDKLIREVKVITLKSKLVSDFRKDFQFYKVREINNYHHAHDAYLNAVVGTALIKKYPKLESEFVYGDYKVYDVRKMIAKSEQEIGKATAKYFFYSNIMNFFKTEITLANGEIRKRPLIETNGETGEIVWDKGRDFATVRKVLSMPQVNIVKKTEVQTGGFSKESILPKRNSDKLIARKKDWDPKKYGGFDSPTVAYSVLVVAKVEKGKSKKLKSVKELLGITIMERSSFEKNPIDFLEAKGYKEVKKDLIIKLPKYSLFELENGRKRMLASAGELQKGNELALPSKYVNFLYLASHYEKLKGSPEDNEQKQLFVEQHKHYLDEIIEQISEFSKRVILADANLDKVLSAYNKHRDKPIREQAENIIHLFTLTNLGAPAAFKYFDTTIDRKRYTSTKEVLDATLIHQSITGLYETRIDLSQLGGDGGGGSGGSGGSGGSGGSGGSGGAVLGLEHLPRPPQISQFPLNPERLQALQHLVRKALEAGHIEPYTGPGNNPVFPVKKANGTWRFIHDLRATNSLTIDLSSSSPGPPDLSSLPTTLAHLQTIDLRDAFFQIPLPKQFQPYFAFTVPQQCNYGPGTRYAWKVLPQGFKNSPTLFEMQLAHILQPIRQAFPQCTILQYMDDILLASPSHEDLLLLSEATMASLISHGLPVSENKTQQTPGTIKFLGQIISPNHLTYDAVPTVPIRSRWALPELQALLGEIQWVSKGTPTLRQPLHSLYCALQRHTDPRDQIYLNPSQVQSLVQLRQALSQNCRSRLVQTLPLLGAIMLTLTGTTTVVFQSKEQWPLVWLHAPLPHTSQCPWGQLLASAVLLLDKYTLQSYGLLCQTIHHNISTQTFNQFIQTSDHPSVPILLHHSHRFKNLGAQTGELWNTFLKTAAPLAPVKALMPVFTLSPVIINTAPCLFSDGSTSRAAYILWDKQILSQRSFPLPPPHKSAQRAELLGLLHGLSSARSWRCLNIFLDSKYLYHYLRTLALGTFQGRSSQAPFQALLPRLLSRKVVYLHHVRSHTNLPDPISRLNALTDALLITPVLQLAGKRTADGSEFEKRTADGSEFESPKKKAKVE

SEQ ID NO: 6086 - protein, 2016 aa, synthetic construct
MPAAKRVKLDGGDKKYSIGLDIGTNSVGWAVITDEYKVPSKKFKVLGNTDRHSIKKNLIGALLFDSGETAEATRLKRTARRRYTRRKNRICYLQEIFSNEMAKVDDSFFHRLEESFLVEEDKKHERHPIFGNIVDEVAYHEKYPTIYHLRKKLVDSTDKADLRLIYLALAHMIKFRGHFLIEGDLNPDNSDVDKLFIQLVQTYNQLFEENPINASGVDAKAILSARLSKSRRLENLIAQLPGEKKNGLFGNLIALSLGLTPNFKSNFDLAEDAKLQLSKDTYDDDLDNLLAQIGDQYADLFLAAKNLSDAILLSDILRVNTEITKAPLSASMIKRYDEHHQDLTLLKALVRQQLPEKYKEIFFDQSKNGYAGYIDGGASQEEFYKFIKPILEKMDGTEELLVKLNREDLLRKQRTFDNGSIPHQIHLGELHAILRRQEDFYPFLKDNREKIEKILTFRIPYYVGPLARGNSRFAWMTRKSEETITPWNFEEVVDKGASAQSFIERMTNFDKNLPNEKVLPKHSLLYEYFTVYNELTKVKYVTEGMRKPAFLSGEQKKAIVDLLFKTNRKVTVKQLKEDYFKKIECFDSVEISGVEDRFNASLGTYHDLLKIIKDKDFLDNEENEDILEDIVLTLTLFEDREMIEERLKTYAHLFDDKVMKQLKRRRYTGWGRLSRKLINGIRDKQSGKTILDFLKSDGFANRNFMQLIHDDSLTFKEDIQKAQVSGQGDSLHEHIANLAGSPAIKKGILQTVKVVDELVKVMGRHKPENIVIEMARENQTTQKGQKNSRERMKRIEEGIKELGSQILKEHPVENTQLQNEKLYLYYLQNGRDMYVDQELDINRLSDYDVDHIVPQSFLKDDSIDNKVLTRSDKARGKSDNVPSEEVVKKMKNYWRQLLNAKLITQRKFDNLTKAERGGLSELDKAGFIKRQLVETRQITKHVAQILDSRMNTKYDENDKLIREVKVITLKSKLVSDFRKDFQFYKVREINNYHHAHDAYLNAVVGTALIKKYPKLESEFVYGDYKVYDVRKMIAKSEQEIGKATAKYFFYSNIMNFFKTEITLANGEIRKRPLIETNGETGEIVWDKGRDFATVRKVLSMPQVNIVKKTEVQTGGFSKESILPKRNSDKLIARKKDWDPKKYGGFDSPTVAYSVLVVAKVEKGKSKKLKSVKELLGITIMERSSFEKNPIDFLEAKGYKEVKKDLIIKLPKYSLFELENGRKRMLASAGELQKGNELALPSKYVNFLYLASHYEKLKGSPEDNEQKQLFVEQHKHYLDEIIEQISEFSKRVILADANLDKVLSAYNKHRDKPIREQAENIIHLFTLTNLGAPAAFKYFDTTIDRKRYTSTKEVLDATLIHQSITGLYETRIDLSQLGGDGGGGSGGSGGSGGSGGSGGSGGGLEHLPPPPEVSQFPLNPERLQALTDLVSRALEAKHIEPYQGPGNNPIFPVKKPNGKWRFIHDLRATNSLTRDLASPSPGPPDLTSPPQDLPHLRTIDLTDAFFQIPLPAVFQPYFAFTLPQPNNHGPGTRYSWRVLPQGFKNSPTLFQQQLSHILAPVRKAFPNSLIIQYMDDILLASPALRELTALTDKVTNALTKEGLPMSLEKTQATPGSIHFLGQVISPDCITYETLPSIHVKSIWSLAELQSMLGELQWVSKGTPVLRSSLHQLYLALRGHRDPRDTIELTSTQVQALKTIQKALALNCRSRLVSQLPILALIILRPTGTTAVLFQTKQKWPLVWLHTPHPATSLRPWGQLLANAIITLDKYSLQHYGQICKSFHHNISNQALTYYLHTSDQSSVAILLQHSHRFHNLGAQPSGPWRSLLQVPQIFQNIDVLRPPFIISPVVIDHAPCLFSDGATSKAAFILWDKQVIHQQVLPLPSTCSAQAGELFGLLAGLQKSKPWPALNIFLDSKFLIGHLRRMAWGAFLGPSTQCDLHARLFPLLQGKTVYVHHVRSHTLLQDPISRLNEATDALMLAPLLPLAGKRTADGSEFEKRTADGSEFESPKKKAKVE

SEQ ID NO: 6087 - protein, 2013 aa, synthetic construct
MPAAKRVKLDGGDKKYSIGLDIGTNSVGWAVITDEYKVPSKKFKVLGNTDRHSIKKNLIGALLFDSGETAEATRLKRTARRRYTRRKNRICYLQEIFSNEMAKVDDSFFHRLEESFLVEEDKKHERHPIFGNIVDEVAYHEKYPTIYHLRKKLVDSTDKADLRLIYLALAHMIKFRGHFLIEGDLNPDNSDVDKLFIQLVQTYNQLFEENPINASGVDAKAILSARLSKSRRLENLIAQLPGEKKNGLFGNLIALSLGLTPNFKSNFDLAEDAKLQLSKDTYDDDLDNLLAQIGDQYADLFLAAKNLSDAILLSDILRVNTEITKAPLSASMIKRYDEHHQDLTLLKALVRQQLPEKYKEIFFDQSKNGYAGYIDGGASQEEFYKFIKPILEKMDGTEELLVKLNREDLLRKQRTFDNGSIPHQIHLGELHAILRRQEDFYPFLKDNREKIEKILTFRIPYYVGPLARGNSRFAWMTRKSEETITPWNFEEVVDKGASAQSFIERMTNFDKNLPNEKVLPKHSLLYEYFTVYNELTKVKYVTEGMRKPAFLSGEQKKAIVDLLFKTNRKVTVKQLKEDYFKKIECFDSVEISGVEDRFNASLGTYHDLLKIIKDKDFLDNEENEDILEDIVLTLTLFEDREMIEERLKTYAHLFDDKVMKQLKRRRYTGWGRLSRKLINGIRDKQSGKTILDFLKSDGFANRNFMQLIHDDSLTFKEDIQKAQVSGQGDSLHEHIANLAGSPAIKKGILQTVKVVDELVKVMGRHKPENIVIEMARENQTTQKGQKNSRERMKRIEEGIKELGSQILKEHPVENTQLQNEKLYLYYLQNGRDMYVDQELDINRLSDYDVDHIVPQSFLKDDSIDNKVLTRSDKARGKSDNVPSEEVVKKMKNYWRQLLNAKLITQRKFDNLTKAERGGLSELDKAGFIKRQLVETRQITKHVAQILDSRMNTKYDENDKLIREVKVITLKSKLVSDFRKDFQFYKVREINNYHHAHDAYLNAVVGTALIKKYPKLESEFVYGDYKVYDVRKMIAKSEQEIGKATAKYFFYSNIMNFFKTEITLANGEIRKRPLIETNGETGEIVWDKGRDFATVRKVLSMPQVNIVKKTEVQTGGFSKESILPKRNSDKLIARKKDWDPKKYGGFDSPTVAYSVLVVAKVEKGKSKKLKSVKELLGITIMERSSFEKNPIDFLEAKGYKEVKKDLIIKLPKYSLFELENGRKRMLASAGELQKGNELALPSKYVNFLYLASHYEKLKGSPEDNEQKQLFVEQHKHYLDEIIEQISEFSKRVILADANLDKVLSAYNKHRDKPIREQAENIIHLFTLTNLGAPAAFKYFDTTIDRKRYTSTKEVLDATLIHQSITGLYETRIDLSQLGGDGGGGSGGSGGSGGSGGSGGSGGPLGTSDSPVTHADPIDWKSEEPVWVDQWPLTQEKLSAAQQLVQEQLRLGHIEPSTSAWNSPIFVIKKKSGKWRLLQDLRKVNETMMHMGALQPGLPTPSPIPDKSYIIVIDLKDCFYTIPLAPQDCKRFAFSLPSVNFKEPMQRYQWRVLPQGMTNSPTLCQKFVATAIAPVRQRFPQLYLVHYMDDILLAHTDEHLLYQAFSILKQHLSLNGLVIADEKIQTHFPYNYLGFSLYPRVYNTQLVKLQTDHLKTLNDFQKLLGDINWIRPYLKLPTYTLQPLFDILKGDSDPASPRTLSLEGRTALQSIEEAIRQQQITYCDYQRSWGLYILPTPRAPTGVLYQDKPLRWIYLSATPTKHLLPYYELVAKIIAKGRHEAIQYFGMEPPFICVPYALEQQDWLFQFSDNWSIAFANYPGQITHHYPSDKLLQFASSHAFIFPKIVRRQPIPEATLIFTDGSSNGTAALIINHQTYYAQTSFSSAQVVELFAVHQALLTVPTSFNLFTDSSYVVGALQMIETVPIIGTTSPEVLNLFTLIQQVLHCRQHPCFFGHIRAHSTLPGALVQGNHTADVLTKQVFFQSAGKRTADGSEFEKRTADGSEFESPKKKAKVE

SEQ ID NO: 6088 - protein, 2134 aa, synthetic construct
MPAAKRVKLDGGDKKYSIGLDIGTNSVGWAVITDEYKVPSKKFKVLGNTDRHSIKKNLIGALLFDSGETAEATRLKRTARRRYTRRKNRICYLQEIFSNEMAKVDDSFFHRLEESFLVEEDKKHERHPIFGNIVDEVAYHEKYPTIYHLRKKLVDSTDKADLRLIYLALAHMIKFRGHFLIEGDLNPDNSDVDKLFIQLVQTYNQLFEENPINASGVDAKAILSARLSKSRRLENLIAQLPGEKKNGLFGNLIALSLGLTPNFKSNFDLAEDAKLQLSKDTYDDDLDNLLAQIGDQYADLFLAAKNLSDAILLSDILRVNTEITKAPLSASMIKRYDEHHQDLTLLKALVRQQLPEKYKEIFFDQSKNGYAGYIDGGASQEEFYKFIKPILEKMDGTEELLVKLNREDLLRKQRTFDNGSIPHQIHLGELHAILRRQEDFYPFLKDNREKIEKILTFRIPYYVGPLARGNSRFAWMTRKSEETITPWNFEEVVDKGASAQSFIERMTNFDKNLPNEKVLPKHSLLYEYFTVYNELTKVKYVTEGMRKPAFLSGEQKKAIVDLLFKTNRKVTVKQLKEDYFKKIECFDSVEISGVEDRFNASLGTYHDLLKIIKDKDFLDNEENEDILEDIVLTLTLFEDREMIEERLKTYAHLFDDKVMKQLKRRRYTGWGRLSRKLINGIRDKQSGKTILDFLKSDGFANRNFMQLIHDDSLTFKEDIQKAQVSGQGDSLHEHIANLAGSPAIKKGILQTVKVVDELVKVMGRHKPENIVIEMARENQTTQKGQKNSRERMKRIEEGIKELGSQILKEHPVENTQLQNEKLYLYYLQNGRDMYVDQELDINRLSDYDVDHIVPQSFLKDDSIDNKVLTRSDKARGKSDNVPSEEVVKKMKNYWRQLLNAKLITQRKFDNLTKAERGGLSELDKAGFIKRQLVETRQITKHVAQILDSRMNTKYDENDKLIREVKVITLKSKLVSDFRKDFQFYKVREINNYHHAHDAYLNAVVGTALIKKYPKLESEFVYGDYKVYDVRKMIAKSEQEIGKATAKYFFYSNIMNFFKTEITLANGEIRKRPLIETNGETGEIVWDKGRDFATVRKVLSMPQVNIVKKTEVQTGGFSKESILPKRNSDKLIARKKDWDPKKYGGFDSPTVAYSVLVVAKVEKGKSKKLKSVKELLGITIMERSSFEKNPIDFLEAKGYKEVKKDLIIKLPKYSLFELENGRKRMLASAGELQKGNELALPSKYVNFLYLASHYEKLKGSPEDNEQKQLFVEQHKHYLDEIIEQISEFSKRVILADANLDKVLSAYNKHRDKPIREQAENIIHLFTLTNLGAPAAFKYFDTTIDRKRYTSTKEVLDATLIHQSITGLYETRIDLSQLGGDGGGGSGGSGGSGGSGGSGGSGGLLGRDLLTKLKAQIQFSTEGPQVTWEDRPAMCLVLNLEEEYRLHEKPVPPSIDPSWLQLFPMVWAEKAGMGLANQVPPVVVELKSDASPVAVRQYPMSKEAREGIRPHIQRFLDLGILVPCQSPWNTPLLPVKKPGTNDYRPVQDLREVNKRVQDIHPTVPNPYNLLSSLPPSHTWYSVLDLKDAFFCLKLHPNSQPLFAFEWRDPEKGNTGQLTWTRLPQGFKNSPTLFNEALHRDLASFRALNPQVVMLQYVDDLLVAAPTYRDCKEGTRRLLQELSKLGYRVSAKKAQLCREEVTYLGYLLKGGKRWLTPARKATVMKIPTPTTPRQVREFLGKAGFCRLFIPGFASLAAPLYPLTRPKVPFTWTEAHQEAFGRIKEALLSAPALALPDLTKPFALYVDEKEGVARGVLTQTLGPWRRPVAYLSKKLDPVASGWPTCLKAIAAVALLLKDADKLTLGQNVLVIAPHNLESIVRQPPDRWMTNARMTHYQSLLLNERVSFAPPAILNPATLLPVESDDTPIHICSEILAEETGTRPDLRDQPLPGVPAWYTDGSSFIMDGRRQAGAAIVDNKRTVWASNLPEGTSAQKAELIALTQALRLAEGKSINIYTDSRYAFATAHVHGAIYKQRGWLTSAGKDIKNKEEILALLEAIHLPKRVAIIHCPGHQRGTDPVATGNRKADEAAKQAAQSTRILTETTKNAGKRTADGSEFEKRTADGSEFESPKKKAKVE

SEQ ID NO: 6089 - protein, 2225 aa, synthetic construct
MPAAKRVKLDGGDKKYSIGLDIGTNSVGWAVITDEYKVPSKKFKVLGNTDRHSIKKNLIGALLFDSGETAEATRLKRTARRRYTRRKNRICYLQEIFSNEMAKVDDSFFHRLEESFLVEEDKKHERHPIFGNIVDEVAYHEKYPTIYHLRKKLVDSTDKADLRLIYLALAHMIKFRGHFLIEGDLNPDNSDVDKLFIQLVQTYNQLFEENPINASGVDAKAILSARLSKSRRLENLIAQLPGEKKNGLFGNLIALSLGLTPNFKSNFDLAEDAKLQLSKDTYDDDLDNLLAQIGDQYADLFLAAKNLSDAILLSDILRVNTEITKAPLSASMIKRYDEHHQDLTLLKALVRQQLPEKYKEIFFDQSKNGYAGYIDGGASQEEFYKFIKPILEKMDGTEELLVKLNREDLLRKQRTFDNGSIPHQIHLGELHAILRRQEDFYPFLKDNREKIEKILTFRIPYYVGPLARGNSRFAWMTRKSEETITPWNFEEVVDKGASAQSFIERMTNFDKNLPNEKVLPKHSLLYEYFTVYNELTKVKYVTEGMRKPAFLSGEQKKAIVDLLFKTNRKVTVKQLKEDYFKKIECFDSVEISGVEDRFNASLGTYHDLLKIIKDKDFLDNEENEDILEDIVLTLTLFEDREMIEERLKTYAHLFDDKVMKQLKRRRYTGWGRLSRKLINGIRDKQSGKTILDFLKSDGFANRNFMQLIHDDSLTFKEDIQKAQVSGQGDSLHEHIANLAGSPAIKKGILQTVKVVDELVKVMGRHKPENIVIEMARENQTTQKGQKNSRERMKRIEEGIKELGSQILKEHPVENTQLQNEKLYLYYLQNGRDMYVDQELDINRLSDYDVDHIVPQSFLKDDSIDNKVLTRSDKARGKSDNVPSEEVVKKMKNYWRQLLNAKLITQRKFDNLTKAERGGLSELDKAGFIKRQLVETRQITKHVAQILDSRMNTKYDENDKLIREVKVITLKSKLVSDFRKDFQFYKVREINNYHHAHDAYLNAVVGTALIKKYPKLESEFVYGDYKVYDVRKMIAKSEQEIGKATAKYFFYSNIMNFFKTEITLANGEIRKRPLIETNGETGEIVWDKGRDFATVRKVLSMPQVNIVKKTEVQTGGFSKESILPKRNSDKLIARKKDWDPKKYGGFDSPTVAYSVLVVAKVEKGKSKKLKSVKELLGITIMERSSFEKNPIDFLEAKGYKEVKKDLIIKLPKYSLFELENGRKRMLASAGELQKGNELALPSKYVNFLYLASHYEKLKGSPEDNEQKQLFVEQHKHYLDEIIEQISEFSKRVILADANLDKVLSAYNKHRDKPIREQAENIIHLFTLTNLGAPAAFKYFDTTIDRKRYTSTKEVLDATLIHQSITGLYETRIDLSQLGGDGGGGSGGSGGSGGSGGSGGSGGTLGDQGSRGSDPLPEPRVTLTVEGIPTEFLVNTGAEHSVLTKPMGKMGSKRTVVAGATGSKVYPWTTKRLLKIGQKQVTHSFLVIPECPAPLLGRDLLTKLKAQIQFSTEGPQVTWEDRPAMCLVLNLEEEYRLHEKPVPPSIDPSWLQLFPMVWAEKAGMGLANQVPPVVVELKSDASPVAVRQYPMSKEAREGIRPHIQRFLDLGILVPCQSPWNTPLLPVKKPGTNDYRPVQDLREVNKRVQDIHPTVPNPYNLLSSLPPSHTWYSVLDLKDAFFCLKLHPNSQPLFAFEWRDPEKGNTGQLTWTRLPQGFKNSPTLFNEALHRDLASFRALNPQVVMLQYVDDLLVAAPTYRDCKEGTRRLLQELSKLGYRVSAKKAQLCREEVTYLGYLLKGGKRWLTPARKATVMKIPTPTTPRQVREFLGKAGFCRLFIPGFASLAAPLYPLTRPKVPFTWTEAHQEAFGRIKEALLSAPALALPDLTKPFALYVDEKEGVARGVLTQTLGPWRRPVAYLSKKLDPVASGWPTCLKAIAAVALLLKDADKLTLGQNVLVIAPHNLESIVRQPPDRWMTNARMTHYQSLLLNERVSFAPPAILNPATLLPVESDDTPIHICSEILAEETGTRPDLRDQPLPGVPAWYTDGSSFIMDGRRQAGAAIVDNKRTVWASNLPEGTSAQKAELIALTQALRLAEGKSINIYTDSRYAFATAHVHGAIYKQRGWLTSAGKDIKNKEEILALLEAIHLPKRVAIIHCPGHQRGTDPVATGNRKADEAAKQAAQSTRILTETTKNAGKRTADGSEFEKRTADGSEFESPKKKAKVE

SEQ ID NO: 6090 - protein, 2103 aa, synthetic construct; identical to SEQ ID NO: 4503

SEQ ID NO: 6091 - protein, 2103 aa, synthetic construct; identical to SEQ ID NO: 4503

SEQ ID NO: 6092 - protein, 2103 aa, synthetic construct
MPAAKRVKLDGGDKKYSIGLDIGTNSVGWAVITDEYKVPSKKFKVLGNTDRHSIKKNLIGALLFDSGETAEATRLKRTARRRYTRRKNRICYLQEIFSNEMAKVDDSFFHRLEESFLVEEDKKHERHPIFGNIVDEVAYHEKYPTIYHLRKKLVDSTDKADLRLIYLALAHMIKFRGHFLIEGDLNPDNSDVDKLFIQLVQTYNQLFEENPINASGVDAKAILSARLSKSRRLENLIAQLPGEKKNGLFGNLIALSLGLTPNFKSNFDLAEDAKLQLSKDTYDDDLDNLLAQIGDQYADLFLAAKNLSDAILLSDILRVNTEITKAPLSASMIKRYDEHHQDLTLLKALVRQQLPEKYKEIFFDQSKNGYAGYIDGGASQEEFYKFIKPILEKMDGTEELLVKLNREDLLRKQRTFDNGSIPHQIHLGELHAILRRQEDFYPFLKDNREKIEKILTFRIPYYVGPLARGNSRFAWMTRKSEETITPWNFEEVVDKGASAQSFIERMTNFDKNLPNEKVLPKHSLLYEYFTVYNELTKVKYVTEGMRKPAFLSGEQKKAIVDLLFKTNRKVTVKQLKEDYFKKIECFDSVEISGVEDRFNASLGTYHDLLKIIKDKDFLDNEENEDILEDIVLTLTLFEDREMIEERLKTYAHLFDDKVMKQLKRRRYTGWGRLSRKLINGIRDKQSGKTILDFLKSDGFANRNFMQLIHDDSLTFKEDIQKAQVSGQGDSLHEHIANLAGSPAIKKGILQTVKVVDELVKVMGRHKPENIVIEMARENQTTQKGQKNSRERMKRIEEGIKELGSQILKEHPVENTQLQNEKLYLYYLQNGRDMYVDQELDINRLSDYDVDHIVPQSFLKDDSIDNKVLTRSDKARGKSDNVPSEEVVKKMKNYWRQLLNAKLITQRKFDNLTKAERGGLSELDKAGFIKRQLVETRQITKHVAQILDSRMNTKYDENDKLIREVKVITLKSKLVSDFRKDFQFYKVREINNYHHAHDAYLNAVVGTALIKKYPKLESEFVYGDYKVYDVRKMIAKSEQEIGKATAKYFFYSNIMNFFKTEITLANGEIRKRPLIETNGETGEIVWDKGRDFATVRKVLSMPQVNIVKKTEVQTGGFSKESILPKRNSDKLIARKKDWDPKKYGGFDSPTVAYSVLVVAKVEKGKSKKLKSVKELLGITIMERSSFEKNPIDFLEAKGYKEVKKDLIIKLPKYSLFELENGRKRMLASAGELQKGNELALPSKYVNFLYLASHYEKLKGSPEDNEQKQLFVEQHKHYLDEIIEQISEFSKRVILADANLDKVLSAYNKHRDKPIREQAENIIHLFTLTNLGAPAAFKYFDTTIDRKRYTSTKEVLDATLIHQSITGLYETRIDLSQLGGDGGGGSGGSGGSGGSGGSGGSGGTLGIEDEYRLHETSTEPDVSLGSTWLSDFPQAWAETGGMGLAVRQAPLIIPLKATSTPVSIQQYPMSHEARLGIKPHIQRLLDQGILVPCQSPWNTPLLPVKKPGTNDYRPVQDLREVNKRVEDIHPTVPNPYNLLSGLPPSHQWYTVLDLKDAFFCLRLHPTSQPLFAFEWRDPGMGISGQLTWTRLPQGFKNSPTLFDEALHRDLADFRIQHPDLILLQYVDDILLAATSELDCQQGTRALLQTLGDLGYRASAKKAQICQKQVKYLGYLLREGQRWLTEARKETVMGQPVPKTPRQLREFLGTAGFCRLWIPGFAEMAAPLYPLTKTGTLFSWGPDQQKAYQEIKQALLTAPALGLPDLTKPFELFVDEKQGYAKGVLTQKLGPWRRPVAYLSKKLDPVAAGWPPCLRMVAAIAVLTKDAGKLTMGQPLVILAPHAVEALVKQPPDRWLSNARMTHYQAMLLDTDRVQFGPVVALNPATLLPLPEEGAPHDCLEILAETHGTRPDLTDQPIPDADHTWYTDGSSFLQEGQRKAGAAVTTETEVIWAGALPAGTSAQRAELIALTQALKMAEGKRLNVYTDSRYAFATAHIHGEIYRRRGLLTSEGREIKNKSEILALLKALFLPKRLSIIHCLGHQKGDSAEARGNRLADQAAREAAIKTPPDTSTLLAGKRTADGSEFEKRTADGSEFESPKKKAKVE

SEQ ID NO: 6093 - protein, 2103 aa, synthetic construct
MPAAKRVKLDGGDKKYSIGLDIGTNSVGWAVITDEYKVPSKKFKVLGNTDRHSIKKNLIGALLFDSGETAEATRLKRTARRRYTRRKNRICYLQEIFSNEMAKVDDSFFHRLEESFLVEEDKKHERHPIFGNIVDEVAYHEKYPTIYHLRKKLVDSTDKADLRLIYLALAHMIKFRGHFLIEGDLNPDNSDVDKLFIQLVQTYNQLFEENPINASGVDAKAILSARLSKSRRLENLIAQLPGEKKNGLFGNLIALSLGLTPNFKSNFDLAEDAKLQLSKDTYDDDLDNLLAQIGDQYADLFLAAKNLSDAILLSDILRVNTEITKAPLSASMIKRYDEHHQDLTLLKALVRQQLPEKYKEIFFDQSKNGYAGYIDGGASQEEFYKFIKPILEKMDGTEELLVKLNREDLLRKQRTFDNGSIPHQIHLGELHAILRRQEDFYPFLKDNREKIEKILTFRIPYYVGPLARGNSRFAWMTRKSEETITPWNFEEVVDKGASAQSFIERMTNFDKNLPNEKVLPKHSLLYEYFTVYNELTKVKYVTEGMRKPAFLSGEQKKAIVDLLFKTNRKVTVKQLKEDYFKKIECFDSVEISGVEDRFNASLGTYHDLLKIIKDKDFLDNEENEDILEDIVLTLTLFEDREMIEERLKTYAHLFDDKVMKQLKRRRYTGWGRLSRKLINGIRDKQSGKTILDFLKSDGFANRNFMQLIHDDSLTFKEDIQKAQVSGQGDSLHEHIANLAGSPAIKKGILQTVKVVDELVKVMGRHKPENIVIEMARENQTTQKGQKNSRERMKRIEEGIKELGSQILKEHPVENTQLQNEKLYLYYLQNGRDMYVDQELDINRLSDYDVDHIVPQSFLKDDSIDNKVLTRSDKARGKSDNVPSEEVVKKMKNYWRQLLNAKLITQRKFDNLTKAERGGLSELDKAGFIKRQLVETRQITKHVAQILDSRMNTKYDENDKLIREVKVITLKSKLVSDFRKDFQFYKVREINNYHHAHDAYLNAVVGTALIKKYPKLESEFVYGDYKVYDVRKMIAKSEQEIGKATAKYFFYSNIMNFFKTEITLANGEIRKRPLIETNGETGEIVWDKGRDFATVRKVLSMPQVNIVKKTEVQTGGFSKESILPKRNSDKLIARKKDWDPKKYGGFDSPTVAYSVLVVAKVEKGKSKKLKSVKELLGITIMERSSFEKNPIDFLEAKGYKEVKKDLIIKLPKYSLFELENGRKRMLASAGELQKGNELALPSKYVNFLYLASHYEKLKGSPEDNEQKQLFVEQHKHYLDEIIEQISEFSKRVILADANLDKVLSAYNKHRDKPIREQAENIIHLFTLTNLGAPAAFKYFDTTIDRKRYTSTKEVLDATLIHQSITGLYETRIDLSQLGGDGGGGSGGSGGSGGSGGSGGSGGTLGIEDEYRLHETSTEPDVSLGSTWLSDFPQAWAETGGMGLAVRQAPLIIPLKATSTPVSIQQYPMSHEARLGIKPHIQRLLDQGILVPCQSPWNTPLLPVKKPGTNDYRPVQDLREVNKRVEDIHPTVPNPYNLLSGLPPSHQWYTVLDLKDAFFCLRLHPTSQPLFAFEWRDPGMGISGQLTWTRLPQGFKNSPTLFNEALHRDLADFRIQHPDLILLQYVDDILLAATSELDCQQGTRALLQTLGDLGYRASAKKAQICQKQVKYLGYLLREGQRWLTEARKETVMGQPVPKTPRQLREFLGTAGFCRLWIPGFAEMAAPLYPLTKPGTLFSWGPDQQKAYQEIKQALLTAPALGLPDLTKPFELFVDEKQGYAKGVLTQKLGPWRRPVAYLSKKLDPVAAGWPPCLRMVAAIAVLTKDAGKLTMGQPLVILAPHAVEALVKQPPDRWLSNARMTHYQAMLLDTDRVQFGPVVALNPATLLPLPEEGAPHDCLEILAETHGTRPDLTDQPIPDADHTWYTDGSSFLQEGQRKAGAAVTTETEVIWAGALPAGTSAQRAELIALTQALKMAEGKRLNVYTDSRYAFATAHIHGEIYRRRGWLTSEGREIKNKSEILALLKALFLPKRLSIIHCLGHQKGDSAEARGNRLADQAAREAAIKTPPDTSTLLAGKRTADGSEFEKRTADGSEFESPKKKAKVE

SEQ ID NO: 6094 - protein, 2103 aa, synthetic construct
MPAAKRVKLDGGDKKYSIGLDIGTNSVGWAVITDEYKVPSKKFKVLGNTDRHSIKKNLIGALLFDSGETAEATRLKRTARRRYTRRKNRICYLQEIFSNEMAKVDDSFFHRLEESFLVEEDKKHERHPIFGNIVDEVAYHEKYPTIYHLRKKLVDSTDKADLRLIYLALAHMIKFRGHFLIEGDLNPDNSDVDKLFIQLVQTYNQLFEENPINASGVDAKAILSARLSKSRRLENLIAQLPGEKKNGLFGNLIALSLGLTPNFKSNFDLAEDAKLQLSKDTYDDDLDNLLAQIGDQYADLFLAAKNLSDAILLSDILRVNTEITKAPLSASMIKRYDEHHQDLTLLKALVRQQLPEKYKEIFFDQSKNGYAGYIDGGASQEEFYKFIKPILEKMDGTEELLVKLNREDLLRKQRTFDNGSIPHQIHLGELHAILRRQEDFYPFLKDNREKIEKILTFRIPYYVGPLARGNSRFAWMTRKSEETITPWNFEEVVDKGASAQSFIERMTNFDKNLPNEKVLPKHSLLYEYFTVYNELTKVKYVTEGMRKPAFLSGEQKKAIVDLLFKTNRKVTVKQLKEDYFKKIECFDSVEISGVEDRFNASLGTYHDLLKIIKDKDFLDNEENEDILEDIVLTLTLFEDREMIEERLKTYAHLFDDKVMKQLKRRRYTGWGRLSRKLINGIRDKQSGKTILDFLKSDGFANRNFMQLIHDDSLTFKEDIQKAQVSGQGDSLHEHIANLAGSPAIKKGILQTVKVVDELVKVMGRHKPENIVIEMARENQTTQKGQKNSRERMKRIEEGIKELGSQILKEHPVENTQLQNEKLYLYYLQNGRDMYVDQELDINRLSDYDVDHIVPQSFLKDDSIDNKVLTRSDKARGKSDNVPSEEVVKKMKNYWRQLLNAKLITQRKFDNLTKAERGGLSELDKAGFIKRQLVETRQITKHVAQILDSRMNTKYDENDKLIREVKVITLKSKLVSDFRKDFQFYKVREINNYHHAHDAYLNAVVGTALIKKYPKLESEFVYGDYKVYDVRKMIAKSEQEIGKATAKYFFYSNIMNFFKTEITLANGEIRKRPLIETNGETGEIVWDKGRDFATVRKVLSMPQVNIVKKTEVQTGGFSKESILPKRNSDKLIARKKDWDPKKYGGFDSPTVAYSVLVVAKVEKGKSKKLKSVKELLGITIMERSSFEKNPIDFLEAKGYKEVKKDLIIKLPKYSLFELENGRKRMLASAGELQKGNELALPSKYVNFLYLASHYEKLKGSPEDNEQKQLFVEQHKHYLDEIIEQISEFSKRVILADANLDKVLSAYNKHRDKPIREQAENIIHLFTLTNLGAPAAFKYFDTTIDRKRYTSTKEVLDATLIHQSITGLYETRIDLSQLGGDGGGGSGGSGGSGGSGGSGGSGGTLNIEDEYRLHETSKEPDVSLGSTWLSDFPQAWAETGGMGLAVRQAPLIIPLKATSTPVSIKQYPMSQEARLGIKPHIQRLLDQGILVPCQSPWNTPLLPVKKPGTNDYRPVQDLREVNKRVEDIHPTVPNPYNLLSGLPPSHQWYTVLDLKDAFFCLRLHPTSQPLFAFEWRDPEMGISGQLTWTRLPQGFKNSPTLFNEALHRDLAGFRIQHPDLILLQYVDDLLLAATSELDCQQGTRALLQTLGDLGYRASAKKAQICQKQVKYLGYLLKEGQRWLTEARKETVMGQPIPKTPRQLREFLGTAGFCRLWIPGFAEMAAPLYPLTKPGTLFNWGPDQQKAFQEIKQALLTAPALGLPDLTKPFELFVDEKQGYAKGVLTQKLGPWRRPVAYLSKKLDPVAAGWPPCLRMVAAIAVLTKDAGKLTMGQPLVILAPHAVEALVKQPPDRWLSNARMTHYQALLLDTDRVQFGPVVALNPATLLPLPEEGLQHDCLDILAEAHGTRSDLMDQPLPDADHTWYTDGSSFLQEGQRKAGAAVTTETEVIWARALPAGTSAQRAELIALTQALKMAEGKKLNVYTDSRYAFATAHIHGEIYRRRGWLTSEGKEIKNKDEILALLKALFLPKRLSIIHCPGHQKGNSAEARGNRMADQAAREVATRETPETSTLLAGKRTADGSEFEKRTADGSEFESPKKKAKVE

SEQ ID NO: 6095 - protein, 2103 aa, synthetic construct
MPAAKRVKLDGGDKKYSIGLDIGTNSVGWAVITDEYKVPSKKFKVLGNTDRHSIKKNLIGALLFDSGETAEATRLKRTARRRYTRRKNRICYLQEIFSNEMAKVDDSFFHRLEESFLVEEDKKHERHPIFGNIVDEVAYHEKYPTIYHLRKKLVDSTDKADLRLIYLALAHMIKFRGHFLIEGDLNPDNSDVDKLFIQLVQTYNQLFEENPINASGVDAKAILSARLSKSRRLENLIAQLPGEKKNGLFGNLIALSLGLTPNFKSNFDLAEDAKLQLSKDTYDDDLDNLLAQIGDQYADLFLAAKNLSDAILLSDILRVNTEITKAPLSASMIKRYDEHHQDLTLLKALVRQQLPEKYKEIFFDQSKNGYAGYIDGGASQEEFYKFIKPILEKMDGTEELLVKLNREDLLRKQRTFDNGSIPHQIHLGELHAILRRQEDFYPFLKDNREKIEKILTFRIPYYVGPLARGNSRFAWMTRKSEETITPWNFEEVVDKGASAQSFIERMTNFDKNLPNEKVLPKHSLLYEYFTVYNELTKVKYVTEGMRKPAFLSGEQKKAIVDLLFKTNRKVTVKQLKEDYFKKIECFDSVEISGVEDRFNASLGTYHDLLKIIKDKDFLDNEENEDILEDIVLTLTLFEDREMIEERLKTYAHLFDDKVMKQLKRRRYTGWGRLSRKLINGIRDKQSGKTILDFLKSDGFANRNFMQLIHDDSLTFKEDIQKAQVSGQGDSLHEHIANLAGSPAIKKGILQTVKVVDELVKVMGRHKPENIVIEMARENQTTQKGQKNSRERMKRIEEGIKELGSQILKEHPVENTQLQNEKLYLYYLQNGRDMYVDQELDINRLSDYDVDHIVPQSFLKDDSIDNKVLTRSDKARGKSDNVPSEEVVKKMKNYWRQLLNAKLITQRKFDNLTKAERGGLSELDKAGFIKRQLVETRQITKHVAQILDSRMNTKYDENDKLIREVKVITLKSKLVSDFRKDFQFYKVREINNYHHAHDAYLNAVVGTALIKKYPKLESEFVYGDYKVYDVRKMIAKSEQEIGKATAKYFFYSNIMNFFKTEITLANGEIRKRPLIETNGETGEIVWDKGRDFATVRKVLSMPQVNIVKKTEVQTGGFSKESILPKRNSDKLIARKKDWDPKKYGGFDSPTVAYSVLVVAKVEKGKSKKLKSVKELLGITIMERSSFEKNPIDFLEAKGYKEVKKDLIIKLPKYSLFELENGRKRMLASAGELQKGNELALPSKYVNFLYLASHYEKLKGSPEDNEQKQLFVEQHKHYLDEIIEQISEFSKRVILADANLDKVLSAYNKHRDKPIREQAENIIHLFTLTNLGAPAAFKYFDTTIDRKRYTSTKEVLDATLIHQSITGLYETRIDLSQLGGDGGGGSGGSGGSGGSGGSGGSGGTLNIEDEYRLHETSKGPDVPLGSTWLSDFPQAWAETGGMGLAFRQAPLIISLKATSTPVSIKQYPMSQEARLGIKPHIQRLLDQGILVPCQSPWNTPLLPVKKPGTNDYRPVQDLREVNKRVEDIHPTVPNPYNLLSGLPPSHQWYTVLDLKDAFFCLRLHPTSQSLFAFEWKDPEMGISGQLTWTRLPQGFKNSPTLFNEALHRDLADFRIQHPDLILLQYVDDLLLAATSELDCQQGTRALLQTLGDLGYRASAKKAQICQKQVKYLGYLLKEGQRWLTEARKETVMGQPTPKTPRQLREFLGKAGLCRLFIPGFAEMAAPLYPLTKPGTLFKWGPDQQKAYQEIKQALLTAPALGLPDLTKPFELFVDEKQGYAKGVLTQKLGPWRRPVAYLSKKLDPVAAGWPPCLRMVAAIAVLTKDVGKLTMGQPLVILAPHAVEALVKQPPDRWLSNARMTHYQALLLDTDRVQFGPIVALNPATLLPLPEEGLQHDCLDILAEAHGTRPDLTDQPLPDADHTWYTDGSSFLQEGQRRAGAAVTTETEVIWAKALPAGTSAQRAELIALTQALKMAAGKKLNVYTDSRYAFATAHIHGEIYRRRGWLTSEGKEIKNKDEILALLKALFLPKRLSIIHCPGHQKGNHAEARGNRMADQAAREVATRETPETSTLLAGKRTADGSEFEKRTADGSEFESPKKKAKVE

SEQ ID NO: 6096 - protein, 2103 aa, synthetic construct
MPAAKRVKLDGGDKKYSIGLDIGTNSVGWAVITDEYKVPSKKFKVLGNTDRHSIKKNLIGALLFDSGETAEATRLKRTARRRYTRRKNRICYLQEIFSNEMAKVDDSFFHRLEESFLVEEDKKHERHPIFGNIVDEVAYHEKYPTIYHLRKKLVDSTDKADLRLIYLALAHMIKFRGHFLIEGDLNPDNSDVDKLFIQLVQTYNQLFEENPINASGVDAKAILSARLSKSRRLENLIAQLPGEKKNGLFGNLIALSLGLTPNFKSNFDLAEDAKLQLSKDTYDDDLDNLLAQIGDQYADLFLAAKNLSDAILLSDILRVNTEITKAPLSASMIKRYDEHHQDLTLLKALVRQQLPEKYKEIFFDQSKNGYAGYIDGGASQEEFYKFIKPILEKMDGTEELLVKLNREDLLRKQRTFDNGSIPHQIHLGELHAILRRQEDFYPFLKDNREKIEKILTFRIPYYVGPLARGNSRFAWMTRKSEETITPWNFEEVVDKGASAQSFIERMTNFDKNLPNEKVLPKHSLLYEYFTVYNELTKVKYVTEGMRKPAFLSGEQKKAIVDLLFKTNRKVTVKQLKEDYFKKIECFDSVEISGVEDRFNASLGTYHDLLKIIKDKDFLDNEENEDILEDIVLTLTLFEDREMIEERLKTYAHLFDDKVMKQLKRRRYTGWGRLSRKLINGIRDKQSGKTILDFLKSDGFANRNFMQLIHDDSLTFKEDIQKAQVSGQGDSLHEHIANLAGSPAIKKGILQTVKVVDELVKVMGRHKPENIVIEMARENQTTQKGQKNSRERMKRIEEGIKELGSQILKEHPVENTQLQNEKLYLYYLQNGRDMYVDQELDINRLSDYDVDHIVPQSFLKDDSIDNKVLTRSDKARGKSDNVPSEEVVKKMKNYWRQLLNAKLITQRKFDNLTKAERGGLSELDKAGFIKRQLVETRQITKHVAQILDSRMNTKYDENDKLIREVKVITLKSKLVSDFRKDFQFYKVREINNYHHAHDAYLNAVVGTALIKKYPKLESEFVYGDYKVYDVRKMIAKSEQEIGKATAKYFFYSNIMNFFKTEITLANGEIRKRPLIETNGETGEIVWDKGRDFATVRKVLSMPQVNIVKKTEVQTGGFSKESILPKRNSDKLIARKKDWDPKKYGGFDSPTVAYSVLVVAKVEKGKSKKLKSVKELLGITIMERSSFEKNPIDFLEAKGYKEVKKDLIIKLPKYSLFELENGRKRMLASAGELQKGNELALPSKYVNFLYLASHYEKLKGSPEDNEQKQLFVEQHKHYLDEIIEQISEFSKRVILADANLDKVLSAYNKHRDKPIREQAENIIHLFTLTNLGAPAAFKYFDTTIDRKRYTSTKEVLDATLIHQSITGLYETRIDLSQLGGDGGGGSGGSGGSGGSGGSGGSGGTLNIEDEYRLHETSKGPDVPLGSTWLSDFPQAWAETGGMGLAVRQAPLIIPLKATSTPVSIKQYPMSQEARLGIKPHIQRLLDQGILVPCQSPWNTPLLPVKKPGTNDYRPVQDLREVNKRVEDIHPTVPNPYNLLSGLPPSHQWYTVLDLKDAFFCLRLHPTSQSLFAFEWRDPEMGISGQLTWTRLPQGFKNSPTLFNEALHRDLADFRIQHPDLILLQYVDDLLLAATSELDCQQGTRALLQTLGDLGYRASAKKAQICQKQVKYLGYLLKEGQRWLTEARKETVMGQPTPKTPRQLREFLGTAGFCRLWIPGFAEMAAPLYPLTKPGTLFEWGPDQQKAYQEIKQALLTAPALGLPDLTKPFELFVDEKQGYAKGVLTQKLGPWRRPVAYLSKKLDPVAAGWPPCLRMVAAIAVLTKDAGKLTMGQPLVILAPHAVEALVKQPPDRWLSNARMTHYQALLLDTDRVQFGPIVALNPATLLPLPEEGLQHDCLDILAEAHGTRPDLTDQPLPDADHTWYTDGSSFLQEGQRKAGAAVTTETEVVWAKALPAGTSAQRAELIALTQALKMAEGKKLNVYTDSRYAFATAHIHGEIYRRRGWLTSEGKEIKNKDEILALLKALFLPKRLSIIHCPGHQKGNRAEARGNRMADQAAREVATRETPETSTLLAGKRTADGSEFEKRTADGSEFESPKKKAKVE

SEQ ID NO: 6097 - protein, 2103 aa, synthetic construct
MPAAKRVKLDGGDKKYSIGLDIGTNSVGWAVITDEYKVPSKKFKVLGNTDRHSIKKNLIGALLFDSGETAEATRLKRTARRRYTRRKNRICYLQEIFSNEMAKVDDSFFHRLEESFLVEEDKKHERHPIFGNIVDEVAYHEKYPTIYHLRKKLVDSTDKADLRLIYLALAHMIKFRGHFLIEGDLNPDNSDVDKLFIQLVQTYNQLFEENPINASGVDAKAILSARLSKSRRLENLIAQLPGEKKNGLFGNLIALSLGLTPNFKSNFDLAEDAKLQLSKDTYDDDLDNLLAQIGDQYADLFLAAKNLSDAILLSDILRVNTEITKAPLSASMIKRYDEHHQDLTLLKALVRQQLPEKYKEIFFDQSKNGYAGYIDGGASQEEFYKFIKPILEKMDGTEELLVKLNREDLLRKQRTFDNGSIPHQIHLGELHAILRRQEDFYPFLKDNREKIEKILTFRIPYYVGPLARGNSRFAWMTRKSEETITPWNFEEVVDKGASAQSFIERMTNFDKNLPNEKVLPKHSLLYEYFTVYNELTKVKYVTEGMRKPAFLSGEQKKAIVDLLFKTNRKVTVKQLKEDYFKKIECFDSVEISGVEDRFNASLGTYHDLLKIIKDKDFLDNEENEDILEDIVLTLTLFEDREMIEERLKTYAHLFDDKVMKQLKRRRYTGWGRLSRKLINGIRDKQSGKTILDFLKSDGFANRNFMQLIHDDSLTFKEDIQKAQVSGQGDSLHEHIANLAGSPAIKKGILQTVKVVDELVKVMGRHKPENIVIEMARENQTTQKGQKNSRERMKRIEEGIKELGSQILKEHPVENTQLQNEKLYLYYLQNGRDMYVDQELDINRLSDYDVDHIVPQSFLKDDSIDNKVLTRSDKARGKSDNVPSEEVVKKMKNYWRQLLNAKLITQRKFDNLTKAERGGLSELDKAGFIKRQLVETRQITKHVAQILDSRMNTKYDENDKLIREVKVITLKSKLVSDFRKDFQFYKVREINNYHHAHDAYLNAVVGTALIKKYPKLESEFVYGDYKVYDVRKMIAKSEQEIGKATAKYFFYSNIMNFFKTEITLANGEIRKRPLIETNGETGEIVWDKGRDFATVRKVLSMPQVNIVKKTEVQTGGFSKESILPKRNSDKLIARKKDWDPKKYGGFDSPTVAYSVLVVAKVEKGKSKKLKSVKELLGITIMERSSFEKNPIDFLEAKGYKEVKKDLIIKLPKYSLFELENGRKRMLASAGELQKGNELALPSKYVNFLYLASHYEKLKGSPEDNEQKQLFVEQHKHYLDEIIEQISEFSKRVILADANLDKVLSAYNKHRDKPIREQAENIIHLFTLTNLGAPAAFKYFDTTIDRKRYTSTKEVLDATLIHQSITGLYETRIDLSQLGGDGGGGSGGSGGSGGSGGSGGSGGTLNIEDEHRLHETSKEPDVSLGSTWLSDFPQAWAETGGMGLAVRQAPLIIPLKATSTPVSIKQYPMSQEARLGIKPHIQRLLDQGILVPCQSPWNTPLLPVKKPGTNDYRPVQDLREVNKRVEDIHPTVPNPYNLLSGLPPSHQWYTVLDLKDAFFCLRLHPTSQPLFAFEWRDPEMGISGQLTWTRLPQGFKNSPTLFDEALHRDLADFRIQHPDLILLQYVDDLLLAATSELDCQQGTRALLQTLGNLGYRASAKKAQICQKQVKYLGYLLKEGQRWLTEARKETVMGQPTPKTPRQLREFLGTAGFCRLWIPGFAEMAAPLYPLTKTGTLFNWGPDQQKAYQEIKQALLTAPALGLPDLTKPFELFVDEKQGYAKGVLTQKLGPWRRPVAYLSKKLDPVAAGWPPCLRMVAAIAVLTKDAGKLTMGQPLVILAPHAVEALVKQPPDRWLSNARMTHYQALLLDTDRVQFGPVVALNPATLLPLPEEGLQHNCLDILAEAHGTRPDLTDQPLPDADHTWYTDGSSLLQEGQRKAGAAVTTETEVIWAKALPAGTSAQRAELIALTQALKMAEGKKLNVYTDSRYAFATAHIHGEIYRRRGLLTSEGKEIKNKDEILALLKALFLPKRLSIIHCPGHQKGHSAEARGNRMADQAARKAAITETPDTSTLLAGKRTADGSEFEKRTADGSEFESPKKKAKVE

SEQ ID NO: 6098 - protein, 2103 aa, synthetic construct
MPAAKRVKLDGGDKKYSIGLDIGTNSVGWAVITDEYKVPSKKFKVLGNTDRHSIKKNLIGALLFDSGETAEATRLKRTARRRYTRRKNRICYLQEIFSNEMAKVDDSFFHRLEESFLVEEDKKHERHPIFGNIVDEVAYHEKYPTIYHLRKKLVDSTDKADLRLIYLALAHMIKFRGHFLIEGDLNPDNSDVDKLFIQLVQTYNQLFEENPINASGVDAKAILSARLSKSRRLENLIAQLPGEKKNGLFGNLIALSLGLTPNFKSNFDLAEDAKLQLSKDTYDDDLDNLLAQIGDQYADLFLAAKNLSDAILLSDILRVNTEITKAPLSASMIKRYDEHHQDLTLLKALVRQQLPEKYKEIFFDQSKNGYAGYIDGGASQEEFYKFIKPILEKMDGTEELLVKLNREDLLRKQRTFDNGSIPHQIHLGELHAILRRQEDFYPFLKDNREKIEKILTFRIPYYVGPLARGNSRFAWMTRKSEETITPWNFEEVVDKGASAQSFIERMTNFDKNLPNEKVLPKHSLLYEYFTVYNELTKVKYVTEGMRKPAFLSGEQKKAIVDLLFKTNRKVTVKQLKEDYFKKIECFDSVEISGVEDRFNASLGTYHDLLKIIKDKDFLDNEENEDILEDIVLTLTLFEDREMIEERLKTYAHLFDDKVMKQLKRRRYTGWGRLSRKLINGIRDKQSGKTILDFLKSDGFANRNFMQLIHDDSLTFKEDIQKAQVSGQGDSLHEHIANLAGSPAIKKGILQTVKVVDELVKVMGRHKPENIVIEMARENQTTQKGQKNSRERMKRIEEGIKELGSQILKEHPVENTQLQNEKLYLYYLQNGRDMYVDQELDINRLSDYDVDHIVPQSFLKDDSIDNKVLTRSDKARGKSDNVPSEEVVKKMKNYWRQLLNAKLITQRKFDNLTKAERGGLSELDKAGFIKRQLVETRQITKHVAQILDSRMNTKYDENDKLIREVKVITLKSKLVSDFRKDFQFYKVREINNYHHAHDAYLNAVVGTALIKKYPKLESEFVYGDYKVYDVRKMIAKSEQEIGKATAKYFFYSNIMNFFKTEITLANGEIRKRPLIETNGETGEIVWDKGRDFATVRKVLSMPQVNIVKKTEVQTGGFSKESILPKRNSDKLIARKKDWDPKKYGGFDSPTVAYSVLVVAKVEKGKSKKLKSVKELLGITIMERSSFEKNPIDFLEAKGYKEVKKDLIIKLPKYSLFELENGRKRMLASAGELQKGNELALPSKYVNFLYLASHYEKLKGSPEDNEQKQLFVEQHKHYLDEIIEQISEFSKRVILADANLDKVLSAYNKHRDKPIREQAENIIHLFTLTNLGAPAAFKYFDTTIDRKRYTSTKEVLDATLIHQSITGLYETRIDLSQLGGDGGGGSGGSGGSGGSGGSGGSGGTLNIEDEHRLHETSKEPDVSLGSTWLSDFPQAWAETGGMGLAVRQAPLIIPLKATSTPVSIKQYPMSQEARLGIKPHIQRLLDQGILVPCQSPWNTPLLPVKKPGTNDYRPVQDLREVNKRVEDIHPTVPNPYNLLSGLPPSHQWYTVLDLKDAFFCLRLHPTSQPLFAFEWRDPEMGISGQLTWTRLPQGFKNSPTLFNEALHRDLADFRIQHPDLILLQYVDDLLLAATSELDCQQGTRALLQTLGNLGYRASAKKAQICQKQVKYLGYLLKEGQRWLTEARKETVMGQPTPKTPRQLREFLGTAGFCRLWIPGFAEMAAPLYPLTKPGTLFNWGPDQQKAYQEIKQALLTAPALGLPDLTKPFELFVDEKQGYAKGVLTQKLGPWRRPVAYLSKKLDPVAAGWPPCLRMVAAIAVLTKDAGKLTMGQPLVILAPHAVEALVKQPPDRWLSNARMTHYQALLLDTDRVQFGPVVALNPATLLPLPEEGLQHNCLDILAEAHGTRPDLTDQPLPDADHTWYTDGSSLLQEGQRKAGAAVTTETEVIWAKALPAGTSAQRAELIALTQALKMAEGKKLNVYTDSRYAFATAHIHGEIYRRRGWLTSEGKEIKNKDEILALLKALFLPKRLSIIHCPGHQKGHSAEARGNRMADQAARKAAITETPDTSTLLAGKRTADGSEFEKRTADGSEFESPKKKAKVE

SEQ ID NO: 6099 - protein, 2103 aa, synthetic construct; identical to SEQ ID NO: 6098

SEQ ID NO: 6100 - protein, 2017 aa, synthetic construct
MPAAKRVKLDGGDKKYSIGLDIGTNSVGWAVITDEYKVPSKKFKVLGNTDRHSIKKNLIGALLFDSGETAEATRLKRTARRRYTRRKNRICYLQEIFSNEMAKVDDSFFHRLEESFLVEEDKKHERHPIFGNIVDEVAYHEKYPTIYHLRKKLVDSTDKADLRLIYLALAHMIKFRGHFLIEGDLNPDNSDVDKLFIQLVQTYNQLFEENPINASGVDAKAILSARLSKSRRLENLIAQLPGEKKNGLFGNLIALSLGLTPNFKSNFDLAEDAKLQLSKDTYDDDLDNLLAQIGDQYADLFLAAKNLSDAILLSDILRVNTEITKAPLSASMIKRYDEHHQDLTLLKALVRQQLPEKYKEIFFDQSKNGYAGYIDGGASQEEFYKFIKPILEKMDGTEELLVKLNREDLLRKQRTFDNGSIPHQIHLGELHAILRRQEDFYPFLKDNREKIEKILTFRIPYYVGPLARGNSRFAWMTRKSEETITPWNFEEVVDKGASAQSFIERMTNFDKNLPNEKVLPKHSLLYEYFTVYNELTKVKYVTEGMRKPAFLSGEQKKAIVDLLFKTNRKVTVKQLKEDYFKKIECFDSVEISGVEDRFNASLGTYHDLLKIIKDKDFLDNEENEDILEDIVLTLTLFEDREMIEERLKTYAHLFDDKVMKQLKRRRYTGWGRLSRKLINGIRDKQSGKTILDFLKSDGFANRNFMQLIHDDSLTFKEDIQKAQVSGQGDSLHEHIANLAGSPAIKKGILQTVKVVDELVKVMGRHKPENIVIEMARENQTTQKGQKNSRERMKRIEEGIKELGSQILKEHPVENTQLQNEKLYLYYLQNGRDMYVDQELDINRLSDYDVDHIVPQSFLKDDSIDNKVLTRSDKARGKSDNVPSEEVVKKMKNYWRQLLNAKLITQRKFDNLTKAERGGLSELDKAGFIKRQLVETRQITKHVAQILDSRMNTKYDENDKLIREVKVITLKSKLVSDFRKDFQFYKVREINNYHHAHDAYLNAVVGTALIKKYPKLESEFVYGDYKVYDVRKMIAKSEQEIGKATAKYFFYSNIMNFFKTEITLANGEIRKRPLIETNGETGEIVWDKGRDFATVRKVLSMPQVNIVKKTEVQTGGFSKESILPKRNSDKLIARKKDWDPKKYGGFDSPTVAYSVLVVAKVEKGKSKKLKSVKELLGITIMERSSFEKNPIDFLEAKGYKEVKKDLIIKLPKYSLFELENGRKRMLASAGELQKGNELALPSKYVNFLYLASHYEKLKGSPEDNEQKQLFVEQHKHYLDEIIEQISEFSKRVILADANLDKVLSAYNKHRDKPIREQAENIIHLFTLTNLGAPAAFKYFDTTIDRKRYTSTKEVLDATLIHQSITGLYETRIDLSQLGGDGGGGSGGSGGSGGSGGSGGSGGLTAAIDILAPQQCAEPITWKSDEPVWVDQWPLTNDKLAAAQQLVQEQLEAGHITESSSPWNTPIFVIKKKSGKWRLLQDLRAVNATMVLMGALQPGLPSPVAPPQGYLKIIIDLKDCFFSIPLHPSDQKRFAFSLPSTNFKEPMQRFQWKVLPQGMANSPTLCQKYVATAIHKVRHAWKQMYIIHYMDDILIAGKDGQQVLQCFDQLKQELTAAGLHIAPEKVQLQDPYTYLGFELNGPKITNQKAVIRKDKLQTLNDFQKLLGDINWLRPYLKLTTGDLKPLFDTLKPDSDPNSHRSLSKEALASLEKVETAIAEQFVTHINYSLPLIFLIFNTALTPTGLFWQDNPIMWIHLPASPKKVLLPYYDAIADLIILGRDHSKKYFGIEPSTIIQPYSKSQIDWLMQNTEMWPIACASFVGILDNHYPPNKLIQFCKLHTFVFPQIISKTPLNNALLVFTDGSSTGMAAYTLTDTTIKFQTNLNSAQLVELQALIAVLSAFPNQPLNIYTDSAYLAHSIPLLETVAQIKHISETAKLFLQCQQLIYNRSIPFYIGHVRAHSGLPGPIAQGNQRADLATKIVASNINTAGKRTADGSEFEKRTADGSEFESPKKKAKVE

SEQ ID NO: 6101 - protein, 2183 aa, synthetic construct
MPAAKRVKLDGGDKKYSIGLDIGTNSVGWAVITDEYKVPSKKFKVLGNTDRHSIKKNLIGALLFDSGETAEATRLKRTARRRYTRRKNRICYLQEIFSNEMAKVDDSFFHRLEESFLVEEDKKHERHPIFGNIVDEVAYHEKYPTIYHLRKKLVDSTDKADLRLIYLALAHMIKFRGHFLIEGDLNPDNSDVDKLFIQLVQTYNQLFEENPINASGVDAKAILSARLSKSRRLENLIAQLPGEKKNGLFGNLIALSLGLTPNFKSNFDLAEDAKLQLSKDTYDDDLDNLLAQIGDQYADLFLAAKNLSDAILLSDILRVNTEITKAPLSASMIKRYDEHHQDLTLLKALVRQQLPEKYKEIFFDQSKNGYAGYIDGGASQEEFYKFIKPILEKMDGTEELLVKLNREDLLRKQRTFDNGSIPHQIHLGELHAILRRQEDFYPFLKDNREKIEKILTFRIPYYVGPLARGNSRFAWMTRKSEETITPWNFEEVVDKGASAQSFIERMTNFDKNLPNEKVLPKHSLLYEYFTVYNELTKVKYVTEGMRKPAFLSGEQKKAIVDLLFKTNRKVTVKQLKEDYFKKIECFDSVEISGVEDRFNASLGTYHDLLKIIKDKDFLDNEENEDILEDIVLTLTLFEDREMIEERLKTYAHLFDDKVMKQLKRRRYTGWGRLSRKLINGIRDKQSGKTILDFLKSDGFANRNFMQLIHDDSLTFKEDIQKAQVSGQGDSLHEHIANLAGSPAIKKGILQTVKVVDELVKVMGRHKPENIVIEMARENQTTQKGQKNSRERMKRIEEGIKELGSQILKEHPVENTQLQNEKLYLYYLQNGRDMYVDQELDINRLSDYDVDHIVPQSFLKDDSIDNKVLTRSDKARGKSDNVPSEEVVKKMKNYWRQLLNAKLITQRKFDNLTKAERGGLSELDKAGFIKRQLVETRQITKHVAQILDSRMNTKYDENDKLIREVKVITLKSKLVSDFRKDFQFYKVREINNYHHAHDAYLNAVVGTALIKKYPKLESEFVYGDYKVYDVRKMIAKSEQEIGKATAKYFFYSNIMNFFKTEITLANGEIRKRPLIETNGETGEIVWDKGRDFATVRKVLSMPQVNIVKKTEVQTGGFSKESILPKRNSDKLIARKKDWDPKKYGGFDSPTVAYSVLVVAKVEKGKSKKLKSVKELLGITIMERSSFEKNPIDFLEAKGYKEVKKDLIIKLPKYSLFELENGRKRMLASAGELQKGNELALPSKYVNFLYLASHYEKLKGSPEDNEQKQLFVEQHKHYLDEIIEQISEFSKRVILADANLDKVLSAYNKHRDKPIREQAENIIHLFTLTNLGAPAAFKYFDTTIDRKRYTSTKEVLDATLIHQSITGLYETRIDLSQLGGDGGGGSGGSGGSGGSGGSGGSGGMDPLQLLQPLEAEIKGTKLKAHWNSGATITCVPQAFLEEEVPIKNIWIKTIHGEKEQPVYYLTFKIQGRKVEAEVISSPYDYILVSPSDIPWLMKKPLQLTTLVPLQEYEERLLKQTMLTGSYKEKLQSLFLKYDALWQHWENQVGHRRIKPHHIATGTVNPRPQKQYPINPKAKASIQTVINDLLKQGVLIQQNSIMNTPVYPVPKPDGKWRMVLDYREVNKTIPLIAAQNQHSAGILSSIFRGKYKTTLDLSNGFWAHSITPESYWLTAFTWLGQQYCWTRLPQGFLNSPALFTADVVDLLKEVPNVQVYVDDIYISHDDPREHLEQLEKVFSLLLNAGYVVSLKKSEIAQHEVEFLGFNITKEGRGLTETFKQKLLNITPPRDLKQLQSILGLLNFARNFIPNFSELVKPLYNIIATANGKYITWTTDNSQQLQNIISMLNSAENLEERNPEVRLIMKVNTSPSAGYIRFYNEFAKRPIMYLNYVYTKAEVKFTNTEKLLTTIHKGLIKALDLGMGQEILVYSPIVSMTKIQKTPLPERKALPIRWITWMSYLEDPRIQFHYDKTLPELQQVPTVTDDIIAKIKHPSEFSMVFYTDGSAIKHPNVNKSHNAGMGIAQVQFKPEFTVINTWSIPLGDHTAQLAEVAAVEFACKKALKIDGPVLIVTDSFYVAESVNKELPYWQSNGFFNNKKKPLKHVSKWKSIADCIQLKPDIIIIHEKGHQPTASTFHTEGNNLADKLATQGSYVVNAGKRTADGSEFEKRTADGSEFESPKKKAKVE

SEQ ID NO: 6102 - protein, 2094 aa, synthetic construct
MPAAKRVKLDGGDKKYSIGLDIGTNSVGWAVITDEYKVPSKKFKVLGNTDRHSIKKNLIGALLFDSGETAEATRLKRTARRRYTRRKNRICYLQEIFSNEMAKVDDSFFHRLEESFLVEEDKKHERHPIFGNIVDEVAYHEKYPTIYHLRKKLVDSTDKADLRLIYLALAHMIKFRGHFLIEGDLNPDNSDVDKLFIQLVQTYNQLFEENPINASGVDAKAILSARLSKSRRLENLIAQLPGEKKNGLFGNLIALSLGLTPNFKSNFDLAEDAKLQLSKDTYDDDLDNLLAQIGDQYADLFLAAKNLSDAILLSDILRVNTEITKAPLSASMIKRYDEHHQDLTLLKALVRQQLPEKYKEIFFDQSKNGYAGYIDGGASQEEFYKFIKPILEKMDGTEELLVKLNREDLLRKQRTFDNGSIPHQIHLGELHAILRRQEDFYPFLKDNREKIEKILTFRIPYYVGPLARGNSRFAWMTRKSEETITPWNFEEVVDKGASAQSFIERMTNFDKNLPNEKVLPKHSLLYEYFTVYNELTKVKYVTEGMRKPAFLSGEQKKAIVDLLFKTNRKVTVKQLKEDYFKKIECFDSVEISGVEDRFNASLGTYHDLLKIIKDKDFLDNEENEDILEDIVLTLTLFEDREMIEERLKTYAHLFDDKVMKQLKRRRYTGWGRLSRKLINGIRDKQSGKTILDFLKSDGFANRNFMQLIHDDSLTFKEDIQKAQVSGQGDSLHEHIANLAGSPAIKKGILQTVKVVDELVKVMGRHKPENIVIEMARENQTTQKGQKNSRERMKRIEEGIKELGSQILKEHPVENTQLQNEKLYLYYLQNGRDMYVDQELDINRLSDYDVDHIVPQSFLKDDSIDNKVLTRSDKARGKSDNVPSEEVVKKMKNYWRQLLNAKLITQRKFDNLTKAERGGLSELDKAGFIKRQLVETRQITKHVAQILDSRMNTKYDENDKLIREVKVITLKSKLVSDFRKDFQFYKVREINNYHHAHDAYLNAVVGTALIKKYPKLESEFVYGDYKVYDVRKMIAKSEQEIGKATAKYFFYSNIMNFFKTEITLANGEIRKRPLIETNGETGEIVWDKGRDFATVRKVLSMPQVNIVKKTEVQTGGFSKESILPKRNSDKLIARKKDWDPKKYGGFDSPTVAYSVLVVAKVEKGKSKKLKSVKELLGITIMERSSFEKNPIDFLEAKGYKEVKKDLIIKLPKYSLFELENGRKRMLASAGELQKGNELALPSKYVNFLYLASHYEKLKGSPEDNEQKQLFVEQHKHYLDEIIEQISEFSKRVILADANLDKVLSAYNKHRDKPIREQAENIIHLFTLTNLGAPAAFKYFDTTIDRKRYTSTKEVLDATLIHQSITGLYETRIDLSQLGGDGGGGSGGSGGSGGSGGSGGSGGIPWLMKKPLQLTTLVPLQEYEERLLKQTMLTGSYKEKLQSLFLKYDALWQHWENQVGHRRIKPHHIATGTVNPRPQKQYPINPKAKASIQTVINDLLKQGVLIQQNSIMNTPVYPVPKPDGKWRMVLDYREVNKTIPLIAAQNQHSAGILSSIFRGKYKTTLDLSNGFWAHSITPESYWLTAFTWLGQQYCWTRLPQGFLNSPALFNADVVDLLKEVPNVQVYVDDIYISHDDPREHLEQLEKVFSLLLNAGYVVSLKKSEIAQHEVEFLGFNITKEGRGLTETFKQKLLNITPPRDLKQLQSILGLLNFARNFIPNFSELVKPLYNIIATAPGKYITWTTDNSQQLQNIISMLNSAENLEERNPEVRLIMKVNTSPSAGYIRFYNEFAKRPIMYLNYVYTKAEVKFTNTEKLLTTIHKGLIKALDLGMGQEILVYSPIVSMTKIQKTPLPERKALPIRWITWMSYLEDPRIQFHYDKTLPELQQVPTVTDDIIAKIKHPSEFSMVFYTDGSAIKHPNVNKSHNAGMGIAQVQFKPEFTVINTWSIPLGDHTAQLAEVAAVEFACKKALKIDGPVLIVTDSFYVAESVNKELPYWQSNGFFNNKKKPLKHVSKWKSIADCIQLKPDIIIIHEKGHQPTASTFHTEGNNLADKLATQGSYVVNAGKRTADGSEFEKRTADGSEFESPKKKAKVE

SEQ ID NO: 6103 - protein, 2094 aa, synthetic construct
MPAAKRVKLDGGDKKYSIGLDIGTNSVGWAVITDEYKVPSKKFKVLGNTDRHSIKKNLIGALLFDSGETAEATRLKRTARRRYTRRKNRICYLQEIFSNEMAKVDDSFFHRLEESFLVEEDKKHERHPIFGNIVDEVAYHEKYPTIYHLRKKLVDSTDKADLRLIYLALAHMIKFRGHFLIEGDLNPDNSDVDKLFIQLVQTYNQLFEENPINASGVDAKAILSARLSKSRRLENLIAQLPGEKKNGLFGNLIALSLGLTPNFKSNFDLAEDAKLQLSKDTYDDDLDNLLAQIGDQYADLFLAAKNLSDAILLSDILRVNTEITKAPLSASMIKRYDEHHQDLTLLKALVRQQLPEKYKEIFFDQSKNGYAGYIDGGASQEEFYKFIKPILEKMDGTEELLVKLNREDLLRKQRTFDNGSIPHQIHLGELHAILRRQEDFYPFLKDNREKIEKILTFRIPYYVGPLARGNSRFAWMTRKSEETITPWNFEEVVDKGASAQSFIERMTNFDKNLPNEKVLPKHSLLYEYFTVYNELTKVKYVTEGMRKPAFLSGEQKKAIVDLLFKTNRKVTVKQLKEDYFKKIECFDSVEISGVEDRFNASLGTYHDLLKIIKDKDFLDNEENEDILEDIVLTLTLFEDREMIEERLKTYAHLFDDKVMKQLKRRRYTGWGRLSRKLINGIRDKQSGKTILDFLKSDGFANRNFMQLIHDDSLTFKEDIQKAQVSGQGDSLHEHIANLAGSPAIKKGILQTVKVVDELVKVMGRHKPENIVIEMARENQTTQKGQKNSRERMKRIEEGIKELGSQILKEHPVENTQLQNEKLYLYYLQNGRDMYVDQELDINRLSDYDVDHIVPQSFLKDDSIDNKVLTRSDKARGKSDNVPSEEVVKKMKNYWRQLLNAKLITQRKFDNLTKAERGGLSELDKAGFIKRQLVETRQITKHVAQILDSRMNTKYDENDKLIREVKVITLKSKLVSDFRKDFQFYKVREINNYHHAHDAYLNAVVGTALIKKYPKLESEFVYGDYKVYDVRKMIAKSEQEIGKATAKYFFYSNIMNFFKTEITLANGEIRKRPLIETNGETGEIVWDKGRDFATVRKVLSMPQVNIVKKTEVQTGGFSKESILPKRNSDKLIARKKDWDPKKYGGFDSPTVAYSVLVVAKVEKGKSKKLKSVKELLGITIMERSSFEKNPIDFLEAKGYKEVKKDLIIKLPKYSLFELENGRKRMLASAGELQKGNELALPSKYVNFLYLASHYEKLKGSPEDNEQKQLFVEQHKHYLDEIIEQISEFSKRVILADANLDKVLSAYNKHRDKPIREQAENIIHLFTLTNLGAPAAFKYFDTTIDRKRYTSTKEVLDATLIHQSITGLYETRIDLSQLGGDGGGGSGGSGGSGGSGGSGGSGGIPWLMKKPLQLTTLVPLQEYEERLLKQTMLTGSYKEKLQSLFLKYDALWQHWENQVGHRRIKPHHIATGTVNPRPQKQYPINPKAKASIQTVINDLLKQGVLIQQNSIMNTPVYPVPKPDGKWRMVLDYREVNKTIPLIAAQNQHSAGILSSIFRGKYKTTLDLSNGFWAHSITPESYWLTAFTWLGQQYCWTRLPQGFLNSPALFNADVVDLLKEVPNVQVYVDDIYISHDDPREHLEQLEKVFSLLLNAGYVVSLKKSEIAQHEVEFLGFNITKEGRGLTETFKQKLLNITPPRDLKQLQSILGKLNFARNFIPNFSELVKPLYNIIATAPGKYITWTTDNSQQLQNIISMLNSAENLEERNPEVRLIMKVNTSPSAGYIRFYNEFAKRPIMYLNYVYTKAEVKFTNTEKLLTTIHKGLIKALDLGMGQEILVYSPIVSMTKIQKTPLPERKALPIRWITWMSYLEDPRIQFHYDKTLPELQQVPTVTDDIIAKIKHPSEFSMVFYTDGSAIKHPNVNKSHNAGMGIAQVQFKPEFTVINTWSIPLGDHTAQLAEVAAVEFACKKALKIDGPVLIVTDSFYVAESVNKELPYWQSNGFFNNKKKPLKHVSKWKSIADCIQLKPDIIIIHEKGHQPTASTFHTEGNNLADKLATQGSYVVNAGKRTADGSEFEKRTADGSEFESPKKKAKVE

SEQ ID NO: 6104 - protein, 2024 aa, synthetic construct
MPAAKRVKLDGGDKKYSIGLDIGTNSVGWAVITDEYKVPSKKFKVLGNTDRHSIKKNLIGALLFDSGETAEATRLKRTARRRYTRRKNRICYLQEIFSNEMAKVDDSFFHRLEESFLVEEDKKHERHPIFGNIVDEVAYHEKYPTIYHLRKKLVDSTDKADLRLIYLALAHMIKFRGHFLIEGDLNPDNSDVDKLFIQLVQTYNQLFEENPINASGVDAKAILSARLSKSRRLENLIAQLPGEKKNGLFGNLIALSLGLTPNFKSNFDLAEDAKLQLSKDTYDDDLDNLLAQIGDQYADLFLAAKNLSDAILLSDILRVNTEITKAPLSASMIKRYDEHHQDLTLLKALVRQQLPEKYKEIFFDQSKNGYAGYIDGGASQEEFYKFIKPILEKMDGTEELLVKLNREDLLRKQRTFDNGSIPHQIHLGELHAILRRQEDFYPFLKDNREKIEKILTFRIPYYVGPLARGNSRFAWMTRKSEETITPWNFEEVVDKGASAQSFIERMTNFDKNLPNEKVLPKHSLLYEYFTVYNELTKVKYVTEGMRKPAFLSGEQKKAIVDLLFKTNRKVTVKQLKEDYFKKIECFDSVEISGVEDRFNASLGTYHDLLKIIKDKDFLDNEENEDILEDIVLTLTLFEDREMIEERLKTYAHLFDDKVMKQLKRRRYTGWGRLSRKLINGIRDKQSGKTILDFLKSDGFANRNFMQLIHDDSLTFKEDIQKAQVSGQGDSLHEHIANLAGSPAIKKGILQTVKVVDELVKVMGRHKPENIVIEMARENQTTQKGQKNSRERMKRIEEGIKELGSQILKEHPVENTQLQNEKLYLYYLQNGRDMYVDQELDINRLSDYDVDHIVPQSFLKDDSIDNKVLTRSDKARGKSDNVPSEEVVKKMKNYWRQLLNAKLITQRKFDNLTKAERGGLSELDKAGFIKRQLVETRQITKHVAQILDSRMNTKYDENDKLIREVKVITLKSKLVSDFRKDFQFYKVREINNYHHAHDAYLNAVVGTALIKKYPKLESEFVYGDYKVYDVRKMIAKSEQEIGKATAKYFFYSNIMNFFKTEITLANGEIRKRPLIETNGETGEIVWDKGRDFATVRKVLSMPQVNIVKKTEVQTGGFSKESILPKRNSDKLIARKKDWDPKKYGGFDSPTVAYSVLVVAKVEKGKSKKLKSVKELLGITIMERSSFEKNPIDFLEAKGYKEVKKDLIIKLPKYSLFELENGRKRMLASAGELQKGNELALPSKYVNFLYLASHYEKLKGSPEDNEQKQLFVEQHKHYLDEIIEQISEFSKRVILADANLDKVLSAYNKHRDKPIREQAENIIHLFTLTNLGAPAAFKYFDTTIDRKRYTSTKEVLDATLIHQSITGLYETRIDLSQLGGDGGGGSGGSGGSGGSGGSGGSGGPRSRAIDIPVPHADKISWKITDPVWVDQWPLTYEKTLAAIALVQEQLAAGHIEPTNSPWNTPIFIIKKKSGSWRLLQDLRAVNKVMVPMGALQPGLPSPVAIPLNYHKIVIDLKDCFFTIPLHPEDRPYFAFSVPQINFQSPMPRYQWKVLPQGMANSPTLCQKFVAAAIAPVRSQWPEAYILHYMDDILLACDSAEAAKACYAHIISCLTSYGLKIAPDKVQVSEPFSYLGFELHHQQVFTPRVCLKTDHLKTLNDFQKLLGDIQWLRPYLKLPTSALVPLNNILKGDPNPLSVRALTPEAKQSLALINKAIQNQSVQQISYNLPLVLLLLPTPHTPTAVFWQPNGTDPTKNGSPLLWLHLPASPSKVLLTYPSLLAMLIIKGRYTGRQLFGRDPHSIIIPYTQDQLTWLLQTSDEWAIALSSFTGDIDNHYPSDPVIQFAKLHQFIFPKITKCAPIPQATLVFTDGSSNGIAAYVIDNQPISIKSPYLSAQLVELYAILQVFTVLAHQPFNLYTDSAYIAQSVPLLETVPFIKSSTNATPLFSKLQQLILNRQHPFFIGHLRAHLNLPGPLAEGNALADAATQIFPIISDAGKRTADGSEFEKRTADGSEFESPKKKAKVE

SEQ ID NO: 6105 - protein, 2101 aa, synthetic construct
MPAAKRVKLDGGDKKYSIGLDIGTNSVGWAVITDEYKVPSKKFKVLGNTDRHSIKKNLIGALLFDSGETAEATRLKRTARRRYTRRKNRICYLQEIFSNEMAKVDDSFFHRLEESFLVEEDKKHERHPIFGNIVDEVAYHEKYPTIYHLRKKLVDSTDKADLRLIYLALAHMIKFRGHFLIEGDLNPDNSDVDKLFIQLVQTYNQLFEENPINASGVDAKAILSARLSKSRRLENLIAQLPGEKKNGLFGNLIALSLGLTPNFKSNFDLAEDAKLQLSKDTYDDDLDNLLAQIGDQYADLFLAAKNLSDAILLSDILRVNTEITKAPLSASMIKRYDEHHQDLTLLKALVRQQLPEKYKEIFFDQSKNGYAGYIDGGASQEEFYKFIKPILEKMDGTEELLVKLNREDLLRKQRTFDNGSIPHQIHLGELHAILRRQEDFYPFLKDNREKIEKILTFRIPYYVGPLARGNSRFAWMTRKSEETITPWNFEEVVDKGASAQSFIERMTNFDKNLPNEKVLPKHSLLYEYFTVYNELTKVKYVTEGMRKPAFLSGEQKKAIVDLLFKTNRKVTVKQLKEDYFKKIECFDSVEISGVEDRFNASLGTYHDLLKIIKDKDFLDNEENEDILEDIVLTLTLFEDREMIEERLKTYAHLFDDKVMKQLKRRRYTGWGRLSRKLINGIRDKQSGKTILDFLKSDGFANRNFMQLIHDDSLTFKEDIQKAQVSGQGDSLHEHIANLAGSPAIKKGILQTVKVVDELVKVMGRHKPENIVIEMARENQTTQKGQKNSRERMKRIEEGIKELGSQILKEHPVENTQLQNEKLYLYYLQNGRDMYVDQELDINRLSDYDVDHIVPQSFLKDDSIDNKVLTRSDKARGKSDNVPSEEVVKKMKNYWRQLLNAKLITQRKFDNLTKAERGGLSELDKAGFIKRQLVETRQITKHVAQILDSRMNTKYDENDKLIREVKVITLKSKLVSDFRKDFQFYKVREINNYHHAHDAYLNAVVGTALIKKYPKLESEFVYGDYKVYDVRKMIAKSEQEIGKATAKYFFYSNIMNFFKTEITLANGEIRKRPLIETNGETGEIVWDKGRDFATVRKVLSMPQVNIVKKTEVQTGGFSKESILPKRNSDKLIARKKDWDPKKYGGFDSPTVAYSVLVVAKVEKGKSKKLKSVKELLGITIMERSSFEKNPIDFLEAKGYKEVKKDLIIKLPKYSLFELENGRKRMLASAGELQKGNELALPSKYVNFLYLASHYEKLKGSPEDNEQKQLFVEQHKHYLDEIIEQISEFSKRVILADANLDKVLSAYNKHRDKPIREQAENIIHLFTLTNLGAPAAFKYFDTTIDRKRYTSTKEVLDATLIHQSITGLYETRIDLSQLGGDGGGGSGGSGGSGGSGGSGGSGGVLNLEEEYRLHEKPVPSSIDPSWLQLFPTVWAERAGMGLANQVPPVVVELRSGASPVAVRQYPMSKEAREGIRPHIQRFLDLGVLVPCQSPWNTPLLPVKKPGTNDYRPVQDLREINKRVQDIHPTVPNPYNLLSSLPPSHTWYSVLDLKDAFFCLKLHPNSQPLFAFEWRDPEKGNTGQLTWTRLPQGFKNSPTLFDEALHRDLAPFRALNPQVVLLQYVDDLLVAAPTYRDCKEGTQKLLQELSKLGYRVSAKKAQLCQKEVTYLGYLLKEGKRWLTPARKATVMKIPPPTTPRQVREFLGTAGFCRLWIPGFASLAAPLYPLTKESIPFIWTEEHQKAFDRIKEALLSAPALALPDLTKPFTLYVDERAGVARGVLTQTLGPWRRPVAYLSKKLDPVASGWPTCLKAVAAVALLLKDADKLTLGQNVTVIASHSLESIVRQPPDRWMTNARMTHYQSLLLNERVSFAPPAVLNPATLLPVESEATPVHRCSEILAEETGTRRDLKDQPLPGVPAWYTDGSSFIAEGKRRAGAAIVDGKRTVWASSLPEGTSAQKAELVALTQALRLAEGKDINIYTDSRYAFATAHIHGAIYKQRGLLTSAGKDIKNKEEILALLEAIHLPKRVAIIHCPGHQKGNDPVATGNRRADEAAKQAALSTRVLAETTKPAGKRTADGSEFEKRTADGSEFESPKKKAKVE

SEQ ID NO: 6106 - protein, 2101 aa, synthetic construct
MPAAKRVKLDGGDKKYSIGLDIGTNSVGWAVITDEYKVPSKKFKVLGNTDRHSIKKNLIGALLFDSGETAEATRLKRTARRRYTRRKNRICYLQEIFSNEMAKVDDSFFHRLEESFLVEEDKKHERHPIFGNIVDEVAYHEKYPTIYHLRKKLVDSTDKADLRLIYLALAHMIKFRGHFLIEGDLNPDNSDVDKLFIQLVQTYNQLFEENPINASGVDAKAILSARLSKSRRLENLIAQLPGEKKNGLFGNLIALSLGLTPNFKSNFDLAEDAKLQLSKDTYDDDLDNLLAQIGDQYADLFLAAKNLSDAILLSDILRVNTEITKAPLSASMIKRYDEHHQDLTLLKALVRQQLPEKYKEIFFDQSKNGYAGYIDGGASQEEFYKFIKPILEKMDGTEELLVKLNREDLLRKQRTFDNGSIPHQIHLGELHAILRRQEDFYPFLKDNREKIEKILTFRIPYYVGPLARGNSRFAWMTRKSEETITPWNFEEVVDKGASAQSFIERMTNFDKNLPNEKVLPKHSLLYEYFTVYNELTKVKYVTEGMRKPAFLSGEQKKAIVDLLFKTNRKVTVKQLKEDYFKKIECFDSVEISGVEDRFNASLGTYHDLLKIIKDKDFLDNEENEDILEDIVLTLTLFEDREMIEERLKTYAHLFDDKVMKQLKRRRYTGWGRLSRKLINGIRDKQSGKTILDFLKSDGFANRNFMQLIHDDSLTFKEDIQKAQVSGQGDSLHEHIANLAGSPAIKKGILQTVKVVDELVKVMGRHKPENIVIEMARENQTTQKGQKNSRERMKRIEEGIKELGSQILKEHPVENTQLQNEKLYLYYLQNGRDMYVDQELDINRLSDYDVDHIVPQSFLKDDSIDNKVLTRSDKARGKSDNVPSEEVVKKMKNYWRQLLNAKLITQRKFDNLTKAERGGLSELDKAGFIKRQLVETRQITKHVAQILDSRMNTKYDENDKLIREVKVITLKSKLVSDFRKDFQFYKVREINNYHHAHDAYLNAVVGTALIKKYPKLESEFVYGDYKVYDVRKMIAKSEQEIGKATAKYFFYSNIMNFFKTEITLANGEIRKRPLIETNGETGEIVWDKGRDFATVRKVLSMPQVNIVKKTEVQTGGFSKESILPKRNSDKLIARKKDWDPKKYGGFDSPTVAYSVLVVAKVEKGKSKKLKSVKELLGITIMERSSFEKNPIDFLEAKGYKEVKKDLIIKLPKYSLFELENGRKRMLASAGELQKGNELALPSKYVNFLYLASHYEKLKGSPEDNEQKQLFVEQHKHYLDEIIEQISEFSKRVILADANLDKVLSAYNKHRDKPIREQAENIIHLFTLTNLGAPAAFKYFDTTIDRKRYTSTKEVLDATLIHQSITGLYETRIDLSQLGGDGGGGSGGSGGSGGSGGSGGSGGVLNLEEEYRLHEKPVPSSIDPSWLQLFPTVWAERAGMGLANQVPPVVVELRSGASPVAVRQYPMSKEAREGIRPHIQRFLDLGVLVPCQSPWNTPLLPVKKPGTNDYRPVQDLREINKRVQDIHPTVPNPYNLLSSLPPSHTWYSVLDLKDAFFCLKLHPNSQPLFAFEWRDPEKGNTGQLTWTRLPQGFKNSPTLFNEALHRDLAPFRALNPQVVLLQYVDDLLVAAPTYRDCKEGTQKLLQELSKLGYRVSAKKAQLCQKEVTYLGYLLKEGKRWLTPARKATVMKIPPPTTPRQVREFLGTAGFCRLWIPGFASLAAPLYPLTKPSIPFIWTEEHQKAFDRIKEALLSAPALALPDLTKPFTLYVDERAGVARGVLTQTLGPWRRPVAYLSKKLDPVASGWPTCLKAVAAVALLLKDADKLTLGQNVTVIASHSLESIVRQPPDRWMTNARMTHYQSLLLNERVSFAPPAVLNPATLLPVESEATPVHRCSEILAEETGTRRDLKDQPLPGVPAWYTDGSSFIAEGKRRAGAAIVDGKRTVWASSLPEGTSAQKAELVALTQALRLAEGKDINIYTDSRYAFATAHIHGAIYKQRGWLTSAGKDIKNKEEILALLEAIHLPKRVAIIHCPGHQKGNDPVATGNRRADEAAKQAALSTRVLAETTKPAGKRTADGSEFEKRTADGSEFESPKKKAKVE

SEQ ID NO: 6107 - protein, 2103 aa, synthetic construct
MPAAKRVKLDGGDKKYSIGLDIGTNSVGWAVITDEYKVPSKKFKVLGNTDRHSIKKNLIGALLFDSGETAEATRLKRTARRRYTRRKNRICYLQEIFSNEMAKVDDSFFHRLEESFLVEEDKKHERHPIFGNIVDEVAYHEKYPTIYHLRKKLVDSTDKADLRLIYLALAHMIKFRGHFLIEGDLNPDNSDVDKLFIQLVQTYNQLFEENPINASGVDAKAILSARLSKSRRLENLIAQLPGEKKNGLFGNLIALSLGLTPNFKSNFDLAEDAKLQLSKDTYDDDLDNLLAQIGDQYADLFLAAKNLSDAILLSDILRVNTEITKAPLSASMIKRYDEHHQDLTLLKALVRQQLPEKYKEIFFDQSKNGYAGYIDGGASQEEFYKFIKPILEKMDGTEELLVKLNREDLLRKQRTFDNGSIPHQIHLGELHAILRRQEDFYPFLKDNREKIEKILTFRIPYYVGPLARGNSRFAWMTRKSEETITPWNFEEVVDKGASAQSFIERMTNFDKNLPNEKVLPKHSLLYEYFTVYNELTKVKYVTEGMRKPAFLSGEQKKAIVDLLFKTNRKVTVKQLKEDYFKKIECFDSVEISGVEDRFNASLGTYHDLLKIIKDKDFLDNEENEDILEDIVLTLTLFEDREMIEERLKTYAHLFDDKVMKQLKRRRYTGWGRLSRKLINGIRDKQSGKTILDFLKSDGFANRNFMQLIHDDSLTFKEDIQKAQVSGQGDSLHEHIANLAGSPAIKKGILQTVKVVDELVKVMGRHKPENIVIEMARENQTTQKGQKNSRERMKRIEEGIKELGSQILKEHPVENTQLQNEKLYLYYLQNGRDMYVDQELDINRLSDYDVDHIVPQSFLKDDSIDNKVLTRSDKARGKSDNVPSEEVVKKMKNYWRQLLNAKLITQRKFDNLTKAERGGLSELDKAGFIKRQLVETRQITKHVAQILDSRMNTKYDENDKLIREVKVITLKSKLVSDFRKDFQFYKVREINNYHHAHDAYLNAVVGTALIKKYPKLESEFVYGDYKVYDVRKMIAKSEQEIGKATAKYFFYSNIMNFFKTEITLANGEIRKRPLIETNGETGEIVWDKGRDFATVRKVLSMPQVNIVKKTEVQTGGFSKESILPKRNSDKLIARKKDWDPKKYGGFDSPTVAYSVLVVAKVEKGKSKKLKSVKELLGITIMERSSFEKNPIDFLEAKGYKEVKKDLIIKLPKYSLFELENGRKRMLASAGELQKGNELALPSKYVNFLYLASHYEKLKGSPEDNEQKQLFVEQHKHYLDEIIEQISEFSKRVILADANLDKVLSAYNKHRDKPIREQAENIIHLFTLTNLGAPAAFKYFDTTIDRKRYTSTKEVLDATLIHQSITGLYETRIDLSQLGGDGGGGSGGSGGSGGSGGSGGSGGTLNIEDEYRLHETSKEPDVPLGSTWLSDFPQAWAETGGMGLAVRQAPLIIPLKATSTPVSIKQYPMSQEARLGIKPHIQRLLDQGILVPCQSPWNTPLLPVKKPGTNDYRPVQDLREVNKRVEDIHPTVPNPYNLLSGLPPSHQWYTVLDLKDAFFCLRLHPTSQPLFAFEWRDPEMGISGQLTWTRLPQGFKNSPTLFNEALHRDLADFRIQHPDLILLQYVDDLLLAATSEQDCQRGTRALLQTLGNLGYRASAKKAQICQKQVKYLGYLLKEGQRWLTEARKETVMGQPTPKTPRQLREFLGKAGFCRLFIPGFAEMAAPLYPLTKPGTLFNWGPDQQKAYQEIKQALLTAPALGLPDLTKPFELFVDEKQGYAKGVLTQKLGPWRRPVAYLSKKLDPVAAGWPPCLRMVAAIAVLTKDAGKLTMGQPLVILAPHAVEALVKQPPDRWLSNARMTHYQAMLLDTDRVQFGPVVALNPATLLPLPEKEAPHDCLEILAETHGTRPDLTDQPIPDADYTWYTDGSSFLQEGQRRAGAAVTTETEVIWARALPAGTSAQRAELIALTQALKMAEGKKLNVYTDSRYAFATAHVHGEIYRRRGWLTSEGREIKNKNEILALLKALFLPKRLSIIHCPGHQKGNSAEARGNRMADQAAREAAMKAVLETSTLLAGKRTADGSEFEKRTADGSEFESPKKKAKVE

SEQ ID NO: 6108 - protein, 2092 aa, synthetic construct
MPAAKRVKLDGGDKKYSIGLDIGTNSVGWAVITDEYKVPSKKFKVLGNTDRHSIKKNLIGALLFDSGETAEATRLKRTARRRYTRRKNRICYLQEIFSNEMAKVDDSFFHRLEESFLVEEDKKHERHPIFGNIVDEVAYHEKYPTIYHLRKKLVDSTDKADLRLIYLALAHMIKFRGHFLIEGDLNPDNSDVDKLFIQLVQTYNQLFEENPINASGVDAKAILSARLSKSRRLENLIAQLPGEKKNGLFGNLIALSLGLTPNFKSNFDLAEDAKLQLSKDTYDDDLDNLLAQIGDQYADLFLAAKNLSDAILLSDILRVNTEITKAPLSASMIKRYDEHHQDLTLLKALVRQQLPEKYKEIFFDQSKNGYAGYIDGGASQEEFYKFIKPILEKMDGTEELLVKLNREDLLRKQRTFDNGSIPHQIHLGELHAILRRQEDFYPFLKDNREKIEKILTFRIPYYVGPLARGNSRFAWMTRKSEETITPWNFEEVVDKGASAQSFIERMTNFDKNLPNEKVLPKHSLLYEYFTVYNELTKVKYVTEGMRKPAFLSGEQKKAIVDLLFKTNRKVTVKQLKEDYFKKIECFDSVEISGVEDRFNASLGTYHDLLKIIKDKDFLDNEENEDILEDIVLTLTLFEDREMIEERLKTYAHLFDDKVMKQLKRRRYTGWGRLSRKLINGIRDKQSGKTILDFLKSDGFANRNFMQLIHDDSLTFKEDIQKAQVSGQGDSLHEHIANLAGSPAIKKGILQTVKVVDELVKVMGRHKPENIVIEMARENQTTQKGQKNSRERMKRIEEGIKELGSQILKEHPVENTQLQNEKLYLYYLQNGRDMYVDQELDINRLSDYDVDHIVPQSFLKDDSIDNKVLTRSDKARGKSDNVPSEEVVKKMKNYWRQLLNAKLITQRKFDNLTKAERGGLSELDKAGFIKRQLVETRQITKHVAQILDSRMNTKYDENDKLIREVKVITLKSKLVSDFRKDFQFYKVREINNYHHAHDAYLNAVVGTALIKKYPKLESEFVYGDYKVYDVRKMIAKSEQEIGKATAKYFFYSNIMNFFKTEITLANGEIRKRPLIETNGETGEIVWDKGRDFATVRKVLSMPQVNIVKKTEVQTGGFSKESILPKRNSDKLIARKKDWDPKKYGGFDSPTVAYSVLVVAKVEKGKSKKLKSVKELLGITIMERSSFEKNPIDFLEAKGYKEVKKDLIIKLPKYSLFELENGRKRMLASAGELQKGNELALPSKYVNFLYLASHYEKLKGSPEDNEQKQLFVEQHKHYLDEIIEQISEFSKRVILADANLDKVLSAYNKHRDKPIREQAENIIHLFTLTNLGAPAAFKYFDTTIDRKRYTSTKEVLDATLIHQSITGLYETRIDLSQLGGDGGGGGGSGGTAPLEEEYRLFLEAPIQNVTLLEQWKREIPKVWAEINPPGLASTQAPIHVQLLSTALPVRVRQYPITLEAKRSLRETIRKFRAAGILRPVHSPWNTPLLPVRKSGTSEYRMVQDLREVNKRVETIHPTVPNPYTLLSLLPPDRIWYSVLDLKDAFFCIPLAPESQLIFAFEWADAEEGESGQLTWTRLPQGFKNSPTLFNEALNRDLQGFRLDHPSVSLLQYVDDLLIAADTQAACLSATRDLLMTLAELGYRVSGKKAQLCQEEVTYLGFKIHKGSRSLSNSRTQAILQIPVPKTKRQVREFLGKIGYCRLFIPGFAELAQPLYAATRPGNDPLVWGEKEEEAFQSLKLALTQPPALALPSLDKPFQLFVEETSGAAKGVLTQALGPWKRPVAYLSKRLDPVAAGWPRCLRAIAAAALLTREASKLTFGQDIEITSSHNLESLLRSPPDKWLTNARITQYQVLLLDPPRVRFKQTAALNPATLLPETDDTLPIHHCLDTLDSLTSTRPDLTDQPLAQAEATLFTDGSSYIRDGKRYAGAAVVTLDSVIWAEPLPIGTSAQKAELIALTKALEWSKDKSVNIYTDSRYAFATLHVHGMIYRERGWLTAGGKAIKNAPEILALLTAVWLPKRVAVMHCKGHQKDDAPTSTGNRRADEVAREVAIRPLSTQATISAGKRTADGSEFEKRTADGSEFESPKKKAKVE

SEQ ID NO: 6109 - protein, 2081 aa, synthetic construct
MPAAKRVKLDGGDKKYSIGLDIGTNSVGWAVITDEYKVPSKKFKVLGNTDRHSIKKNLIGALLFDSGETAEATRLKRTARRRYTRRKNRICYLQEIFSNEMAKVDDSFFHRLEESFLVEEDKKHERHPIFGNIVDEVAYHEKYPTIYHLRKKLVDSTDKADLRLIYLALAHMIKFRGHFLIEGDLNPDNSDVDKLFIQLVQTYNQLFEENPINASGVDAKAILSARLSKSRRLENLIAQLPGEKKNGLFGNLIALSLGLTPNFKSNFDLAEDAKLQLSKDTYDDDLDNLLAQIGDQYADLFLAAKNLSDAILLSDILRVNTEITKAPLSASMIKRYDEHHQDLTLLKALVRQQLPEKYKEIFFDQSKNGYAGYIDGGASQEEFYKFIKPILEKMDGTEELLVKLNREDLLRKQRTFDNGSIPHQIHLGELHAILRRQEDFYPFLKDNREKIEKILTFRIPYYVGPLARGNSRFAWMTRKSEETITPWNFEEVVDKGASAQSFIERMTNFDKNLPNEKVLPKHSLLYEYFTVYNELTKVKYVTEGMRKPAFLSGEQKKAIVDLLFKTNRKVTVKQLKEDYFKKIECFDSVEISGVEDRFNASLGTYHDLLKIIKDKDFLDNEENEDILEDIVLTLTLFEDREMIEERLKTYAHLFDDKVMKQLKRRRYTGWGRLSRKLINGIRDKQSGKTILDFLKSDGFANRNFMQLIHDDSLTFKEDIQKAQVSGQGDSLHEHIANLAGSPAIKKGILQTVKVVDELVKVMGRHKPENIVIEMARENQTTQKGQKNSRERMKRIEEGIKELGSQILKEHPVENTQLQNEKLYLYYLQNGRDMYVDQELDINRLSDYDVDHIVPQSFLKDDSIDNKVLTRSDKARGKSDNVPSEEVVKKMKNYWRQLLNAKLITQRKFDNLTKAERGGLSELDKAGFIKRQLVETRQITKHVAQILDSRMNTKYDENDKLIREVKVITLKSKLVSDFRKDFQFYKVREINNYHHAHDAYLNAVVGTALIKKYPKLESEFVYGDYKVYDVRKMIAKSEQEIGKATAKYFFYSNIMNFFKTEITLANGEIRKRPLIETNGETGEIVWDKGRDFATVRKVLSMPQVNIVKKTEVQTGGFSKESILPKRNSDKLIARKKDWDPKKYGGFDSPTVAYSVLVVAKVEKGKSKKLKSVKELLGITIMERSSFEKNPIDFLEAKGYKEVKKDLIIKLPKYSLFELENGRKRMLASAGELQKGNELALPSKYVNFLYLASHYEKLKGSPEDNEQKQLFVEQHKHYLDEIIEQISEFSKRVILADANLDKVLSAYNKHRDKPIREQAENIIHLFTLTNLGAPAAFKYFDTTIDRKRYTSTKEVLDATLIHQSITGLYETRIDLSQLGGDGGGGGGSGGVPWILKKPLELTIKLDLEEQQGTLLNNSILSKKGKEELKQLFEKYSALWQSWENQVGHRRIRPHKIATGTVKPTPQKQYHINPKAKPDIQIVINDLLKQGVLIQKESTMNTPVYPVPKPNGRWRMVLDYRAVNKVTPLIAVQNQHSYGILGSLFKGRYKTTIDLSNGFWAHPIVPEDYWITAFTWQGKQYCWTVLPQGFLNSPGLFTGDVVDLLQGIPNVEVYVDDVYISHDSEKEHLEYLDILFNRLKEAGYIISLKKSNIANSIVDFLGFQITNEGRGLTDTFKEKLENITAPTTLKQLQSILGLLNFARNFIPDFTELIAPLYALIPKSTKNYVPWQIEHSTTLETLITKLNGAEYLQGRKGDKTLIMKVNASYTTGYIRYYNEGEKKPISYVSIVFSKTELKFTELEKLLTTVHKGLLKALDLSMGQNIHVYSPIVSMQNIQKTPQTAKKALASRWLSWLSYLEDPRIRFFYDPQMPALKDLPAVDTGKDNKKHPSNFQHIFYTDGSAITSPTKEGHLNAGMGIVYFINKDGNLQKQQEWSISLGNHTAQFAEIAAFEFALKKCLPLGGNILVVTDSNYVAKAYNEELDVWASNGFVNNRKKPLKHISKWKSVADLKRLRPDVVVTHEPGHQKLDSSPHAYGNNLADQLATQASFKVHAGKRTADGSEFEKRTADGSEFESPKKKAKVE

SEQ ID NO: 6110 - protein, 2088 aa, synthetic construct
MPAAKRVKLDGGDKKYSIGLDIGTNSVGWAVITDEYKVPSKKFKVLGNTDRHSIKKNLIGALLFDSGETAEATRLKRTARRRYTRRKNRICYLQEIFSNEMAKVDDSFFHRLEESFLVEEDKKHERHPIFGNIVDEVAYHEKYPTIYHLRKKLVDSTDKADLRLIYLALAHMIKFRGHFLIEGDLNPDNSDVDKLFIQLVQTYNQLFEENPINASGVDAKAILSARLSKSRRLENLIAQLPGEKKNGLFGNLIALSLGLTPNFKSNFDLAEDAKLQLSKDTYDDDLDNLLAQIGDQYADLFLAAKNLSDAILLSDILRVNTEITKAPLSASMIKRYDEHHQDLTLLKALVRQQLPEKYKEIFFDQSKNGYAGYIDGGASQEEFYKFIKPILEKMDGTEELLVKLNREDLLRKQRTFDNGSIPHQIHLGELHAILRRQEDFYPFLKDNREKIEKILTFRIPYYVGPLARGNSRFAWMTRKSEETITPWNFEEVVDKGASAQSFIERMTNFDKNLPNEKVLPKHSLLYEYFTVYNELTKVKYVTEGMRKPAFLSGEQKKAIVDLLFKTNRKVTVKQLKEDYFKKIECFDSVEISGVEDRFNASLGTYHDLLKIIKDKDFLDNEENEDILEDIVLTLTLFEDREMIEERLKTYAHLFDDKVMKQLKRRRYTGWGRLSRKLINGIRDKQSGKTILDFLKSDGFANRNFMQLIHDDSLTFKEDIQKAQVSGQGDSLHEHIANLAGSPAIKKGILQTVKVVDELVKVMGRHKPENIVIEMARENQTTQKGQKNSRERMKRIEEGIKELGSQILKEHPVENTQLQNEKLYLYYLQNGRDMYVDQELDINRLSDYDVDHIVPQSFLKDDSIDNKVLTRSDKARGKSDNVPSEEVVKKMKNYWRQLLNAKLITQRKFDNLTKAERGGLSELDKAGFIKRQLVETRQITKHVAQILDSRMNTKYDENDKLIREVKVITLKSKLVSDFRKDFQFYKVREINNYHHAHDAYLNAVVGTALIKKYPKLESEFVYGDYKVYDVRKMIAKSEQEIGKATAKYFFYSNIMNFFKTEITLANGEIRKRPLIETNGETGEIVWDKGRDFATVRKVLSMPQVNIVKKTEVQTGGFSKESILPKRNSDKLIARKKDWDPKKYGGFDSPTVAYSVLVVAKVEKGKSKKLKSVKELLGITIMERSSFEKNPIDFLEAKGYKEVKKDLIIKLPKYSLFELENGRKRMLASAGELQKGNELALPSKYVNFLYLASHYEKLKGSPEDNEQKQLFVEQHKHYLDEIIEQISEFSKRVILADANLDKVLSAYNKHRDKPIREQAENIIHLFTLTNLGAPAAFKYFDTTIDRKRYTSTKEVLDATLIHQSITGLYETRIDLSQLGGDGGGGGGSGGVLNLEEEYRLHEKPVPSSIDPSWLQLFPTVWAERAGMGLANQVPPVVVELRSGASPVAVRQYPMSKEAREGIRPHIQKFLDLGVLVPCRSPWNTPLLPVKKPGTNDYRPVQDLREINKRVQDIHPTVPNPYNLLSSLPPSYTWYSVLDLKDAFFCLRLHPNSQPLFAFEWKDPEKGNTGQLTWTRLPQGFKNSPTLFNEALHRDLAPFRALNPQVVLLQYVDDLLVAAPTYEDCKKGTQKLLQELSKLGYRVSAKKAQLCQREVTYLGYLLKEGKRWLTPARKATVMKIPVPTTPRQVREFLGTAGFCRLWIPGFASLAAPLYPLTKPSIPFIWTEEHQQAFDHIKKALLSAPALALPDLTKPFTLYIDERAGVARGVLTQTLGPWRRPVAYLSKKLDPVASGWPTCLKAVAAVALLLKDADKLTLGQNVTVIASHSLESIVRQPPDRWMTNARMTHYQSLLLNERVSFAPPAVLNPATLLPVESEATPVHRCSEILAEETGTRRDLEDQPLPGVPTWYTDGSSFITEGKRRAGAPIVDGKRTVWASSLPEGTSAQKAELVALTQALRLAEGKNINIYTDSRYAFATAHIHGAIYKQRGWLTSAGKDIKNKEEILALLEAIHLPRRVAIIHCPGHQRGSNPVATGNRRADEAAKQAALSTRVLAGTTKPAGKRTADGSEFEKRTADGSEFESPKKKAKVE

SEQ ID NO: 6111 - protein, 2090 aa, synthetic construct
MPAAKRVKLDGGDKKYSIGLDIGTNSVGWAVITDEYKVPSKKFKVLGNTDRHSIKKNLIGALLFDSGETAEATRLKRTARRRYTRRKNRICYLQEIFSNEMAKVDDSFFHRLEESFLVEEDKKHERHPIFGNIVDEVAYHEKYPTIYHLRKKLVDSTDKADLRLIYLALAHMIKFRGHFLIEGDLNPDNSDVDKLFIQLVQTYNQLFEENPINASGVDAKAILSARLSKSRRLENLIAQLPGEKKNGLFGNLIALSLGLTPNFKSNFDLAEDAKLQLSKDTYDDDLDNLLAQIGDQYADLFLAAKNLSDAILLSDILRVNTEITKAPLSASMIKRYDEHHQDLTLLKALVRQQLPEKYKEIFFDQSKNGYAGYIDGGASQEEFYKFIKPILEKMDGTEELLVKLNREDLLRKQRTFDNGSIPHQIHLGELHAILRRQEDFYPFLKDNREKIEKILTFRIPYYVGPLARGNSRFAWMTRKSEETITPWNFEEVVDKGASAQSFIERMTNFDKNLPNEKVLPKHSLLYEYFTVYNELTKVKYVTEGMRKPAFLSGEQKKAIVDLLFKTNRKVTVKQLKEDYFKKIECFDSVEISGVEDRFNASLGTYHDLLKIIKDKDFLDNEENEDILEDIVLTLTLFEDREMIEERLKTYAHLFDDKVMKQLKRRRYTGWGRLSRKLINGIRDKQSGKTILDFLKSDGFANRNFMQLIHDDSLTFKEDIQKAQVSGQGDSLHEHIANLAGSPAIKKGILQTVKVVDELVKVMGRHKPENIVIEMARENQTTQKGQKNSRERMKRIEEGIKELGSQILKEHPVENTQLQNEKLYLYYLQNGRDMYVDQELDINRLSDYDVDHIVPQSFLKDDSIDNKVLTRSDKARGKSDNVPSEEVVKKMKNYWRQLLNAKLITQRKFDNLTKAERGGLSELDKAGFIKRQLVETRQITKHVAQILDSRMNTKYDENDKLIREVKVITLKSKLVSDFRKDFQFYKVREINNYHHAHDAYLNAVVGTALIKKYPKLESEFVYGDYKVYDVRKMIAKSEQEIGKATAKYFFYSNIMNFFKTEITLANGEIRKRPLIETNGETGEIVWDKGRDFATVRKVLSMPQVNIVKKTEVQTGGFSKESILPKRNSDKLIARKKDWDPKKYGGFDSPTVAYSVLVVAKVEKGKSKKLKSVKELLGITIMERSSFEKNPIDFLEAKGYKEVKKDLIIKLPKYSLFELENGRKRMLASAGELQKGNELALPSKYVNFLYLASHYEKLKGSPEDNEQKQLFVEQHKHYLDEIIEQISEFSKRVILADANLDKVLSAYNKHRDKPIREQAENIIHLFTLTNLGAPAAFKYFDTTIDRKRYTSTKEVLDATLIHQSITGLYETRIDLSQLGGDGGGGGGSGGTLNIEDEYRLHETSKEPDVSLGSTWLSDFPQAWAETGGMGLAVRQAPLIIPLKATSTPVSIKQYPMSQEARLGIKPHIQRLLDQGILVPCQSPWNTPLLPVKKPGTNDYRPVQDLREVNKRVEDIHPTVPNPYNLLSGLPPSHQWYTVLDLKDAFFCLRLHPTSQPLFAFEWRDPEMGISGQLTWTRLPQGFKNSPTLFDEALHRDLAGFRIQHPDLILLQYVDDLLLAATSELDCQQGTRALLQTLGDLGYRASAKKAQICQKQVKYLGYLLKEGQRWLTEARKETVMGQPIPKTPRQLREFLGTAGFCRLWIPGFAEMAAPLYPLTKTGTLFNWGPDQQKAFQEIKQALLTAPALGLPDLTKPFELFVDEKQGYAKGVLTQKLGPWRRPVAYLSKKLDPVAAGWPPCLRMVAAIAVLTKDAGKLTMGQPLVILAPHAVEALVKQPPDRWLSNARMTHYQALLLDTDRVQFGPVVALNPATLLPLPEEGLQHDCLDILAEAHGTRSDLMDQPLPDADHTWYTDGSSFLQEGQRKAGAAVTTETEVIWARALPAGTSAQRAELIALTQALKMAEGKKLNVYTDSRYAFATAHIHGEIYRRRGLLTSEGKEIKNKDEILALLKALFLPKRLSIIHCPGHQKGNSAEARGNRMADQAAREVATRETPETSTLLAGKRTADGSEFEKRTADGSEFESPKKKAKVE

SEQ ID NO: 6112 - protein, 2090 aa, synthetic construct
MPAAKRVKLDGGDKKYSIGLDIGTNSVGWAVITDEYKVPSKKFKVLGNTDRHSIKKNLIGALLFDSGETAEATRLKRTARRRYTRRKNRICYLQEIFSNEMAKVDDSFFHRLEESFLVEEDKKHERHPIFGNIVDEVAYHEKYPTIYHLRKKLVDSTDKADLRLIYLALAHMIKFRGHFLIEGDLNPDNSDVDKLFIQLVQTYNQLFEENPINASGVDAKAILSARLSKSRRLENLIAQLPGEKKNGLFGNLIALSLGLTPNFKSNFDLAEDAKLQLSKDTYDDDLDNLLAQIGDQYADLFLAAKNLSDAILLSDILRVNTEITKAPLSASMIKRYDEHHQDLTLLKALVRQQLPEKYKEIFFDQSKNGYAGYIDGGASQEEFYKFIKPILEKMDGTEELLVKLNREDLLRKQRTFDNGSIPHQIHLGELHAILRRQEDFYPFLKDNREKIEKILTFRIPYYVGPLARGNSRFAWMTRKSEETITPWNFEEVVDKGASAQSFIERMTNFDKNLPNEKVLPKHSLLYEYFTVYNELTKVKYVTEGMRKPAFLSGEQKKAIVDLLFKTNRKVTVKQLKEDYFKKIECFDSVEISGVEDRFNASLGTYHDLLKIIKDKDFLDNEENEDILEDIVLTLTLFEDREMIEERLKTYAHLFDDKVMKQLKRRRYTGWGRLSRKLINGIRDKQSGKTILDFLKSDGFANRNFMQLIHDDSLTFKEDIQKAQVSGQGDSLHEHIANLAGSPAIKKGILQTVKVVDELVKVMGRHKPENIVIEMARENQTTQKGQKNSRERMKRIEEGIKELGSQILKEHPVENTQLQNEKLYLYYLQNGRDMYVDQELDINRLSDYDVDHIVPQSFLKDDSIDNKVLTRSDKARGKSDNVPSEEVVKKMKNYWRQLLNAKLITQRKFDNLTKAERGGLSELDKAGFIKRQLVETRQITKHVAQILDSRMNTKYDENDKLIREVKVITLKSKLVSDFRKDFQFYKVREINNYHHAHDAYLNAVVGTALIKKYPKLESEFVYGDYKVYDVRKMIAKSEQEIGKATAKYFFYSNIMNFFKTEITLANGEIRKRPLIETNGETGEIVWDKGRDFATVRKVLSMPQVNIVKKTEVQTGGFSKESILPKRNSDKLIARKKDWDPKKYGGFDSPTVAYSVLVVAKVEKGKSKKLKSVKELLGITIMERSSFEKNPIDFLEAKGYKEVKKDLIIKLPKYSLFELENGRKRMLASAGELQKGNELALPSKYVNFLYLASHYEKLKGSPEDNEQKQLFVEQHKHYLDEIIEQISEFSKRVILADANLDKVLSAYNKHRDKPIREQAENIIHLFTLTNLGAPAAFKYFDTTIDRKRYTSTKEVLDATLIHQSITGLYETRIDLSQLGGDGGGGGGSGGTLNIEDEYRLHETSKEPDVSLGSTWLSDFPQAWAETGGMGLAVRQAPLIIPLKATSTPVSIKQYPMSQEARLGIKPHIQRLLDQGILVPCQSPWNTPLLPVKKPGTNDYRPVQDLREVNKRVEDIHPTVPNPYNLLSGLPPSHQWYTVLDLKDAFFCLRLHPTSQPLFAFEWRDPEMGISGQLTWTRLPQGFKNSPTLFNEALHRDLAGFRIQHPDLILLQYVDDLLLAATSELDCQQGTRALLQTLGDLGYRASAKKAQICQKQVKYLGYLLKEGQRWLTEARKETVMGQPIPKTPRQLREFLGTAGFCRLWIPGFAEMAAPLYPLTKPGTLFNWGPDQQKAFQEIKQALLTAPALGLPDLTKPFELFVDEKQGYAKGVLTQKLGPWRRPVAYLSKKLDPVAAGWPPCLRMVAAIAVLTKDAGKLTMGQPLVILAPHAVEALVKQPPDRWLSNARMTHYQALLLDTDRVQFGPVVALNPATLLPLPEEGLQHDCLDILAEAHGTRSDLMDQPLPDADHTWYTDGSSFLQEGQRKAGAAVTTETEVIWARALPAGTSAQRAELIALTQALKMAEGKKLNVYTDSRYAFATAHIHGEIYRRRGWLTSEGKEIKNKDEILALLKALFLPKRLSIIHCPGHQKGNSAEARGNRMADQAAREVATRETPETSTLLAGKRTADGSEFEKRTADGSEFESPKKKAKVE

SEQ ID NO: 6113 - protein, 2110 aa, synthetic construct
MPAAKRVKLDGGDKKYSIGLDIGTNSVGWAVITDEYKVPSKKFKVLGNTDRHSIKKNLIGALLFDSGETAEATRLKRTARRRYTRRKNRICYLQEIFSNEMAKVDDSFFHRLEESFLVEEDKKHERHPIFGNIVDEVAYHEKYPTIYHLRKKLVDSTDKADLRLIYLALAHMIKFRGHFLIEGDLNPDNSDVDKLFIQLVQTYNQLFEENPINASGVDAKAILSARLSKSRRLENLIAQLPGEKKNGLFGNLIALSLGLTPNFKSNFDLAEDAKLQLSKDTYDDDLDNLLAQIGDQYADLFLAAKNLSDAILLSDILRVNTEITKAPLSASMIKRYDEHHQDLTLLKALVRQQLPEKYKEIFFDQSKNGYAGYIDGGASQEEFYKFIKPILEKMDGTEELLVKLNREDLLRKQRTFDNGSIPHQIHLGELHAILRRQEDFYPFLKDNREKIEKILTFRIPYYVGPLARGNSRFAWMTRKSEETITPWNFEEVVDKGASAQSFIERMTNFDKNLPNEKVLPKHSLLYEYFTVYNELTKVKYVTEGMRKPAFLSGEQKKAIVDLLFKTNRKVTVKQLKEDYFKKIECFDSVEISGVEDRFNASLGTYHDLLKIIKDKDFLDNEENEDILEDIVLTLTLFEDREMIEERLKTYAHLFDDKVMKQLKRRRYTGWGRLSRKLINGIRDKQSGKTILDFLKSDGFANRNFMQLIHDDSLTFKEDIQKAQVSGQGDSLHEHIANLAGSPAIKKGILQTVKVVDELVKVMGRHKPENIVIEMARENQTTQKGQKNSRERMKRIEEGIKELGSQILKEHPVENTQLQNEKLYLYYLQNGRDMYVDQELDINRLSDYDVDHIVPQSFLKDDSIDNKVLTRSDKARGKSDNVPSEEVVKKMKNYWRQLLNAKLITQRKFDNLTKAERGGLSELDKAGFIKRQLVETRQITKHVAQILDSRMNTKYDENDKLIREVKVITLKSKLVSDFRKDFQFYKVREINNYHHAHDAYLNAVVGTALIKKYPKLESEFVYGDYKVYDVRKMIAKSEQEIGKATAKYFFYSNIMNFFKTEITLANGEIRKRPLIETNGETGEIVWDKGRDFATVRKVLSMPQVNIVKKTEVQTGGFSKESILPKRNSDKLIARKKDWDPKKYGGFDSPTVAYSVLVVAKVEKGKSKKLKSVKELLGITIMERSSFEKNPIDFLEAKGYKEVKKDLIIKLPKYSLFELENGRKRMLASAGELQKGNELALPSKYVNFLYLASHYEKLKGSPEDNEQKQLFVEQHKHYLDEIIEQISEFSKRVILADANLDKVLSAYNKHRDKPIREQAENIIHLFTLTNLGAPAAFKYFDTTIDRKRYTSTKEVLDATLIHQSITGLYETRIDLSQLGGDGGGGGGSGGVQEISDSRPMLHIYLNGRRFLGLLDTGADKTCIAGRDWPANWPIHQTESSLQGLGMACGVARSSQPLRWQHEDKSGIIHPFVIPTLPFTLWGRDIMKDIKVRLMTDSPDDSQDLMIGAIESNLFADQISWKSDQPVWLNQWPLKQEKLQALQQLVTEQLQLGHLEESNSPWNTPVFVIKKKSGKWRLLQDLRAVNATMHDMGALQPGLPSPVAVPKGWEIIIIDLQDCFFNIKLHPEDCKRFAFSVPSPNFKRPYQRFQWKVLPQGMKNSPTLCQKFVDKAILTVRDKYQDSYIVHYMDDILLAHPSRSIVDEILTSMIQALNKHGLVVSTEKIQKYDNLKYLGTHIQGDSVSYQKLQIRTDKLRTLNDFQKLLGNINWIRPFLKLTTGELKPLFEILNGDSNPISTRKLTPEACKALQLMNERLSTARVKRLDLSQPWSLCILKTEYTPTACLWQDGVVEWIHLPHISPKVITPYDIFCTQLIIKGRHRSKELFSKDPDYIVVPYTKVQFDLLLQEKEDWPISLLGFLGEVHFHLPKDPLLTFTLQTAIIFPHMTSTTPLEKGIVIFTDGSANGRSVTYIQGREPIIKENTQNTAQQAEIVAVITAFEEVSQPFNLYTDSKYVTGLFPEIETATLSPRTKIYTELKHLQRLIHKRQEKFYIGHIRGHTGLPGPLAQGNAYADSLTRILTAAGKRTADGSEFEKRTADGSEFESPKKKAKVE

SEQ ID NO: 6114 - protein, 2170 aa, synthetic construct
MPAAKRVKLDGGDKKYSIGLDIGTNSVGWAVITDEYKVPSKKFKVLGNTDRHSIKKNLIGALLFDSGETAEATRLKRTARRRYTRRKNRICYLQEIFSNEMAKVDDSFFHRLEESFLVEEDKKHERHPIFGNIVDEVAYHEKYPTIYHLRKKLVDSTDKADLRLIYLALAHMIKFRGHFLIEGDLNPDNSDVDKLFIQLVQTYNQLFEENPINASGVDAKAILSARLSKSRRLENLIAQLPGEKKNGLFGNLIALSLGLTPNFKSNFDLAEDAKLQLSKDTYDDDLDNLLAQIGDQYADLFLAAKNLSDAILLSDILRVNTEITKAPLSASMIKRYDEHHQDLTLLKALVRQQLPEKYKEIFFDQSKNGYAGYIDGGASQEEFYKFIKPILEKMDGTEELLVKLNREDLLRKQRTFDNGSIPHQIHLGELHAILRRQEDFYPFLKDNREKIEKILTFRIPYYVGPLARGNSRFAWMTRKSEETITPWNFEEVVDKGASAQSFIERMTNFDKNLPNEKVLPKHSLLYEYFTVYNELTKVKYVTEGMRKPAFLSGEQKKAIVDLLFKTNRKVTVKQLKEDYFKKIECFDSVEISGVEDRFNASLGTYHDLLKIIKDKDFLDNEENEDILEDIVLTLTLFEDREMIEERLKTYAHLFDDKVMKQLKRRRYTGWGRLSRKLINGIRDKQSGKTILDFLKSDGFANRNFMQLIHDDSLTFKEDIQKAQVSGQGDSLHEHIANLAGSPAIKKGILQTVKVVDELVKVMGRHKPENIVIEMARENQTTQKGQKNSRERMKRIEEGIKELGSQILKEHPVENTQLQNEKLYLYYLQNGRDMYVDQELDINRLSDYDVDHIVPQSFLKDDSIDNKVLTRSDKARGKSDNVPSEEVVKKMKNYWRQLLNAKLITQRKFDNLTKAERGGLSELDKAGFIKRQLVETRQITKHVAQILDSRMNTKYDENDKLIREVKVITLKSKLVSDFRKDFQFYKVREINNYHHAHDAYLNAVVGTALIKKYPKLESEFVYGDYKVYDVRKMIAKSEQEIGKATAKYFFYSNIMNFFKTEITLANGEIRKRPLIETNGETGEIVWDKGRDFATVRKVLSMPQVNIVKKTEVQTGGFSKESILPKRNSDKLIARKKDWDPKKYGGFDSPTVAYSVLVVAKVEKGKSKKLKSVKELLGITIMERSSFEKNPIDFLEAKGYKEVKKDLIIKLPKYSLFELENGRKRMLASAGELQKGNELALPSKYVNFLYLASHYEKLKGSPEDNEQKQLFVEQHKHYLDEIIEQISEFSKRVILADANLDKVLSAYNKHRDKPIREQAENIIHLFTLTNLGAPAAFKYFDTTIDRKRYTSTKEVLDATLIHQSITGLYETRIDLSQLGGDGGGGGGSGGMDPLQLLQPLEAEIKGTKLKAHWNSGATITCVPEAFLEDERPIQTMLIKTIHGEKQQDVYYLTFKVQGRKVEAEVLASPYDYILLNPSDVPWLMKKPLQLTVLVPLHEYQERLLQQTALPKEQKELLQKLFLKYDALWQHWENQVGHRRIKPHNIATGTLAPRPQKQYPINPKAKPSIQIVIDDLLKQGVLIQQNSTMNTPVYPVPKPDGKWRMVLDYREVNKTIPLIAAQNQHSAGILSSIYRGKYKTTLDLTNGFWAHPITPESYWLTAFTWQGKQYCWTRLPQGFLNSPALFNADVVDLLKEIPNVQAYVDDIYISHDDPQEHLEQLEKIFSILLNAGYVVSLKKSEIAQREVEFLGFNITKEGRGLTDTFKQKLLNITPPKDLKQLQSILGKLNFARNFIPNYSELVKPLYTIVAPANGKFISWTEDNSNQLQHIISVLNQADNLEERNPETRLIIKVNSSPSAGYIRYYNEGSKRPIMYVNYIFSKAEAKFTQTEKLLTTMHKGLIKAMDLAMGQEILVYSPIVSMTKIQRTPLPERKALPVRWITWMTYLEDPRIQFHYDKSLPELQQIPNVTEDVIAKTKHPSEFAMVFYTDGSAIKHPDVNKSHSAGMGIAQVQFIPEYKIVHQWSIPLGDHTAQLAEIAAVEFACKKALKISGPVLIVTDSFYVAESANKELPYWKSNGFLNNKKKPLRHVSKWKSIAECLQLKPDIIIMHEKGHQQPMTTLHTEGNNLADKLATQGSYVVHAGKRTADGSEFEKRTADGSEFESPKKKAKVE

SEQ ID NO: 6115 - protein, 2088 aa, synthetic construct
MPAAKRVKLDGGDKKYSIGLDIGTNSVGWAVITDEYKVPSKKFKVLGNTDRHSIKKNLIGALLFDSGETAEATRLKRTARRRYTRRKNRICYLQEIFSNEMAKVDDSFFHRLEESFLVEEDKKHERHPIFGNIVDEVAYHEKYPTIYHLRKKLVDSTDKADLRLIYLALAHMIKFRGHFLIEGDLNPDNSDVDKLFIQLVQTYNQLFEENPINASGVDAKAILSARLSKSRRLENLIAQLPGEKKNGLFGNLIALSLGLTPNFKSNFDLAEDAKLQLSKDTYDDDLDNLLAQIGDQYADLFLAAKNLSDAILLSDILRVNTEITKAPLSASMIKRYDEHHQDLTLLKALVRQQLPEKYKEIFFDQSKNGYAGYIDGGASQEEFYKFIKPILEKMDGTEELLVKLNREDLLRKQRTFDNGSIPHQIHLGELHAILRRQEDFYPFLKDNREKIEKILTFRIPYYVGPLARGNSRFAWMTRKSEETITPWNFEEVVDKGASAQSFIERMTNFDKNLPNEKVLPKHSLLYEYFTVYNELTKVKYVTEGMRKPAFLSGEQKKAIVDLLFKTNRKVTVKQLKEDYFKKIECFDSVEISGVEDRFNASLGTYHDLLKIIKDKDFLDNEENEDILEDIVLTLTLFEDREMIEERLKTYAHLFDDKVMKQLKRRRYTGWGRLSRKLINGIRDKQSGKTILDFLKSDGFANRNFMQLIHDDSLTFKEDIQKAQVSGQGDSLHEHIANLAGSPAIKKGILQTVKVVDELVKVMGRHKPENIVIEMARENQTTQKGQKNSRERMKRIEEGIKELGSQILKEHPVENTQLQNEKLYLYYLQNGRDMYVDQELDINRLSDYDVDHIVPQSFLKDDSIDNKVLTRSDKARGKSDNVPSEEVVKKMKNYWRQLLNAKLITQRKFDNLTKAERGGLSELDKAGFIKRQLVETRQITKHVAQILDSRMNTKYDENDKLIREVKVITLKSKLVSDFRKDFQFYKVREINNYHHAHDAYLNAVVGTALIKKYPKLESEFVYGDYKVYDVRKMIAKSEQEIGKATAKYFFYSNIMNFFKTEITLANGEIRKRPLIETNGETGEIVWDKGRDFATVRKVLSMPQVNIVKKTEVQTGGFSKESILPKRNSDKLIARKKDWDPKKYGGFDSPTVAYSVLVVAKVEKGKSKKLKSVKELLGITIMERSSFEKNPIDFLEAKGYKEVKKDLIIKLPKYSLFELENGRKRMLASAGELQKGNELALPSKYVNFLYLASHYEKLKGSPEDNEQKQLFVEQHKHYLDEIIEQISEFSKRVILADANLDKVLSAYNKHRDKPIREQAENIIHLFTLTNLGAPAAFKYFDTTIDRKRYTSTKEVLDATLIHQSITGLYETRIDLSQLGGDGGGGGGSGGVLNLEEEYRLHEKPVPSSIDPSWLQLFPTVWAERAGMGLANQVPPVVVELRSGASPVAVRQYPMSKEAREGIRPHIQRFLDLGVLVPCQSPWNTPLLPVKKPGTNDYRPVQDLREINKRVQDIHPTVPNPYNLLSSLPPSHTWYSVLDLKDAFFCLKLHPNSQPLFAFEWRDPEKGNTGQLTWTRLPQGFKNSPTLFNEALHRDLAPFRALNPQVVLLQYVDDLLVAAPTYRDCKEGTQKLLQELSKLGYRVSAKKAQLCQKEVTYLGYLLKEGKRWLTPARKATVMKIPPPTTPRQVREFLGTAGFCRLWIPGFASLAAPLYPLTKPSIPFIWTEEHQKAFDRIKEALLSAPALALPDLTKPFTLYVDERAGVARGVLTQTLGPWRRPVAYLSKKLDPVASGWPTCLKAVAAVALLLKDADKLTLGQNVTVIASHSLESIVRQPPDRWMTNARMTHYQSLLLNERVSFAPPAVLNPATLLPVESEATPVHRCSEILAEETGTRRDLKDQPLPGVPAWYTDGSSFIAEGKRRAGAAIVDGKRTVWASSLPEGTSAQKAELVALTQALRLAEGKDINIYTDSRYAFATAHIHGAIYKQRGWLTSAGKDIKNKEEILALLEAIHLPKRVAIIHCPGHQKGNDPVATGNRRADEAAKQAALSTRVLAETTKPAGKRTADGSEFEKRTADGSEFESPKKKAKVE

SEQ ID NO: 6116 - protein, 2088 aa, synthetic construct
MPAAKRVKLDGGDKKYSIGLDIGTNSVGWAVITDEYKVPSKKFKVLGNTDRHSIKKNLIGALLFDSGETAEATRLKRTARRRYTRRKNRICYLQEIFSNEMAKVDDSFFHRLEESFLVEEDKKHERHPIFGNIVDEVAYHEKYPTIYHLRKKLVDSTDKADLRLIYLALAHMIKFRGHFLIEGDLNPDNSDVDKLFIQLVQTYNQLFEENPINASGVDAKAILSARLSKSRRLENLIAQLPGEKKNGLFGNLIALSLGLTPNFKSNFDLAEDAKLQLSKDTYDDDLDNLLAQIGDQYADLFLAAKNLSDAILLSDILRVNTEITKAPLSASMIKRYDEHHQDLTLLKALVRQQLPEKYKEIFFDQSKNGYAGYIDGGASQEEFYKFIKPILEKMDGTEELLVKLNREDLLRKQRTFDNGSIPHQIHLGELHAILRRQEDFYPFLKDNREKIEKILTFRIPYYVGPLARGNSRFAWMTRKSEETITPWNFEEVVDKGASAQSFIERMTNFDKNLPNEKVLPKHSLLYEYFTVYNELTKVKYVTEGMRKPAFLSGEQKKAIVDLLFKTNRKVTVKQLKEDYFKKIECFDSVEISGVEDRFNASLGTYHDLLKIIKDKDFLDNEENEDILEDIVLTLTLFEDREMIEERLKTYAHLFDDKVMKQLKRRRYTGWGRLSRKLINGIRDKQSGKTILDFLKSDGFANRNFMQLIHDDSLTFKEDIQKAQVSGQGDSLHEHIANLAGSPAIKKGILQTVKVVDELVKVMGRHKPENIVIEMARENQTTQKGQKNSRERMKRIEEGIKELGSQILKEHPVENTQLQNEKLYLYYLQNGRDMYVDQELDINRLSDYDVDHIVPQSFLKDDSIDNKVLTRSDKARGKSDNVPSEEVVKKMKNYWRQLLNAKLITQRKFDNLTKAERGGLSELDKAGFIKRQLVETRQITKHVAQILDSRMNTKYDENDKLIREVKVITLKSKLVSDFRKDFQFYKVREINNYHHAHDAYLNAVVGTALIKKYPKLESEFVYGDYKVYDVRKMIAKSEQEIGKATAKYFFYSNIMNFFKTEITLANGEIRKRPLIETNGETGEIVWDKGRDFATVRKVLSMPQVNIVKKTEVQTGGFSKESILPKRNSDKLIARKKDWDPKKYGGFDSPTVAYSVLVVAKVEKGKSKKLKSVKELLGITIMERSSFEKNPIDFLEAKGYKEVKKDLIIKLPKYSLFELENGRKRMLASAGELQKGNELALPSKYVNFLYLASHYEKLKGSPEDNEQKQLFVEQHKHYLDEIIEQISEFSKRVILADANLDKVLSAYNKHRDKPIREQAENIIHLFTLTNLGAPAAFKYFDTTIDRKRYTSTKEVLDATLIHQSITGLYETRIDLSQLGGDGGGGGGSGGVLNLEEEYRLHEKPVPSSIDPSWLQLFPTVWAERAGMGLANQVPPVVVELRSGASPVAVRQYPMSKEAREGIRPHIQRFLDLGVLVPCQSPWNTPLLPVKKPGTNDYRPVQDLREINKRVQDIHPTVPNPYNLLSSLPPSHTWYSVLDLKDAFFCLKLHPNSQPLFAFEWRDPEKGNTGQLTWTRLPQGFKNSPTLFNEALHRDLAPFRALNPQVVLLQYVDDLLVAAPTYRDCKEGTQKLLQELSKLGYRVSAKKAQLCQKEVTYLGYLLKEGKRWLTPARKATVMKIPPPTTPRQVREFLGKAGFCRLFIPGFASLAAPLYPLTKPSIPFIWTEEHQKAFDRIKEALLSAPALALPDLTKPFTLYVDERAGVARGVLTQTLGPWRRPVAYLSKKLDPVASGWPTCLKAVAAVALLLKDADKLTLGQNVTVIASHSLESIVRQPPDRWMTNARMTHYQSLLLNERVSFAPPAVLNPATLLPVESEATPVHRCSEILAEETGTRRDLKDQPLPGVPAWYTDGSSFIAEGKRRAGAAIVDGKRTVWASSLPEGTSAQKAELVALTQALRLAEGKDINIYTDSRYAFATAHIHGAIYKQRGWLTSAGKDIKNKEEILALLEAIHLPKRVAIIHCPGHQKGNDPVATGNRRADEAAKQAALSTRVLAETTKPAGKRTADGSEFEKRTADGSEFESPKKKAKVE

SEQ ID NO: 6117 - protein, 2090 aa, synthetic construct
MPAAKRVKLDGGDKKYSIGLDIGTNSVGWAVITDEYKVPSKKFKVLGNTDRHSIKKNLIGALLFDSGETAEATRLKRTARRRYTRRKNRICYLQEIFSNEMAKVDDSFFHRLEESFLVEEDKKHERHPIFGNIVDEVAYHEKYPTIYHLRKKLVDSTDKADLRLIYLALAHMIKFRGHFLIEGDLNPDNSDVDKLFIQLVQTYNQLFEENPINASGVDAKAILSARLSKSRRLENLIAQLPGEKKNGLFGNLIALSLGLTPNFKSNFDLAEDAKLQLSKDTYDDDLDNLLAQIGDQYADLFLAAKNLSDAILLSDILRVNTEITKAPLSASMIKRYDEHHQDLTLLKALVRQQLPEKYKEIFFDQSKNGYAGYIDGGASQEEFYKFIKPILEKMDGTEELLVKLNREDLLRKQRTFDNGSIPHQIHLGELHAILRRQEDFYPFLKDNREKIEKILTFRIPYYVGPLARGNSRFAWMTRKSEETITPWNFEEVVDKGASAQSFIERMTNFDKNLPNEKVLPKHSLLYEYFTVYNELTKVKYVTEGMRKPAFLSGEQKKAIVDLLFKTNRKVTVKQLKEDYFKKIECFDSVEISGVEDRFNASLGTYHDLLKIIKDKDFLDNEENEDILEDIVLTLTLFEDREMIEERLKTYAHLFDDKVMKQLKRRRYTGWGRLSRKLINGIRDKQSGKTILDFLKSDGFANRNFMQLIHDDSLTFKEDIQKAQVSGQGDSLHEHIANLAGSPAIKKGILQTVKVVDELVKVMGRHKPENIVIEMARENQTTQKGQKNSRERMKRIEEGIKELGSQILKEHPVENTQLQNEKLYLYYLQNGRDMYVDQELDINRLSDYDVDHIVPQSFLKDDSIDNKVLTRSDKARGKSDNVPSEEVVKKMKNYWRQLLNAKLITQRKFDNLTKAERGGLSELDKAGFIKRQLVETRQITKHVAQILDSRMNTKYDENDKLIREVKVITLKSKLVSDFRKDFQFYKVREINNYHHAHDAYLNAVVGTALIKKYPKLESEFVYGDYKVYDVRKMIAKSEQEIGKATAKYFFYSNIMNFFKTEITLANGEIRKRPLIETNGETGEIVWDKGRDFATVRKVLSMPQVNIVKKTEVQTGGFSKESILPKRNSDKLIARKKDWDPKKYGGFDSPTVAYSVLVVAKVEKGKSKKLKSVKELLGITIMERSSFEKNPIDFLEAKGYKEVKKDLIIKLPKYSLFELENGRKRMLASAGELQKGNELALPSKYVNFLYLASHYEKLKGSPEDNEQKQLFVEQHKHYLDEIIEQISEFSKRVILADANLDKVLSAYNKHRDKPIREQAENIIHLFTLTNLGAPAAFKYFDTTIDRKRYTSTKEVLDATLIHQSITGLYETRIDLSQLGGDGGGGGGSGGTLNIEDEYRLHETSKEPDVPLGSTWLSDFPQAWAETGGMGLAVRQAPLIIPLKATSTPVSIKQYPMSQEARLGIKPHIQRLLDQGILVPCQSPWNTPLLPVKKPGTNDYRPVQDLREVNKRVEDIHPTVPNPYNLLSGLPPSHQWYTVLDLKDAFFCLRLHPTSQPLFAFEWRDPEMGISGQLTWTRLPQGFKNSPTLFNEALHRDLADFRIQHPDLILLQYVDDLLLAATSEQDCQRGTRALLQTLGNLGYRASAKKAQICQKQVKYLGYLLKEGQRWLTEARKETVMGQPTPKTPRQLREFLGKAGFCRLFIPGFAEMAAPLYPLTKPGTLFNWGPDQQKAYQEIKQALLTAPALGLPDLTKPFELFVDEKQGYAKGVLTQKLGPWRRPVAYLSKKLDPVAAGWPPCLRMVAAIAVLTKDAGKLTMGQPLVILAPHAVEALVKQPPDRWLSNARMTHYQAMLLDTDRVQFGPVVALNPATLLPLPEKEAPHDCLEILAETHGTRPDLTDQPIPDADYTWYTDGSSFLQEGQRRAGAAVTTETEVIWARALPAGTSAQRAELIALTQALKMAEGKKLNVYTDSRYAFATAHVHGEIYRRRGWLTSEGREIKNKNEILALLKALFLPKRLSIIHCPGHQKGNSAEARGNRMADQAAREAAMKAVLETSTLLAGKRTADGSEFEKRTADGSEFESPKKKAKVE

SEQ ID NO: 6118 - protein, 2101 aa, synthetic construct
MPAAKRVKLDGGDKKYSIGLDIGTNSVGWAVITDEYKVPSKKFKVLGNTDRHSIKKNLIGALLFDSGETAEATRLKRTARRRYTRRKNRICYLQEIFSNEMAKVDDSFFHRLEESFLVEEDKKHERHPIFGNIVDEVAYHEKYPTIYHLRKKLVDSTDKADLRLIYLALAHMIKFRGHFLIEGDLNPDNSDVDKLFIQLVQTYNQLFEENPINASGVDAKAILSARLSKSRRLENLIAQLPGEKKNGLFGNLIALSLGLTPNFKSNFDLAEDAKLQLSKDTYDDDLDNLLAQIGDQYADLFLAAKNLSDAILLSDILRVNTEITKAPLSASMIKRYDEHHQDLTLLKALVRQQLPEKYKEIFFDQSKNGYAGYIDGGASQEEFYKFIKPILEKMDGTEELLVKLNREDLLRKQRTFDNGSIPHQIHLGELHAILRRQEDFYPFLKDNREKIEKILTFRIPYYVGPLARGNSRFAWMTRKSEETITPWNFEEVVDKGASAQSFIERMTNFDKNLPNEKVLPKHSLLYEYFTVYNELTKVKYVTEGMRKPAFLSGEQKKAIVDLLFKTNRKVTVKQLKEDYFKKIECFDSVEISGVEDRFNASLGTYHDLLKIIKDKDFLDNEENEDILEDIVLTLTLFEDREMIEERLKTYAHLFDDKVMKQLKRRRYTGWGRLSRKLINGIRDKQSGKTILDFLKSDGFANRNFMQLIHDDSLTFKEDIQKAQVSGQGDSLHEHIANLAGSPAIKKGILQTVKVVDELVKVMGRHKPENIVIEMARENQTTQKGQKNSRERMKRIEEGIKELGSQILKEHPVENTQLQNEKLYLYYLQNGRDMYVDQELDINRLSDYDVDHIVPQSFLKDDSIDNKVLTRSDKARGKSDNVPSEEVVKKMKNYWRQLLNAKLITQRKFDNLTKAERGGLSELDKAGFIKRQLVETRQITKHVAQILDSRMNTKYDENDKLIREVKVITLKSKLVSDFRKDFQFYKVREINNYHHAHDAYLNAVVGTALIKKYPKLESEFVYGDYKVYDVRKMIAKSEQEIGKATAKYFFYSNIMNFFKTEITLANGEIRKRPLIETNGETGEIVWDKGRDFATVRKVLSMPQVNIVKKTEVQTGGFSKESILPKRNSDKLIARKKDWDPKKYGGFDSPTVAYSVLVVAKVEKGKSKKLKSVKELLGITIMERSSFEKNPIDFLEAKGYKEVKKDLIIKLPKYSLFELENGRKRMLASAGELQKGNELALPSKYVNFLYLASHYEKLKGSPEDNEQKQLFVEQHKHYLDEIIEQISEFSKRVILADANLDKVLSAYNKHRDKPIREQAENIIHLFTLTNLGAPAAFKYFDTTIDRKRYTSTKEVLDATLIHQSITGLYETRIDLSQLGGDGGGGGGSGGGGSGGTVSLQDEHRLFDIPVTTSLPDVWLQDFPQAWAETGGLGRAKCQAPIIIDLKPTAVPVSIKQYPMSLEAHMGIRQHIIKFLELGVLRPCRSPWNTPLLPVKKPGTQDYRPVQDLREINKRTVDIHPTVPNPYNLLSTLKPDYSWYTVLDLKDAFFCLPLAPQSQELFAFEWKDPERGISGQLTWTRLPQGFKNSPTLFNEALHRDLTDFRTQHPEVTLLQYVDDLLLAAPTKKACTQGTRHLLQELGEKGYRASAKKAQICQTKVTYLGYILSEGKRWLTPGRIETVARIPPPRNPREVREFLGKAGFCRLFIPGFAELAAPLYALTKPSTPFTWQTEHQLAFEALKKALLSAPALGLPDTSKPFTLFLDERQGIAKGVLTQKLGPWKRPVAYLSKKLDPVAAGWPPCLRIMAATAMLVKDSAKLTLGQPLTVITPHTLEAIVRQPPDRWITNARLTHYQALLLDTDRVQFGPPVTLNPATLLPVPENQPSPHDCRQVLAETHGTREDLKDQELPDADHTWYTDGSSYLDSGTRRAGAAVVDGHNTIWAQSLPPGTSAQKAELIALTKALELSKGKKANIYTDSRYAFATAHTHGSIYERRGWLTSEGKEIKNKAEIIALLKALFLPQEVAIIHCPGHQKGQDPVAVGNRQADRVARQAAMAEVLTLATEPDNTSHITAGKRTADGSEFEKRTADGSEFESPKKKAKVE

SEQ ID NO: 6119 - protein, 2175 aa, synthetic construct
MPAAKRVKLDGGDKKYSIGLDIGTNSVGWAVITDEYKVPSKKFKVLGNTDRHSIKKNLIGALLFDSGETAEATRLKRTARRRYTRRKNRICYLQEIFSNEMAKVDDSFFHRLEESFLVEEDKKHERHPIFGNIVDEVAYHEKYPTIYHLRKKLVDSTDKADLRLIYLALAHMIKFRGHFLIEGDLNPDNSDVDKLFIQLVQTYNQLFEENPINASGVDAKAILSARLSKSRRLENLIAQLPGEKKNGLFGNLIALSLGLTPNFKSNFDLAEDAKLQLSKDTYDDDLDNLLAQIGDQYADLFLAAKNLSDAILLSDILRVNTEITKAPLSASMIKRYDEHHQDLTLLKALVRQQLPEKYKEIFFDQSKNGYAGYIDGGASQEEFYKFIKPILEKMDGTEELLVKLNREDLLRKQRTFDNGSIPHQIHLGELHAILRRQEDFYPFLKDNREKIEKILTFRIPYYVGPLARGNSRFAWMTRKSEETITPWNFEEVVDKGASAQSFIERMTNFDKNLPNEKVLPKHSLLYEYFTVYNELTKVKYVTEGMRKPAFLSGEQKKAIVDLLFKTNRKVTVKQLKEDYFKKIECFDSVEISGVEDRFNASLGTYHDLLKIIKDKDFLDNEENEDILEDIVLTLTLFEDREMIEERLKTYAHLFDDKVMKQLKRRRYTGWGRLSRKLINGIRDKQSGKTILDFLKSDGFANRNFMQLIHDDSLTFKEDIQKAQVSGQGDSLHEHIANLAGSPAIKKGILQTVKVVDELVKVMGRHKPENIVIEMARENQTTQKGQKNSRERMKRIEEGIKELGSQILKEHPVENTQLQNEKLYLYYLQNGRDMYVDQELDINRLSDYDVDHIVPQSFLKDDSIDNKVLTRSDKARGKSDNVPSEEVVKKMKNYWRQLLNAKLITQRKFDNLTKAERGGLSELDKAGFIKRQLVETRQITKHVAQILDSRMNTKYDENDKLIREVKVITLKSKLVSDFRKDFQFYKVREINNYHHAHDAYLNAVVGTALIKKYPKLESEFVYGDYKVYDVRKMIAKSEQEIGKATAKYFFYSNIMNFFKTEITLANGEIRKRPLIETNGETGEIVWDKGRDFATVRKVLSMPQVNIVKKTEVQTGGFSKESILPKRNSDKLIARKKDWDPKKYGGFDSPTVAYSVLVVAKVEKGKSKKLKSVKELLGITIMERSSFEKNPIDFLEAKGYKEVKKDLIIKLPKYSLFELENGRKRMLASAGELQKGNELALPSKYVNFLYLASHYEKLKGSPEDNEQKQLFVEQHKHYLDEIIEQISEFSKRVILADANLDKVLSAYNKHRDKPIREQAENIIHLFTLTNLGAPAAFKYFDTTIDRKRYTSTKEVLDATLIHQSITGLYETRIDLSQLGGDGGGGGGSGGGGSGGMNPLQLLQPLPAEIKGTKLLAHWNSGATITCIPESFLEDEQPIKKTLIKTIHGEKQQNVYYVTFKVKGRKVEAEVIASPYEYILLSPTDVPWLTQQPLQLTILVPLQEYQEKILSKTALPEDQKQQLKTLFVKYDNLWQHWENQVGHRKIRPHNIATGDYPPRPQKQYPINPKAKPSIQIVIDDLLKQGVLTPQNSTMNTPVYPVPKPDGRWRMVLDYREVNKTIPLTAAQNQHSAGILATIVRQKYKTTLDLANGFWAHPITPESYWLTAFTWQGKQYCWTRLPQGFLNSPALFNADVVDLLKEIPNVQVYVDDIYLSHDDPKEHVQQLEKVFQILLQAGYVVSLKKSEIGQKTVEFLGFNITKEGRGLTDTFKTKLLNITPPKDLKQLQSILGKLNFARNFIPNFAELVQPLYNLIAPAKGKYIEWSEENTKQLNMVIEALNTASNLEERLPEQRLVIKVNTSPSAGYVRYYNETGKKPIMYLNYVFSKAELKFSMLEKLLTTMHKALIKAMDLAMGQEILVYSPIVSMTKIQKTPLPERKALPIRWITWMTYLEDPRIQFHYDKTLPELKHIPDVYTSSQSPVKHPSQYEGVFYTDGSAIKSPDPTKSNNAGMGIVHATYKPEYQVLNQWSIPLGNHTAQMAEIAAVEFACKKALKIPGPVLVITDSFYVAESANKELPYWKSNGFVNNKKKPLKHISKWKSIAECLSMKPDITIQHEKGISLQIPVFILKGNALADKLATQGSYVVNAGKRTADGSEFEKRTADGSEFESPKKKAKVE

SEQ ID NO: 6120 - protein, 2217 aa, synthetic construct
MPAAKRVKLDGGDKKYSIGLDIGTNSVGWAVITDEYKVPSKKFKVLGNTDRHSIKKNLIGALLFDSGETAEATRLKRTARRRYTRRKNRICYLQEIFSNEMAKVDDSFFHRLEESFLVEEDKKHERHPIFGNIVDEVAYHEKYPTIYHLRKKLVDSTDKADLRLIYLALAHMIKFRGHFLIEGDLNPDNSDVDKLFIQLVQTYNQLFEENPINASGVDAKAILSARLSKSRRLENLIAQLPGEKKNGLFGNLIALSLGLTPNFKSNFDLAEDAKLQLSKDTYDDDLDNLLAQIGDQYADLFLAAKNLSDAILLSDILRVNTEITKAPLSASMIKRYDEHHQDLTLLKALVRQQLPEKYKEIFFDQSKNGYAGYIDGGASQEEFYKFIKPILEKMDGTEELLVKLNREDLLRKQRTFDNGSIPHQIHLGELHAILRRQEDFYPFLKDNREKIEKILTFRIPYYVGPLARGNSRFAWMTRKSEETITPWNFEEVVDKGASAQSFIERMTNFDKNLPNEKVLPKHSLLYEYFTVYNELTKVKYVTEGMRKPAFLSGEQKKAIVDLLFKTNRKVTVKQLKEDYFKKIECFDSVEISGVEDRFNASLGTYHDLLKIIKDKDFLDNEENEDILEDIVLTLTLFEDREMIEERLKTYAHLFDDKVMKQLKRRRYTGWGRLSRKLINGIRDKQSGKTILDFLKSDGFANRNFMQLIHDDSLTFKEDIQKAQVSGQGDSLHEHIANLAGSPAIKKGILQTVKVVDELVKVMGRHKPENIVIEMARENQTTQKGQKNSRERMKRIEEGIKELGSQILKEHPVENTQLQNEKLYLYYLQNGRDMYVDQELDINRLSDYDVDHIVPQSFLKDDSIDNKVLTRSDKARGKSDNVPSEEVVKKMKNYWRQLLNAKLITQRKFDNLTKAERGGLSELDKAGFIKRQLVETRQITKHVAQILDSRMNTKYDENDKLIREVKVITLKSKLVSDFRKDFQFYKVREINNYHHAHDAYLNAVVGTALIKKYPKLESEFVYGDYKVYDVRKMIAKSEQEIGKATAKYFFYSNIMNFFKTEITLANGEIRKRPLIETNGETGEIVWDKGRDFATVRKVLSMPQVNIVKKTEVQTGGFSKESILPKRNSDKLIARKKDWDPKKYGGFDSPTVAYSVLVVAKVEKGKSKKLKSVKELLGITIMERSSFEKNPIDFLEAKGYKEVKKDLIIKLPKYSLFELENGRKRMLASAGELQKGNELALPSKYVNFLYLASHYEKLKGSPEDNEQKQLFVEQHKHYLDEIIEQISEFSKRVILADANLDKVLSAYNKHRDKPIREQAENIIHLFTLTNLGAPAAFKYFDTTIDRKRYTSTKEVLDATLIHQSITGLYETRIDLSQLGGDGGGGGGSGGGGSGGTLGDQGSRGSDPLPEPRVTLTVEGIPTEFLVNTGAEHSVLTKPMGKMGSKRTVVAGATGSKVYPWTTKRLLKIGQKQVTHSFLVIPECPAPLLGRDLLTKLKAQIQFSTEGPQVTWEDRPAMCLVLNLEEEYRLHEKPVPPSIDPSWLQLFPMVWAEKAGMGLANQVPPVVVELKSDASPVAVRQYPMSKEAREGIRPHIQRFLDLGILVPCQSPWNTPLLPVKKPGTNDYRPVQDLREVNKRVQDIHPTVPNPYNLLSSLPPSHTWYSVLDLKDAFFCLKLHPNSQPLFAFEWRDPEKGNTGQLTWTRLPQGFKNSPTLFDEALHRDLASFRALNPQVVMLQYVDDLLVAAPTYRDCKEGTRRLLQELSKLGYRVSAKKAQLCREEVTYLGYLLKGGKRWLTPARKATVMKIPTPTTPRQVREFLGTAGFCRLWIPGFASLAAPLYPLTREKVPFTWTEAHQEAFGRIKEALLSAPALALPDLTKPFALYVDEKEGVARGVLTQTLGPWRRPVAYLSKKLDPVASGWPTCLKAIAAVALLLKDADKLTLGQNVLVIAPHNLESIVRQPPDRWMTNARMTHYQSLLLNERVSFAPPAILNPATLLPVESDDTPIHICSEILAEETGTRPDLRDQPLPGVPAWYTDGSSFIMDGRRQAGAAIVDNKRTVWASNLPEGTSAQKAELIALTQALRLAEGKSINIYTDSRYAFATAHVHGAIYKQRGLLTSAGKDIKNKEEILALLEAIHLPKRVAIIHCPGHQRGTDPVATGNRKADEAAKQAAQSTRILTETTKNAGKRTADGSEFEKRTADGSEFESPKKKAKVE

SEQ ID NO: 6121 - protein, 2126 aa, synthetic construct
MPAAKRVKLDGGDKKYSIGLDIGTNSVGWAVITDEYKVPSKKFKVLGNTDRHSIKKNLIGALLFDSGETAEATRLKRTARRRYTRRKNRICYLQEIFSNEMAKVDDSFFHRLEESFLVEEDKKHERHPIFGNIVDEVAYHEKYPTIYHLRKKLVDSTDKADLRLIYLALAHMIKFRGHFLIEGDLNPDNSDVDKLFIQLVQTYNQLFEENPINASGVDAKAILSARLSKSRRLENLIAQLPGEKKNGLFGNLIALSLGLTPNFKSNFDLAEDAKLQLSKDTYDDDLDNLLAQIGDQYADLFLAAKNLSDAILLSDILRVNTEITKAPLSASMIKRYDEHHQDLTLLKALVRQQLPEKYKEIFFDQSKNGYAGYIDGGASQEEFYKFIKPILEKMDGTEELLVKLNREDLLRKQRTFDNGSIPHQIHLGELHAILRRQEDFYPFLKDNREKIEKILTFRIPYYVGPLARGNSRFAWMTRKSEETITPWNFEEVVDKGASAQSFIERMTNFDKNLPNEKVLPKHSLLYEYFTVYNELTKVKYVTEGMRKPAFLSGEQKKAIVDLLFKTNRKVTVKQLKEDYFKKIECFDSVEISGVEDRFNASLGTYHDLLKIIKDKDFLDNEENEDILEDIVLTLTLFEDREMIEERLKTYAHLFDDKVMKQLKRRRYTGWGRLSRKLINGIRDKQSGKTILDFLKSDGFANRNFMQLIHDDSLTFKEDIQKAQVSGQGDSLHEHIANLAGSPAIKKGILQTVKVVDELVKVMGRHKPENIVIEMARENQTTQKGQKNSRERMKRIEEGIKELGSQILKEHPVENTQLQNEKLYLYYLQNGRDMYVDQELDINRLSDYDVDHIVPQSFLKDDSIDNKVLTRSDKARGKSDNVPSEEVVKKMKNYWRQLLNAKLITQRKFDNLTKAERGGLSELDKAGFIKRQLVETRQITKHVAQILDSRMNTKYDENDKLIREVKVITLKSKLVSDFRKDFQFYKVREINNYHHAHDAYLNAVVGTALIKKYPKLESEFVYGDYKVYDVRKMIAKSEQEIGKATAKYFFYSNIMNFFKTEITLANGEIRKRPLIETNGETGEIVWDKGRDFATVRKVLSMPQVNIVKKTEVQTGGFSKESILPKRNSDKLIARKKDWDPKKYGGFDSPTVAYSVLVVAKVEKGKSKKLKSVKELLGITIMERSSFEKNPIDFLEAKGYKEVKKDLIIKLPKYSLFELENGRKRMLASAGELQKGNELALPSKYVNFLYLASHYEKLKGSPEDNEQKQLFVEQHKHYLDEIIEQISEFSKRVILADANLDKVLSAYNKHRDKPIREQAENIIHLFTLTNLGAPAAFKYFDTTIDRKRYTSTKEVLDATLIHQSITGLYETRIDLSQLGGDGGGGGGSGGGGSGGLLGRDLLTKLKAQIQFSTEGPQVTWEDRPAMCLVLNLEEEYRLHEKPVPPSIDPSWLQLFPMVWAEKAGMGLANQVPPVVVELKSDASPVAVRQYPMSKEAREGIRPHIQRFLDLGILVPCQSPWNTPLLPVKKPGTNDYRPVQDLREVNKRVQDIHPTVPNPYNLLSSLPPSHTWYSVLDLKDAFFCLKLHPNSQPLFAFEWRDPEKGNTGQLTWTRLPQGFKNSPTLFNEALHRDLASFRALNPQVVMLQYVDDLLVAAPTYRDCKEGTRRLLQELSKLGYRVSAKKAQLCREEVTYLGYLLKGGKRWLTPARKATVMKIPTPTTPRQVREFLGTAGFCRLWIPGFASLAAPLYPLTRPKVPFTWTEAHQEAFGRIKEALLSAPALALPDLTKPFALYVDEKEGVARGVLTQTLGPWRRPVAYLSKKLDPVASGWPTCLKAIAAVALLLKDADKLTLGQNVLVIAPHNLESIVRQPPDRWMTNARMTHYQSLLLNERVSFAPPAILNPATLLPVESDDTPIHICSEILAEETGTRPDLRDQPLPGVPAWYTDGSSFIMDGRRQAGAAIVDNKRTVWASNLPEGTSAQKAELIALTQALRLAEGKSINIYTDSRYAFATAHVHGAIYKQRGWLTSAGKDIKNKEEILALLEAIHLPKRVAIIHCPGHQRGTDPVATGNRKADEAAKQAAQSTRILTETTKNAGKRTADGSEFEKRTADGSEFESPKKKAKVE

SEQ ID NO: 6122 - protein, 2217 aa, synthetic construct
MPAAKRVKLDGGDKKYSIGLDIGTNSVGWAVITDEYKVPSKKFKVLGNTDRHSIKKNLIGALLFDSGETAEATRLKRTARRRYTRRKNRICYLQEIFSNEMAKVDDSFFHRLEESFLVEEDKKHERHPIFGNIVDEVAYHEKYPTIYHLRKKLVDSTDKADLRLIYLALAHMIKFRGHFLIEGDLNPDNSDVDKLFIQLVQTYNQLFEENPINASGVDAKAILSARLSKSRRLENLIAQLPGEKKNGLFGNLIALSLGLTPNFKSNFDLAEDAKLQLSKDTYDDDLDNLLAQIGDQYADLFLAAKNLSDAILLSDILRVNTEITKAPLSASMIKRYDEHHQDLTLLKALVRQQLPEKYKEIFFDQSKNGYAGYIDGGASQEEFYKFIKPILEKMDGTEELLVKLNREDLLRKQRTFDNGSIPHQIHLGELHAILRRQEDFYPFLKDNREKIEKILTFRIPYYVGPLARGNSRFAWMTRKSEETITPWNFEEVVDKGASAQSFIERMTNFDKNLPNEKVLPKHSLLYEYFTVYNELTKVKYVTEGMRKPAFLSGEQKKAIVDLLFKTNRKVTVKQLKEDYFKKIECFDSVEISGVEDRFNASLGTYHDLLKIIKDKDFLDNEENEDILEDIVLTLTLFEDREMIEERLKTYAHLFDDKVMKQLKRRRYTGWGRLSRKLINGIRDKQSGKTILDFLKSDGFANRNFMQLIHDDSLTFKEDIQKAQVSGQGDSLHEHIANLAGSPAIKKGILQTVKVVDELVKVMGRHKPENIVIEMARENQTTQKGQKNSRERMKRIEEGIKELGSQILKEHPVENTQLQNEKLYLYYLQNGRDMYVDQELDINRLSDYDVDHIVPQSFLKDDSIDNKVLTRSDKARGKSDNVPSEEVVKKMKNYWRQLLNAKLITQRKFDNLTKAERGGLSELDKAGFIKRQLVETRQITKHVAQILDSRMNTKYDENDKLIREVKVITLKSKLVSDFRKDFQFYKVREINNYHHAHDAYLNAVVGTALIKKYPKLESEFVYGDYKVYDVRKMIAKSEQEIGKATAKYFFYSNIMNFFKTEITLANGEIRKRPLIETNGETGEIVWDKGRDFATVRKVLSMPQVNIVKKTEVQTGGFSKESILPKRNSDKLIARKKDWDPKKYGGFDSPTVAYSVLVVAKVEKGKSKKLKSVKELLGITIMERSSFEKNPIDFLEAKGYKEVKKDLIIKLPKYSLFELENGRKRMLASAGELQKGNELALPSKYVNFLYLASHYEKLKGSPEDNEQKQLFVEQHKHYLDEIIEQISEFSKRVILADANLDKVLSAYNKHRDKPIREQAENIIHLFTLTNLGAPAAFKYFDTTIDRKRYTSTKEVLDATLIHQSITGLYETRIDLSQLGGDGGGGGGSGGGGSGGTLGDQGSRGSDPLPEPRVTLTVEGIPTEFLVNTGAEHSVLTKPMGKMGSKRTVVAGATGSKVYPWTTKRLLKIGQKQVTHSFLVIPECPAPLLGRDLLTKLKAQIQFSTEGPQVTWEDRPAMCLVLNLEEEYRLHEKPVPPSIDPSWLQLFPMVWAEKAGMGLANQVPPVVVELKSDASPVAVRQYPMSKEAREGIRPHIQRFLDLGILVPCQSPWNTPLLPVKKPGTNDYRPVQDLREVNKRVQDIHPTVPNPYNLLSSLPPSHTWYSVLDLKDAFFCLKLHPNSQPLFAFEWRDPEKGNTGQLTWTRLPQGFKNSPTLFNEALHRDLASFRALNPQVVMLQYVDDLLVAAPTYRDCKEGTRRLLQELSKLGYRVSAKKAQLCREEVTYLGYLLKGGKRWLTPARKATVMKIPTPTTPRQVREFLGTAGFCRLWIPGFASLAAPLYPLTRPKVPFTWTEAHQEAFGRIKEALLSAPALALPDLTKPFALYVDEKEGVARGVLTQTLGPWRRPVAYLSKKLDPVASGWPTCLKAIAAVALLLKDADKLTLGQNVLVIAPHNLESIVRQPPDRWMTNARMTHYQSLLLNERVSFAPPAILNPATLLPVESDDTPIHICSEILAEETGTRPDLRDQPLPGVPAWYTDGSSFIMDGRRQAGAAIVDNKRTVWASNLPEGTSAQKAELIALTQALRLAEGKSINIYTDSRYAFATAHVHGAIYKQRGWLTSAGKDIKNKEEILALLEAIHLPKRVAIIHCPGHQRGTDPVATGNRKADEAAKQAAQSTRILTETTKNAGKRTADGSEFEKRTADGSEFESPKKKAKVE

SEQ ID NO: 6123 - protein, 2217 aa, synthetic construct
MPAAKRVKLDGGDKKYSIGLDIGTNSVGWAVITDEYKVPSKKFKVLGNTDRHSIKKNLIGALLFDSGETAEATRLKRTARRRYTRRKNRICYLQEIFSNEMAKVDDSFFHRLEESFLVEEDKKHERHPIFGNIVDEVAYHEKYPTIYHLRKKLVDSTDKADLRLIYLALAHMIKFRGHFLIEGDLNPDNSDVDKLFIQLVQTYNQLFEENPINASGVDAKAILSARLSKSRRLENLIAQLPGEKKNGLFGNLIALSLGLTPNFKSNFDLAEDAKLQLSKDTYDDDLDNLLAQIGDQYADLFLAAKNLSDAILLSDILRVNTEITKAPLSASMIKRYDEHHQDLTLLKALVRQQLPEKYKEIFFDQSKNGYAGYIDGGASQEEFYKFIKPILEKMDGTEELLVKLNREDLLRKQRTFDNGSIPHQIHLGELHAILRRQEDFYPFLKDNREKIEKILTFRIPYYVGPLARGNSRFAWMTRKSEETITPWNFEEVVDKGASAQSFIERMTNFDKNLPNEKVLPKHSLLYEYFTVYNELTKVKYVTEGMRKPAFLSGEQKKAIVDLLFKTNRKVTVKQLKEDYFKKIECFDSVEISGVEDRFNASLGTYHDLLKIIKDKDFLDNEENEDILEDIVLTLTLFEDREMIEERLKTYAHLFDDKVMKQLKRRRYTGWGRLSRKLINGIRDKQSGKTILDFLKSDGFANRNFMQLIHDDSLTFKEDIQKAQVSGQGDSLHEHIANLAGSPAIKKGILQTVKVVDELVKVMGRHKPENIVIEMARENQTTQKGQKNSRERMKRIEEGIKELGSQILKEHPVENTQLQNEKLYLYYLQNGRDMYVDQELDINRLSDYDVDHIVPQSFLKDDSIDNKVLTRSDKARGKSDNVPSEEVVKKMKNYWRQLLNAKLITQRKFDNLTKAERGGLSELDKAGFIKRQLVETRQITKHVAQILDSRMNTKYDENDKLIREVKVITLKSKLVSDFRKDFQFYKVREINNYHHAHDAYLNAVVGTALIKKYPKLESEFVYGDYKVYDVRKMIAKSEQEIGKATAKYFFYSNIMNFFKTEITLANGEIRKRPLIETNGETGEIVWDKGRDFATVRKVLSMPQVNIVKKTEVQTGGFSKESILPKRNSDKLIARKKDWDPKKYGGFDSPTVAYSVLVVAKVEKGKSKKLKSVKELLGITIMERSSFEKNPIDFLEAKGYKEVKKDLIIKLPKYSLFELENGRKRMLASAGELQKGNELALPSKYVNFLYLASHYEKLKGSPEDNEQKQLFVEQHKHYLDEIIEQISEFSKRVILADANLDKVLSAYNKHRDKPIREQAENIIHLFTLTNLGAPAAFKYFDTTIDRKRYTSTKEVLDATLIHQSITGLYETRIDLSQLGGDGGGGGGSGGGGSGGTLGDQGSRGSDPLPEPRVTLTVEGIPTEFLVNTGAEHSVLTKPMGKMGSKRTVVAGATGSKVYPWTTKRLLKIGQKQVTHSFLVIPECPAPLLGRDLLTKLKAQIQFSTEGPQVTWEDRPAMCLVLNLEEEYRLHEKPVPPSIDPSWLQLFPMVWAEKAGMGLANQVPPVVVELKSDASPVAVRQYPMSKEAREGIRPHIQRFLDLGILVPCQSPWNTPLLPVKKPGTNDYRPVQDLREVNKRVQDIHPTVPNPYNLLSSLPPSHTWYSVLDLKDAFFCLKLHPNSQPLFAFEWRDPEKGNTGQLTWTRLPQGFKNSPTLFNEALHRDLASFRALNPQVVMLQYVDDLLVAAPTYRDCKEGTRRLLQELSKLGYRVSAKKAQLCREEVTYLGYLLKGGKRWLTPARKATVMKIPTPTTPRQVREFLGKAGFCRLFIPGFASLAAPLYPLTRPKVPFTWTEAHQEAFGRIKEALLSAPALALPDLTKPFALYVDEKEGVARGVLTQTLGPWRRPVAYLSKKLDPVASGWPTCLKAIAAVALLLKDADKLTLGQNVLVIAPHNLESIVRQPPDRWMTNARMTHYQSLLLNERVSFAPPAILNPATLLPVESDDTPIHICSEILAEETGTRPDLRDQPLPGVPAWYTDGSSFIMDGRRQAGAAIVDNKRTVWASNLPEGTSAQKAELIALTQALRLAEGKSINIYTDSRYAFATAHVHGAIYKQRGWLTSAGKDIKNKEEILALLEAIHLPKRVAIIHCPGHQRGTDPVATGNRKADEAAKQAAQSTRILTETTKNAGKRTADGSEFEKRTADGSEFESPKKKAKVE

SEQ ID NO: 6124 - protein, 2095 aa, synthetic construct
MPAAKRVKLDGGDKKYSIGLDIGTNSVGWAVITDEYKVPSKKFKVLGNTDRHSIKKNLIGALLFDSGETAEATRLKRTARRRYTRRKNRICYLQEIFSNEMAKVDDSFFHRLEESFLVEEDKKHERHPIFGNIVDEVAYHEKYPTIYHLRKKLVDSTDKADLRLIYLALAHMIKFRGHFLIEGDLNPDNSDVDKLFIQLVQTYNQLFEENPINASGVDAKAILSARLSKSRRLENLIAQLPGEKKNGLFGNLIALSLGLTPNFKSNFDLAEDAKLQLSKDTYDDDLDNLLAQIGDQYADLFLAAKNLSDAILLSDILRVNTEITKAPLSASMIKRYDEHHQDLTLLKALVRQQLPEKYKEIFFDQSKNGYAGYIDGGASQEEFYKFIKPILEKMDGTEELLVKLNREDLLRKQRTFDNGSIPHQIHLGELHAILRRQEDFYPFLKDNREKIEKILTFRIPYYVGPLARGNSRFAWMTRKSEETITPWNFEEVVDKGASAQSFIERMTNFDKNLPNEKVLPKHSLLYEYFTVYNELTKVKYVTEGMRKPAFLSGEQKKAIVDLLFKTNRKVTVKQLKEDYFKKIECFDSVEISGVEDRFNASLGTYHDLLKIIKDKDFLDNEENEDILEDIVLTLTLFEDREMIEERLKTYAHLFDDKVMKQLKRRRYTGWGRLSRKLINGIRDKQSGKTILDFLKSDGFANRNFMQLIHDDSLTFKEDIQKAQVSGQGDSLHEHIANLAGSPAIKKGILQTVKVVDELVKVMGRHKPENIVIEMARENQTTQKGQKNSRERMKRIEEGIKELGSQILKEHPVENTQLQNEKLYLYYLQNGRDMYVDQELDINRLSDYDVDHIVPQSFLKDDSIDNKVLTRSDKARGKSDNVPSEEVVKKMKNYWRQLLNAKLITQRKFDNLTKAERGGLSELDKAGFIKRQLVETRQITKHVAQILDSRMNTKYDENDKLIREVKVITLKSKLVSDFRKDFQFYKVREINNYHHAHDAYLNAVVGTALIKKYPKLESEFVYGDYKVYDVRKMIAKSEQEIGKATAKYFFYSNIMNFFKTEITLANGEIRKRPLIETNGETGEIVWDKGRDFATVRKVLSMPQVNIVKKTEVQTGGFSKESILPKRNSDKLIARKKDWDPKKYGGFDSPTVAYSVLVVAKVEKGKSKKLKSVKELLGITIMERSSFEKNPIDFLEAKGYKEVKKDLIIKLPKYSLFELENGRKRMLASAGELQKGNELALPSKYVNFLYLASHYEKLKGSPEDNEQKQLFVEQHKHYLDEIIEQISEFSKRVILADANLDKVLSAYNKHRDKPIREQAENIIHLFTLTNLGAPAAFKYFDTTIDRKRYTSTKEVLDATLIHQSITGLYETRIDLSQLGGDGGGGGGSGGGGSGGTLNLEDEYRLYETSAEPEVSPGSTWLSDFPQAWAETGGMGLAVRQAPLIIPLKATSTPVSIKQYPMSQEAKLGIKPHIQRLLDQGILVPCQSPWNTPLLPVKKPGTNDYRPVQDLREVNKRVEDIHPTVPNPYNLLSGLPPSHRWYTVLDLKDAFFCLRLHPTSQPLFAFEWRDPGMGISGQLTWTRLPQGFKNSPTLFNEALHRDLADFRIQHPDLILLQYVDDILLAATSELDCQQGTRALLLTLGNLGYRASAKKAQLCQKQVKYLGYLLKEGQRWLTEARKETVMGQPTPKTPRQLREFLGTAGFCRLWIPGFAEMAAPLYPLTKPGTLFNWGPDQQKAYQEIKQALLTAPALGLPDLTKPFELFVDEKQGYAKGVLTQKLGPWRRPVAYLSKKLDPVAAGWPPCLRMVAAIAVLRKDAGKLTMGQPLVILAPHAVEALVKQPPDRWLSNARMTHYQAMLLDTDRVQFGPVVALNPATLLPLPEEGAPHDCLEILAETHGTRPDLTDQPIPDADHTWYTDGSSFLQEGQRKAGAAVTTETEVIWARALPAGTSAQRAELIALTQALKMAEGKRLNVYTDSRYAFATAHIHGEIYRRRGWLTSEGREIKNKSEILALLKALFLPKRLSIIHCLGHQKGDSAEARGNRLADQAAREAAIKTPPDTSTLLAGKRTADGSEFEKRTADGSEFESPKKKAKVE

SEQ ID NO: 6125 - protein, 2095 aa, synthetic construct
MPAAKRVKLDGGDKKYSIGLDIGTNSVGWAVITDEYKVPSKKFKVLGNTDRHSIKKNLIGALLFDSGETAEATRLKRTARRRYTRRKNRICYLQEIFSNEMAKVDDSFFHRLEESFLVEEDKKHERHPIFGNIVDEVAYHEKYPTIYHLRKKLVDSTDKADLRLIYLALAHMIKFRGHFLIEGDLNPDNSDVDKLFIQLVQTYNQLFEENPINASGVDAKAILSARLSKSRRLENLIAQLPGEKKNGLFGNLIALSLGLTPNFKSNFDLAEDAKLQLSKDTYDDDLDNLLAQIGDQYADLFLAAKNLSDAILLSDILRVNTEITKAPLSASMIKRYDEHHQDLTLLKALVRQQLPEKYKEIFFDQSKNGYAGYIDGGASQEEFYKFIKPILEKMDGTEELLVKLNREDLLRKQRTFDNGSIPHQIHLGELHAILRRQEDFYPFLKDNREKIEKILTFRIPYYVGPLARGNSRFAWMTRKSEETITPWNFEEVVDKGASAQSFIERMTNFDKNLPNEKVLPKHSLLYEYFTVYNELTKVKYVTEGMRKPAFLSGEQKKAIVDLLFKTNRKVTVKQLKEDYFKKIECFDSVEISGVEDRFNASLGTYHDLLKIIKDKDFLDNEENEDILEDIVLTLTLFEDREMIEERLKTYAHLFDDKVMKQLKRRRYTGWGRLSRKLINGIRDKQSGKTILDFLKSDGFANRNFMQLIHDDSLTFKEDIQKAQVSGQGDSLHEHIANLAGSPAIKKGILQTVKVVDELVKVMGRHKPENIVIEMARENQTTQKGQKNSRERMKRIEEGIKELGSQILKEHPVENTQLQNEKLYLYYLQNGRDMYVDQELDINRLSDYDVDHIVPQSFLKDDSIDNKVLTRSDKARGKSDNVPSEEVVKKMKNYWRQLLNAKLITQRKFDNLTKAERGGLSELDKAGFIKRQLVETRQITKHVAQILDSRMNTKYDENDKLIREVKVITLKSKLVSDFRKDFQFYKVREINNYHHAHDAYLNAVVGTALIKKYPKLESEFVYGDYKVYDVRKMIAKSEQEIGKATAKYFFYSNIMNFFKTEITLANGEIRKRPLIETNGETGEIVWDKGRDFATVRKVLSMPQVNIVKKTEVQTGGFSKESILPKRNSDKLIARKKDWDPKKYGGFDSPTVAYSVLVVAKVEKGKSKKLKSVKELLGITIMERSSFEKNPIDFLEAKGYKEVKKDLIIKLPKYSLFELENGRKRMLASAGELQKGNELALPSKYVNFLYLASHYEKLKGSPEDNEQKQLFVEQHKHYLDEIIEQISEFSKRVILADANLDKVLSAYNKHRDKPIREQAENIIHLFTLTNLGAPAAFKYFDTTIDRKRYTSTKEVLDATLIHQSITGLYETRIDLSQLGGDGGGGGGSGGGGSGGTLNLEDEYRLYETSAEPEVSPGSTWLSDFPQAWAETGGMGLAVRQAPLIIPLKATSTPVSIKQYPMSQEAKLGIKPHIQRLLDQGILVPCQSPWNTPLLPVKKPGTNDYRPVQDLREVNKRVEDIHPTVPNPYNLLSGLPPSHRWYTVLDLKDAFFCLRLHPTSQPLFAFEWRDPGMGISGQLTWTRLPQGFKNSPTLFNEALHRDLADFRIQHPDLILLQYVDDILLAATSELDCQQGTRALLLTLGNLGYRASAKKAQLCQKQVKYLGYLLKEGQRWLTEARKETVMGQPTPKTPRQLREFLGKAGFCRLFIPGFAEMAAPLYPLTKPGTLFNWGPDQQKAYQEIKQALLTAPALGLPDLTKPFELFVDEKQGYAKGVLTQKLGPWRRPVAYLSKKLDPVAAGWPPCLRMVAAIAVLRKDAGKLTMGQPLVILAPHAVEALVKQPPDRWLSNARMTHYQAMLLDTDRVQFGPVVALNPATLLPLPEEGAPHDCLEILAETHGTRPDLTDQPIPDADHTWYTDGSSFLQEGQRKAGAAVTTETEVIWARALPAGTSAQRAELIALTQALKMAEGKRLNVYTDSRYAFATAHIHGEIYRRRGWLTSEGREIKNKSEILALLKALFLPKRLSIIHCLGHQKGDSAEARGNRLADQAAREAAIKTPPDTSTLLAGKRTADGSEFEKRTADGSEFESPKKKAKVE

SEQ ID NO: 6126 - protein, 2095 aa, synthetic construct
MPAAKRVKLDGGDKKYSIGLDIGTNSVGWAVITDEYKVPSKKFKVLGNTDRHSIKKNLIGALLFDSGETAEATRLKRTARRRYTRRKNRICYLQEIFSNEMAKVDDSFFHRLEESFLVEEDKKHERHPIFGNIVDEVAYHEKYPTIYHLRKKLVDSTDKADLRLIYLALAHMIKFRGHFLIEGDLNPDNSDVDKLFIQLVQTYNQLFEENPINASGVDAKAILSARLSKSRRLENLIAQLPGEKKNGLFGNLIALSLGLTPNFKSNFDLAEDAKLQLSKDTYDDDLDNLLAQIGDQYADLFLAAKNLSDAILLSDILRVNTEITKAPLSASMIKRYDEHHQDLTLLKALVRQQLPEKYKEIFFDQSKNGYAGYIDGGASQEEFYKFIKPILEKMDGTEELLVKLNREDLLRKQRTFDNGSIPHQIHLGELHAILRRQEDFYPFLKDNREKIEKILTFRIPYYVGPLARGNSRFAWMTRKSEETITPWNFEEVVDKGASAQSFIERMTNFDKNLPNEKVLPKHSLLYEYFTVYNELTKVKYVTEGMRKPAFLSGEQKKAIVDLLFKTNRKVTVKQLKEDYFKKIECFDSVEISGVEDRFNASLGTYHDLLKIIKDKDFLDNEENEDILEDIVLTLTLFEDREMIEERLKTYAHLFDDKVMKQLKRRRYTGWGRLSRKLINGIRDKQSGKTILDFLKSDGFANRNFMQLIHDDSLTFKEDIQKAQVSGQGDSLHEHIANLAGSPAIKKGILQTVKVVDELVKVMGRHKPENIVIEMARENQTTQKGQKNSRERMKRIEEGIKELGSQILKEHPVENTQLQNEKLYLYYLQNGRDMYVDQELDINRLSDYDVDHIVPQSFLKDDSIDNKVLTRSDKARGKSDNVPSEEVVKKMKNYWRQLLNAKLITQRKFDNLTKAERGGLSELDKAGFIKRQLVETRQITKHVAQILDSRMNTKYDENDKLIREVKVITLKSKLVSDFRKDFQFYKVREINNYHHAHDAYLNAVVGTALIKKYPKLESEFVYGDYKVYDVRKMIAKSEQEIGKATAKYFFYSNIMNFFKTEITLANGEIRKRPLIETNGETGEIVWDKGRDFATVRKVLSMPQVNIVKKTEVQTGGFSKESILPKRNSDKLIARKKDWDPKKYGGFDSPTVAYSVLVVAKVEKGKSKKLKSVKELLGITIMERSSFEKNPIDFLEAKGYKEVKKDLIIKLPKYSLFELENGRKRMLASAGELQKGNELALPSKYVNFLYLASHYEKLKGSPEDNEQKQLFVEQHKHYLDEIIEQISEFSKRVILADANLDKVLSAYNKHRDKPIREQAENIIHLFTLTNLGAPAAFKYFDTTIDRKRYTSTKEVLDATLIHQSITGLYETRIDLSQLGGDGGGGGGSGGGGSGGTLGIEDEYRLHETSTEPDVSLGSTWLSDFPQAWAETGGMGLAVRQAPLIIPLKATSTPVSIQQYPMSHEARLGIKPHIQRLLDQGILVPCQSPWNTPLLPVKKPGTNDYRPVQDLREVNKRVEDIHPTVPNPYNLLSGLPPSHQWYTVLDLKDAFFCLRLHPTSQPLFAFEWRDPGMGISGQLTWTRLPQGFKNSPTLFNEALHRDLADFRIQHPDLILLQYVDDILLAATSELDCQQGTRALLQTLGDLGYRASAKKAQICQKQVKYLGYLLREGQRWLTEARKETVMGQPVPKTPRQLREFLGTAGFCRLWIPGFAEMAAPLYPLTKPGTLFSWGPDQQKAYQEIKQALLTAPALGLPDLTKPFELFVDEKQGYAKGVLTQKLGPWRRPVAYLSKKLDPVAAGWPPCLRMVAAIAVLTKDAGKLTMGQPLVILAPHAVEALVKQPPDRWLSNARMTHYQAMLLDTDRVQFGPVVALNPATLLPLPEEGAPHDCLEILAETHGTRPDLTDQPIPDADHTWYTDGSSFLQEGQRKAGAAVTTETEVIWAGALPAGTSAQRAELIALTQALKMAEGKRLNVYTDSRYAFATAHIHGEIYRRRGWLTSEGREIKNKSEILALLKALFLPKRLSIIHCLGHQKGDSAEARGNRLADQAAREAAIKTPPDTSTLLAGKRTADGSEFEKRTADGSEFESPKKKAKVE

SEQ ID NO: 6127 - protein, 2095 aa, synthetic construct
MPAAKRVKLDGGDKKYSIGLDIGTNSVGWAVITDEYKVPSKKFKVLGNTDRHSIKKNLIGALLFDSGETAEATRLKRTARRRYTRRKNRICYLQEIFSNEMAKVDDSFFHRLEESFLVEEDKKHERHPIFGNIVDEVAYHEKYPTIYHLRKKLVDSTDKADLRLIYLALAHMIKFRGHFLIEGDLNPDNSDVDKLFIQLVQTYNQLFEENPINASGVDAKAILSARLSKSRRLENLIAQLPGEKKNGLFGNLIALSLGLTPNFKSNFDLAEDAKLQLSKDTYDDDLDNLLAQIGDQYADLFLAAKNLSDAILLSDILRVNTEITKAPLSASMIKRYDEHHQDLTLLKALVRQQLPEKYKEIFFDQSKNGYAGYIDGGASQEEFYKFIKPILEKMDGTEELLVKLNREDLLRKQRTFDNGSIPHQIHLGELHAILRRQEDFYPFLKDNREKIEKILTFRIPYYVGPLARGNSRFAWMTRKSEETITPWNFEEVVDKGASAQSFIERMTNFDKNLPNEKVLPKHSLLYEYFTVYNELTKVKYVTEGMRKPAFLSGEQKKAIVDLLFKTNRKVTVKQLKEDYFKKIECFDSVEISGVEDRFNASLGTYHDLLKIIKDKDFLDNEENEDILEDIVLTLTLFEDREMIEERLKTYAHLFDDKVMKQLKRRRYTGWGRLSRKLINGIRDKQSGKTILDFLKSDGFANRNFMQLIHDDSLTFKEDIQKAQVSGQGDSLHEHIANLAGSPAIKKGILQTVKVVDELVKVMGRHKPENIVIEMARENQTTQKGQKNSRERMKRIEEGIKELGSQILKEHPVENTQLQNEKLYLYYLQNGRDMYVDQELDINRLSDYDVDHIVPQSFLKDDSIDNKVLTRSDKARGKSDNVPSEEVVKKMKNYWRQLLNAKLITQRKFDNLTKAERGGLSELDKAGFIKRQLVETRQITKHVAQILDSRMNTKYDENDKLIREVKVITLKSKLVSDFRKDFQFYKVREINNYHHAHDAYLNAVVGTALIKKYPKLESEFVYGDYKVYDVRKMIAKSEQEIGKATAKYFFYSNIMNFFKTEITLANGEIRKRPLIETNGETGEIVWDKGRDFATVRKVLSMPQVNIVKKTEVQTGGFSKESILPKRNSDKLIARKKDWDPKKYGGFDSPTVAYSVLVVAKVEKGKSKKLKSVKELLGITIMERSSFEKNPIDFLEAKGYKEVKKDLIIKLPKYSLFELENGRKRMLASAGELQKGNELALPSKYVNFLYLASHYEKLKGSPEDNEQKQLFVEQHKHYLDEIIEQISEFSKRVILADANLDKVLSAYNKHRDKPIREQAENIIHLFTLTNLGAPAAFKYFDTTIDRKRYTSTKEVLDATLIHQSITGLYETRIDLSQLGGDGGGGGGSGGGGSGGTLNIEDEYRLHETSKGPDVPLGSTWLSDFPQAWAETGGMGLAFRQAPLIISLKATSTPVSIKQYPMSQEARLGIKPHIQRLLDQGILVPCQSPWNTPLLPVKKPGTNDYRPVQDLREVNKRVEDIHPTVPNPYNLLSGLPPSHQWYTVLDLKDAFFCLRLHPTSQSLFAFEWKDPEMGISGQLTWTRLPQGFKNSPTLFNEALHRDLADFRIQHPDLILLQYVDDLLLAATSELDCQQGTRALLQTLGDLGYRASAKKAQICQKQVKYLGYLLKEGQRWLTEARKETVMGQPTPKTPRQLREFLGTAGLCRLWIPGFAEMAAPLYPLTKPGTLFKWGPDQQKAYQEIKQALLTAPALGLPDLTKPFELFVDEKQGYAKGVLTQKLGPWRRPVAYLSKKLDPVAAGWPPCLRMVAAIAVLTKDVGKLTMGQPLVILAPHAVEALVKQPPDRWLSNARMTHYQALLLDTDRVQFGPIVALNPATLLPLPEEGLQHDCLDILAEAHGTRPDLTDQPLPDADHTWYTDGSSFLQEGQRRAGAAVTTETEVIWAKALPAGTSAQRAELIALTQALKMAAGKKLNVYTDSRYAFATAHIHGEIYRRRGWLTSEGKEIKNKDEILALLKALFLPKRLSIIHCPGHQKGNHAEARGNRMADQAAREVATRETPETSTLLAGKRTADGSEFEKRTADGSEFESPKKKAKVE

SEQ ID NO: 6128 - protein, 2086 aa, synthetic construct
MPAAKRVKLDGGDKKYSIGLDIGTNSVGWAVITDEYKVPSKKFKVLGNTDRHSIKKNLIGALLFDSGETAEATRLKRTARRRYTRRKNRICYLQEIFSNEMAKVDDSFFHRLEESFLVEEDKKHERHPIFGNIVDEVAYHEKYPTIYHLRKKLVDSTDKADLRLIYLALAHMIKFRGHFLIEGDLNPDNSDVDKLFIQLVQTYNQLFEENPINASGVDAKAILSARLSKSRRLENLIAQLPGEKKNGLFGNLIALSLGLTPNFKSNFDLAEDAKLQLSKDTYDDDLDNLLAQIGDQYADLFLAAKNLSDAILLSDILRVNTEITKAPLSASMIKRYDEHHQDLTLLKALVRQQLPEKYKEIFFDQSKNGYAGYIDGGASQEEFYKFIKPILEKMDGTEELLVKLNREDLLRKQRTFDNGSIPHQIHLGELHAILRRQEDFYPFLKDNREKIEKILTFRIPYYVGPLARGNSRFAWMTRKSEETITPWNFEEVVDKGASAQSFIERMTNFDKNLPNEKVLPKHSLLYEYFTVYNELTKVKYVTEGMRKPAFLSGEQKKAIVDLLFKTNRKVTVKQLKEDYFKKIECFDSVEISGVEDRFNASLGTYHDLLKIIKDKDFLDNEENEDILEDIVLTLTLFEDREMIEERLKTYAHLFDDKVMKQLKRRRYTGWGRLSRKLINGIRDKQSGKTILDFLKSDGFANRNFMQLIHDDSLTFKEDIQKAQVSGQGDSLHEHIANLAGSPAIKKGILQTVKVVDELVKVMGRHKPENIVIEMARENQTTQKGQKNSRERMKRIEEGIKELGSQILKEHPVENTQLQNEKLYLYYLQNGRDMYVDQELDINRLSDYDVDHIVPQSFLKDDSIDNKVLTRSDKARGKSDNVPSEEVVKKMKNYWRQLLNAKLITQRKFDNLTKAERGGLSELDKAGFIKRQLVETRQITKHVAQILDSRMNTKYDENDKLIREVKVITLKSKLVSDFRKDFQFYKVREINNYHHAHDAYLNAVVGTALIKKYPKLESEFVYGDYKVYDVRKMIAKSEQEIGKATAKYFFYSNIMNFFKTEITLANGEIRKRPLIETNGETGEIVWDKGRDFATVRKVLSMPQVNIVKKTEVQTGGFSKESILPKRNSDKLIARKKDWDPKKYGGFDSPTVAYSVLVVAKVEKGKSKKLKSVKELLGITIMERSSFEKNPIDFLEAKGYKEVKKDLIIKLPKYSLFELENGRKRMLASAGELQKGNELALPSKYVNFLYLASHYEKLKGSPEDNEQKQLFVEQHKHYLDEIIEQISEFSKRVILADANLDKVLSAYNKHRDKPIREQAENIIHLFTLTNLGAPAAFKYFDTTIDRKRYTSTKEVLDATLIHQSITGLYETRIDLSQLGGDGGGGGGSGGGGSGGVPWLMKKPLQLTVLVPLHEYQERLLQQTALPKEQKELLQKLFLKYDALWQHWENQVGHRRIKPHNIATGTLAPRPQKQYPINPKAKPSIQIVIDDLLKQGVLIQQNSTMNTPVYPVPKPDGKWRMVLDYREVNKTIPLIAAQNQHSAGILSSIYRGKYKTTLDLTNGFWAHPITPESYWLTAFTWQGKQYCWTRLPQGFLNSPALFTADVVDLLKEIPNVQAYVDDIYISHDDPQEHLEQLEKIFSILLNAGYVVSLKKSEIAQREVEFLGFNITKEGRGLTDTFKQKLLNITPPKDLKQLQSILGLLNFARNFIPNYSELVKPLYTIVANANGKFISWTEDNSNQLQHIISVLNQADNLEERNPETRLIIKVNSSPSAGYIRYYNEGSKRPIMYVNYIFSKAEAKFTQTEKLLTTMHKGLIKAMDLAMGQEILVYSPIVSMTKIQRTPLPERKALPVRWITWMTYLEDPRIQFHYDKSLPELQQIPNVTEDVIAKTKHPSEFAMVFYTDGSAIKHPDVNKSHSAGMGIAQVQFIPEYKIVHQWSIPLGDHTAQLAEIAAVEFACKKALKISGPVLIVTDSFYVAESANKELPYWKSNGFLNNKKKPLRHVSKWKSIAECLQLKPDIIIMHEKGHQQPMTTLHTEGNNLADKLATQGSYVVHAGKRTADGSEFEKRTADGSEFESPKKKAKVE

SEQ ID NO: 6129 - protein, 2102 aa, synthetic construct
MPAAKRVKLDGGDKKYSIGLDIGTNSVGWAVITDEYKVPSKKFKVLGNTDRHSIKKNLIGALLFDSGETAEATRLKRTARRRYTRRKNRICYLQEIFSNEMAKVDDSFFHRLEESFLVEEDKKHERHPIFGNIVDEVAYHEKYPTIYHLRKKLVDSTDKADLRLIYLALAHMIKFRGHFLIEGDLNPDNSDVDKLFIQLVQTYNQLFEENPINASGVDAKAILSARLSKSRRLENLIAQLPGEKKNGLFGNLIALSLGLTPNFKSNFDLAEDAKLQLSKDTYDDDLDNLLAQIGDQYADLFLAAKNLSDAILLSDILRVNTEITKAPLSASMIKRYDEHHQDLTLLKALVRQQLPEKYKEIFFDQSKNGYAGYIDGGASQEEFYKFIKPILEKMDGTEELLVKLNREDLLRKQRTFDNGSIPHQIHLGELHAILRRQEDFYPFLKDNREKIEKILTFRIPYYVGPLARGNSRFAWMTRKSEETITPWNFEEVVDKGASAQSFIERMTNFDKNLPNEKVLPKHSLLYEYFTVYNELTKVKYVTEGMRKPAFLSGEQKKAIVDLLFKTNRKVTVKQLKEDYFKKIECFDSVEISGVEDRFNASLGTYHDLLKIIKDKDFLDNEENEDILEDIVLTLTLFEDREMIEERLKTYAHLFDDKVMKQLKRRRYTGWGRLSRKLINGIRDKQSGKTILDFLKSDGFANRNFMQLIHDDSLTFKEDIQKAQVSGQGDSLHEHIANLAGSPAIKKGILQTVKVVDELVKVMGRHKPENIVIEMARENQTTQKGQKNSRERMKRIEEGIKELGSQILKEHPVENTQLQNEKLYLYYLQNGRDMYVDQELDINRLSDYDVDHIVPQSFLKDDSIDNKVLTRSDKARGKSDNVPSEEVVKKMKNYWRQLLNAKLITQRKFDNLTKAERGGLSELDKAGFIKRQLVETRQITKHVAQILDSRMNTKYDENDKLIREVKVITLKSKLVSDFRKDFQFYKVREINNYHHAHDAYLNAVVGTALIKKYPKLESEFVYGDYKVYDVRKMIAKSEQEIGKATAKYFFYSNIMNFFKTEITLANGEIRKRPLIETNGETGEIVWDKGRDFATVRKVLSMPQVNIVKKTEVQTGGFSKESILPKRNSDKLIARKKDWDPKKYGGFDSPTVAYSVLVVAKVEKGKSKKLKSVKELLGITIMERSSFEKNPIDFLEAKGYKEVKKDLIIKLPKYSLFELENGRKRMLASAGELQKGNELALPSKYVNFLYLASHYEKLKGSPEDNEQKQLFVEQHKHYLDEIIEQISEFSKRVILADANLDKVLSAYNKHRDKPIREQAENIIHLFTLTNLGAPAAFKYFDTTIDRKRYTSTKEVLDATLIHQSITGLYETRIDLSQLGGDGGGGGGSGGGGSGGGGSGGTAPLEEEYRLFLEAPIQNVTLLEQWKREIPKVWAEINPPGLASTQAPIHVQLLSTALPVRVRQYPITLEAKRSLRETIRKFRAAGILRPVHSPWNTPLLPVRKSGTSEYRMVQDLREVNKRVETIHPTVPNPYTLLSLLPPDRIWYSVLDLKDAFFCIPLAPESQLIFAFEWADAEEGESGQLTWTRLPQGFKNSPTLFNEALNRDLQGFRLDHPSVSLLQYVDDLLIAADTQAACLSATRDLLMTLAELGYRVSGKKAQLCQEEVTYLGFKIHKGSRSLSNSRTQAILQIPVPKTKRQVREFLGTIGYCRLWIPGFAELAQPLYAATRPGNDPLVWGEKEEEAFQSLKLALTQPPALALPSLDKPFQLFVEETSGAAKGVLTQALGPWKRPVAYLSKRLDPVAAGWPRCLRAIAAAALLTREASKLTFGQDIEITSSHNLESLLRSPPDKWLTNARITQYQVLLLDPPRVRFKQTAALNPATLLPETDDTLPIHHCLDTLDSLTSTRPDLTDQPLAQAEATLFTDGSSYIRDGKRYAGAAVVTLDSVIWAEPLPIGTSAQKAELIALTKALEWSKDKSVNIYTDSRYAFATLHVHGMIYRERGWLTAGGKAIKNAPEILALLTAVWLPKRVAVMHCKGHQKDDAPTSTGNRRADEVAREVAIRPLSTQATISAGKRTADGSEFEKRTADGSEFESPKKKAKVE

SEQ ID NO: 6130 - protein, 2102 aa, synthetic construct
MPAAKRVKLDGGDKKYSIGLDIGTNSVGWAVITDEYKVPSKKFKVLGNTDRHSIKKNLIGALLFDSGETAEATRLKRTARRRYTRRKNRICYLQEIFSNEMAKVDDSFFHRLEESFLVEEDKKHERHPIFGNIVDEVAYHEKYPTIYHLRKKLVDSTDKADLRLIYLALAHMIKFRGHFLIEGDLNPDNSDVDKLFIQLVQTYNQLFEENPINASGVDAKAILSARLSKSRRLENLIAQLPGEKKNGLFGNLIALSLGLTPNFKSNFDLAEDAKLQLSKDTYDDDLDNLLAQIGDQYADLFLAAKNLSDAILLSDILRVNTEITKAPLSASMIKRYDEHHQDLTLLKALVRQQLPEKYKEIFFDQSKNGYAGYIDGGASQEEFYKFIKPILEKMDGTEELLVKLNREDLLRKQRTFDNGSIPHQIHLGELHAILRRQEDFYPFLKDNREKIEKILTFRIPYYVGPLARGNSRFAWMTRKSEETITPWNFEEVVDKGASAQSFIERMTNFDKNLPNEKVLPKHSLLYEYFTVYNELTKVKYVTEGMRKPAFLSGEQKKAIVDLLFKTNRKVTVKQLKEDYFKKIECFDSVEISGVEDRFNASLGTYHDLLKIIKDKDFLDNEENEDILEDIVLTLTLFEDREMIEERLKTYAHLFDDKVMKQLKRRRYTGWGRLSRKLINGIRDKQSGKTILDFLKSDGFANRNFMQLIHDDSLTFKEDIQKAQVSGQGDSLHEHIANLAGSPAIKKGILQTVKVVDELVKVMGRHKPENIVIEMARENQTTQKGQKNSRERMKRIEEGIKELGSQILKEHPVENTQLQNEKLYLYYLQNGRDMYVDQELDINRLSDYDVDHIVPQSFLKDDSIDNKVLTRSDKARGKSDNVPSEEVVKKMKNYWRQLLNAKLITQRKFDNLTKAERGGLSELDKAGFIKRQLVETRQITKHVAQILDSRMNTKYDENDKLIREVKVITLKSKLVSDFRKDFQFYKVREINNYHHAHDAYLNAVVGTALIKKYPKLESEFVYGDYKVYDVRKMIAKSEQEIGKATAKYFFYSNIMNFFKTEITLANGEIRKRPLIETNGETGEIVWDKGRDFATVRKVLSMPQVNIVKKTEVQTGGFSKESILPKRNSDKLIARKKDWDPKKYGGFDSPTVAYSVLVVAKVEKGKSKKLKSVKELLGITIMERSSFEKNPIDFLEAKGYKEVKKDLIIKLPKYSLFELENGRKRMLASAGELQKGNELALPSKYVNFLYLASHYEKLKGSPEDNEQKQLFVEQHKHYLDEIIEQISEFSKRVILADANLDKVLSAYNKHRDKPIREQAENIIHLFTLTNLGAPAAFKYFDTTIDRKRYTSTKEVLDATLIHQSITGLYETRIDLSQLGGDGGGGGGSGGGGSGGGGSGGTAPLEEEYRLFLEAPIQNVTLLEQWKREIPKVWAEINPPGLASTQAPIHVQLLSTALPVRVRQYPITLEAKRSLRETIRKFRAAGILRPVHSPWNTPLLPVRKSGTSEYRMVQDLREVNKRVETIHPTVPNPYTLLSLLPPDRIWYSVLDLKDAFFCIPLAPESQLIFAFEWADAEEGESGQLTWTRLPQGFKNSPTLFNEALNRDLQGFRLDHPSVSLLQYVDDLLIAADTQAACLSATRDLLMTLAELGYRVSGKKAQLCQEEVTYLGFKIHKGSRSLSNSRTQAILQIPVPKTKRQVREFLGKIGYCRLFIPGFAELAQPLYAATRPGNDPLVWGEKEEEAFQSLKLALTQPPALALPSLDKPFQLFVEETSGAAKGVLTQALGPWKRPVAYLSKRLDPVAAGWPRCLRAIAAAALLTREASKLTFGQDIEITSSHNLESLLRSPPDKWLTNARITQYQVLLLDPPRVRFKQTAALNPATLLPETDDTLPIHHCLDTLDSLTSTRPDLTDQPLAQAEATLFTDGSSYIRDGKRYAGAAVVTLDSVIWAEPLPIGTSAQKAELIALTKALEWSKDKSVNIYTDSRYAFATLHVHGMIYRERGWLTAGGKAIKNAPEILALLTAVWLPKRVAVMHCKGHQKDDAPTSTGNRRADEVAREVAIRPLSTQATISAGKRTADGSEFEKRTADGSEFESPKKKAKVE

SEQ ID NO: 6131 - protein, 2106 aa, synthetic construct
MPAAKRVKLDGGDKKYSIGLDIGTNSVGWAVITDEYKVPSKKFKVLGNTDRHSIKKNLIGALLFDSGETAEATRLKRTARRRYTRRKNRICYLQEIFSNEMAKVDDSFFHRLEESFLVEEDKKHERHPIFGNIVDEVAYHEKYPTIYHLRKKLVDSTDKADLRLIYLALAHMIKFRGHFLIEGDLNPDNSDVDKLFIQLVQTYNQLFEENPINASGVDAKAILSARLSKSRRLENLIAQLPGEKKNGLFGNLIALSLGLTPNFKSNFDLAEDAKLQLSKDTYDDDLDNLLAQIGDQYADLFLAAKNLSDAILLSDILRVNTEITKAPLSASMIKRYDEHHQDLTLLKALVRQQLPEKYKEIFFDQSKNGYAGYIDGGASQEEFYKFIKPILEKMDGTEELLVKLNREDLLRKQRTFDNGSIPHQIHLGELHAILRRQEDFYPFLKDNREKIEKILTFRIPYYVGPLARGNSRFAWMTRKSEETITPWNFEEVVDKGASAQSFIERMTNFDKNLPNEKVLPKHSLLYEYFTVYNELTKVKYVTEGMRKPAFLSGEQKKAIVDLLFKTNRKVTVKQLKEDYFKKIECFDSVEISGVEDRFNASLGTYHDLLKIIKDKDFLDNEENEDILEDIVLTLTLFEDREMIEERLKTYAHLFDDKVMKQLKRRRYTGWGRLSRKLINGIRDKQSGKTILDFLKSDGFANRNFMQLIHDDSLTFKEDIQKAQVSGQGDSLHEHIANLAGSPAIKKGILQTVKVVDELVKVMGRHKPENIVIEMARENQTTQKGQKNSRERMKRIEEGIKELGSQILKEHPVENTQLQNEKLYLYYLQNGRDMYVDQELDINRLSDYDVDHIVPQSFLKDDSIDNKVLTRSDKARGKSDNVPSEEVVKKMKNYWRQLLNAKLITQRKFDNLTKAERGGLSELDKAGFIKRQLVETRQITKHVAQILDSRMNTKYDENDKLIREVKVITLKSKLVSDFRKDFQFYKVREINNYHHAHDAYLNAVVGTALIKKYPKLESEFVYGDYKVYDVRKMIAKSEQEIGKATAKYFFYSNIMNFFKTEITLANGEIRKRPLIETNGETGEIVWDKGRDFATVRKVLSMPQVNIVKKTEVQTGGFSKESILPKRNSDKLIARKKDWDPKKYGGFDSPTVAYSVLVVAKVEKGKSKKLKSVKELLGITIMERSSFEKNPIDFLEAKGYKEVKKDLIIKLPKYSLFELENGRKRMLASAGELQKGNELALPSKYVNFLYLASHYEKLKGSPEDNEQKQLFVEQHKHYLDEIIEQISEFSKRVILADANLDKVLSAYNKHRDKPIREQAENIIHLFTLTNLGAPAAFKYFDTTIDRKRYTSTKEVLDATLIHQSITGLYETRIDLSQLGGDGGGGGGSGGGGSGGGGSGGTVSLQDEHRLFDIPVTTSLPDVWLQDFPQAWAETGGLGRAKCQAPIIIDLKPTAVPVSIKQYPMSLEAHMGIRQHIIKFLELGVLRPCRSPWNTPLLPVKKPGTQDYRPVQDLREINKRTVDIHPTVPNPYNLLSTLKPDYSWYTVLDLKDAFFCLPLAPQSQELFAFEWKDPERGISGQLTWTRLPQGFKNSPTLFNEALHRDLTDFRTQHPEVTLLQYVDDLLLAAPTKKACTQGTRHLLQELGEKGYRASAKKAQICQTKVTYLGYILSEGKRWLTPGRIETVARIPPPRNPREVREFLGTAGFCRLWIPGFAELAAPLYALTKPSTPFTWQTEHQLAFEALKKALLSAPALGLPDTSKPFTLFLDERQGIAKGVLTQKLGPWKRPVAYLSKKLDPVAAGWPPCLRIMAATAMLVKDSAKLTLGQPLTVITPHTLEAIVRQPPDRWITNARLTHYQALLLDTDRVQFGPPVTLNPATLLPVPENQPSPHDCRQVLAETHGTREDLKDQELPDADHTWYTDGSSYLDSGTRRAGAAVVDGHNTIWAQSLPPGTSAQKAELIALTKALELSKGKKANIYTDSRYAFATAHTHGSIYERRGWLTSEGKEIKNKAEIIALLKALFLPQEVAIIHCPGHQKGQDPVAVGNRQADRVARQAAMAEVLTLATEPDNTSHITAGKRTADGSEFEKRTADGSEFESPKKKAKVE

SEQ ID NO: 6132 - protein, 2091 aa, synthetic construct
MPAAKRVKLDGGDKKYSIGLDIGTNSVGWAVITDEYKVPSKKFKVLGNTDRHSIKKNLIGALLFDSGETAEATRLKRTARRRYTRRKNRICYLQEIFSNEMAKVDDSFFHRLEESFLVEEDKKHERHPIFGNIVDEVAYHEKYPTIYHLRKKLVDSTDKADLRLIYLALAHMIKFRGHFLIEGDLNPDNSDVDKLFIQLVQTYNQLFEENPINASGVDAKAILSARLSKSRRLENLIAQLPGEKKNGLFGNLIALSLGLTPNFKSNFDLAEDAKLQLSKDTYDDDLDNLLAQIGDQYADLFLAAKNLSDAILLSDILRVNTEITKAPLSASMIKRYDEHHQDLTLLKALVRQQLPEKYKEIFFDQSKNGYAGYIDGGASQEEFYKFIKPILEKMDGTEELLVKLNREDLLRKQRTFDNGSIPHQIHLGELHAILRRQEDFYPFLKDNREKIEKILTFRIPYYVGPLARGNSRFAWMTRKSEETITPWNFEEVVDKGASAQSFIERMTNFDKNLPNEKVLPKHSLLYEYFTVYNELTKVKYVTEGMRKPAFLSGEQKKAIVDLLFKTNRKVTVKQLKEDYFKKIECFDSVEISGVEDRFNASLGTYHDLLKIIKDKDFLDNEENEDILEDIVLTLTLFEDREMIEERLKTYAHLFDDKVMKQLKRRRYTGWGRLSRKLINGIRDKQSGKTILDFLKSDGFANRNFMQLIHDDSLTFKEDIQKAQVSGQGDSLHEHIANLAGSPAIKKGILQTVKVVDELVKVMGRHKPENIVIEMARENQTTQKGQKNSRERMKRIEEGIKELGSQILKEHPVENTQLQNEKLYLYYLQNGRDMYVDQELDINRLSDYDVDHIVPQSFLKDDSIDNKVLTRSDKARGKSDNVPSEEVVKKMKNYWRQLLNAKLITQRKFDNLTKAERGGLSELDKAGFIKRQLVETRQITKHVAQILDSRMNTKYDENDKLIREVKVITLKSKLVSDFRKDFQFYKVREINNYHHAHDAYLNAVVGTALIKKYPKLESEFVYGDYKVYDVRKMIAKSEQEIGKATAKYFFYSNIMNFFKTEITLANGEIRKRPLIETNGETGEIVWDKGRDFATVRKVLSMPQVNIVKKTEVQTGGFSKESILPKRNSDKLIARKKDWDPKKYGGFDSPTVAYSVLVVAKVEKGKSKKLKSVKELLGITIMERSSFEKNPIDFLEAKGYKEVKKDLIIKLPKYSLFELENGRKRMLASAGELQKGNELALPSKYVNFLYLASHYEKLKGSPEDNEQKQLFVEQHKHYLDEIIEQISEFSKRVILADANLDKVLSAYNKHRDKPIREQAENIIHLFTLTNLGAPAAFKYFDTTIDRKRYTSTKEVLDATLIHQSITGLYETRIDLSQLGGDGGGGGGSGGGGSGGGGSGGVPWLTQQPLQLTILVPLQEYQEKILSKTALPEDQKQQLKTLFVKYDNLWQHWENQVGHRKIRPHNIATGDYPPRPQKQYPINPKAKPSIQIVIDDLLKQGVLTPQNSTMNTPVYPVPKPDGRWRMVLDYREVNKTIPLTAAQNQHSAGILATIVRQKYKTTLDLANGFWAHPITPESYWLTAFTWQGKQYCWTRLPQGFLNSPALFNADVVDLLKEIPNVQVYVDDIYLSHDDPKEHVQQLEKVFQILLQAGYVVSLKKSEIGQKTVEFLGFNITKEGRGLTDTFKTKLLNITPPKDLKQLQSILGLLNFARNFIPNFAELVQPLYNLIAPAKGKYIEWSEENTKQLNMVIEALNTASNLEERLPEQRLVIKVNTSPSAGYVRYYNETGKKPIMYLNYVFSKAELKFSMLEKLLTTMHKALIKAMDLAMGQEILVYSPIVSMTKIQKTPLPERKALPIRWITWMTYLEDPRIQFHYDKTLPELKHIPDVYTSSQSPVKHPSQYEGVFYTDGSAIKSPDPTKSNNAGMGIVHATYKPEYQVLNQWSIPLGNHTAQMAEIAAVEFACKKALKIPGPVLVITDSFYVAESANKELPYWKSNGFVNNKKKPLKHISKWKSIAECLSMKPDITIQHEKGISLQIPVFILKGNALADKLATQGSYVVNAGKRTADGSEFEKRTADGSEFESPKKKAKVE

SEQ ID NO: 6133 - protein, 2222 aa, synthetic construct
MPAAKRVKLDGGDKKYSIGLDIGTNSVGWAVITDEYKVPSKKFKVLGNTDRHSIKKNLIGALLFDSGETAEATRLKRTARRRYTRRKNRICYLQEIFSNEMAKVDDSFFHRLEESFLVEEDKKHERHPIFGNIVDEVAYHEKYPTIYHLRKKLVDSTDKADLRLIYLALAHMIKFRGHFLIEGDLNPDNSDVDKLFIQLVQTYNQLFEENPINASGVDAKAILSARLSKSRRLENLIAQLPGEKKNGLFGNLIALSLGLTPNFKSNFDLAEDAKLQLSKDTYDDDLDNLLAQIGDQYADLFLAAKNLSDAILLSDILRVNTEITKAPLSASMIKRYDEHHQDLTLLKALVRQQLPEKYKEIFFDQSKNGYAGYIDGGASQEEFYKFIKPILEKMDGTEELLVKLNREDLLRKQRTFDNGSIPHQIHLGELHAILRRQEDFYPFLKDNREKIEKILTFRIPYYVGPLARGNSRFAWMTRKSEETITPWNFEEVVDKGASAQSFIERMTNFDKNLPNEKVLPKHSLLYEYFTVYNELTKVKYVTEGMRKPAFLSGEQKKAIVDLLFKTNRKVTVKQLKEDYFKKIECFDSVEISGVEDRFNASLGTYHDLLKIIKDKDFLDNEENEDILEDIVLTLTLFEDREMIEERLKTYAHLFDDKVMKQLKRRRYTGWGRLSRKLINGIRDKQSGKTILDFLKSDGFANRNFMQLIHDDSLTFKEDIQKAQVSGQGDSLHEHIANLAGSPAIKKGILQTVKVVDELVKVMGRHKPENIVIEMARENQTTQKGQKNSRERMKRIEEGIKELGSQILKEHPVENTQLQNEKLYLYYLQNGRDMYVDQELDINRLSDYDVDHIVPQSFLKDDSIDNKVLTRSDKARGKSDNVPSEEVVKKMKNYWRQLLNAKLITQRKFDNLTKAERGGLSELDKAGFIKRQLVETRQITKHVAQILDSRMNTKYDENDKLIREVKVITLKSKLVSDFRKDFQFYKVREINNYHHAHDAYLNAVVGTALIKKYPKLESEFVYGDYKVYDVRKMIAKSEQEIGKATAKYFFYSNIMNFFKTEITLANGEIRKRPLIETNGETGEIVWDKGRDFATVRKVLSMPQVNIVKKTEVQTGGFSKESILPKRNSDKLIARKKDWDPKKYGGFDSPTVAYSVLVVAKVEKGKSKKLKSVKELLGITIMERSSFEKNPIDFLEAKGYKEVKKDLIIKLPKYSLFELENGRKRMLASAGELQKGNELALPSKYVNFLYLASHYEKLKGSPEDNEQKQLFVEQHKHYLDEIIEQISEFSKRVILADANLDKVLSAYNKHRDKPIREQAENIIHLFTLTNLGAPAAFKYFDTTIDRKRYTSTKEVLDATLIHQSITGLYETRIDLSQLGGDGGGGGGSGGGGSGGGGSGGTLGDQGSRGSDPLPEPRVTLTVEGIPTEFLVNTGAEHSVLTKPMGKMGSKRTVVAGATGSKVYPWTTKRLLKIGQKQVTHSFLVIPECPAPLLGRDLLTKLKAQIQFSTEGPQVTWEDRPAMCLVLNLEEEYRLHEKPVPPSIDPSWLQLFPMVWAEKAGMGLANQVPPVVVELKSDASPVAVRQYPMSKEAREGIRPHIQRFLDLGILVPCQSPWNTPLLPVKKPGTNDYRPVQDLREVNKRVQDIHPTVPNPYNLLSSLPPSHTWYSVLDLKDAFFCLKLHPNSQPLFAFEWRDPEKGNTGQLTWTRLPQGFKNSPTLFNEALHRDLASFRALNPQVVMLQYVDDLLVAAPTYRDCKEGTRRLLQELSKLGYRVSAKKAQLCREEVTYLGYLLKGGKRWLTPARKATVMKIPTPTTPRQVREFLGKAGFCRLFIPGFASLAAPLYPLTRPKVPFTWTEAHQEAFGRIKEALLSAPALALPDLTKPFALYVDEKEGVARGVLTQTLGPWRRPVAYLSKKLDPVASGWPTCLKAIAAVALLLKDADKLTLGQNVLVIAPHNLESIVRQPPDRWMTNARMTHYQSLLLNERVSFAPPAILNPATLLPVESDDTPIHICSEILAEETGTRPDLRDQPLPGVPAWYTDGSSFIMDGRRQAGAAIVDNKRTVWASNLPEGTSAQKAELIALTQALRLAEGKSINIYTDSRYAFATAHVHGAIYKQRGWLTSAGKDIKNKEEILALLEAIHLPKRVAIIHCPGHQRGTDPVATGNRKADEAAKQAAQSTRILTETTKNAGKRTADGSEFEKRTADGSEFESPKKKAKVE

SEQ ID NO: 6134 - protein, 2100 aa, synthetic construct
MPAAKRVKLDGGDKKYSIGLDIGTNSVGWAVITDEYKVPSKKFKVLGNTDRHSIKKNLIGALLFDSGETAEATRLKRTARRRYTRRKNRICYLQEIFSNEMAKVDDSFFHRLEESFLVEEDKKHERHPIFGNIVDEVAYHEKYPTIYHLRKKLVDSTDKADLRLIYLALAHMIKFRGHFLIEGDLNPDNSDVDKLFIQLVQTYNQLFEENPINASGVDAKAILSARLSKSRRLENLIAQLPGEKKNGLFGNLIALSLGLTPNFKSNFDLAEDAKLQLSKDTYDDDLDNLLAQIGDQYADLFLAAKNLSDAILLSDILRVNTEITKAPLSASMIKRYDEHHQDLTLLKALVRQQLPEKYKEIFFDQSKNGYAGYIDGGASQEEFYKFIKPILEKMDGTEELLVKLNREDLLRKQRTFDNGSIPHQIHLGELHAILRRQEDFYPFLKDNREKIEKILTFRIPYYVGPLARGNSRFAWMTRKSEETITPWNFEEVVDKGASAQSFIERMTNFDKNLPNEKVLPKHSLLYEYFTVYNELTKVKYVTEGMRKPAFLSGEQKKAIVDLLFKTNRKVTVKQLKEDYFKKIECFDSVEISGVEDRFNASLGTYHDLLKIIKDKDFLDNEENEDILEDIVLTLTLFEDREMIEERLKTYAHLFDDKVMKQLKRRRYTGWGRLSRKLINGIRDKQSGKTILDFLKSDGFANRNFMQLIHDDSLTFKEDIQKAQVSGQGDSLHEHIANLAGSPAIKKGILQTVKVVDELVKVMGRHKPENIVIEMARENQTTQKGQKNSRERMKRIEEGIKELGSQILKEHPVENTQLQNEKLYLYYLQNGRDMYVDQELDINRLSDYDVDHIVPQSFLKDDSIDNKVLTRSDKARGKSDNVPSEEVVKKMKNYWRQLLNAKLITQRKFDNLTKAERGGLSELDKAGFIKRQLVETRQITKHVAQILDSRMNTKYDENDKLIREVKVITLKSKLVSDFRKDFQFYKVREINNYHHAHDAYLNAVVGTALIKKYPKLESEFVYGDYKVYDVRKMIAKSEQEIGKATAKYFFYSNIMNFFKTEITLANGEIRKRPLIETNGETGEIVWDKGRDFATVRKVLSMPQVNIVKKTEVQTGGFSKESILPKRNSDKLIARKKDWDPKKYGGFDSPTVAYSVLVVAKVEKGKSKKLKSVKELLGITIMERSSFEKNPIDFLEAKGYKEVKKDLIIKLPKYSLFELENGRKRMLASAGELQKGNELALPSKYVNFLYLASHYEKLKGSPEDNEQKQLFVEQHKHYLDEIIEQISEFSKRVILADANLDKVLSAYNKHRDKPIREQAENIIHLFTLTNLGAPAAFKYFDTTIDRKRYTSTKEVLDATLIHQSITGLYETRIDLSQLGGDGGGGGGSGGGGSGGGGSGGTLNLEDEYRLYETSAEPEVSPGSTWLSDFPQAWAETGGMGLAVRQAPLIIPLKATSTPVSIKQYPMSQEAKLGIKPHIQRLLDQGILVPCQSPWNTPLLPVKKPGTNDYRPVQDLREVNKRVEDIHPTVPNPYNLLSGLPPSHRWYTVLDLKDAFFCLRLHPTSQPLFAFEWRDPGMGISGQLTWTRLPQGFKNSPTLFNEALHRDLADFRIQHPDLILLQYVDDILLAATSELDCQQGTRALLLTLGNLGYRASAKKAQLCQKQVKYLGYLLKEGQRWLTEARKETVMGQPTPKTPRQLREFLGTAGFCRLWIPGFAEMAAPLYPLTKPGTLFNWGPDQQKAYQEIKQALLTAPALGLPDLTKPFELFVDEKQGYAKGVLTQKLGPWRRPVAYLSKKLDPVAAGWPPCLRMVAAIAVLRKDAGKLTMGQPLVILAPHAVEALVKQPPDRWLSNARMTHYQAMLLDTDRVQFGPVVALNPATLLPLPEEGAPHDCLEILAETHGTRPDLTDQPIPDADHTWYTDGSSFLQEGQRKAGAAVTTETEVIWARALPAGTSAQRAELIALTQALKMAEGKRLNVYTDSRYAFATAHIHGEIYRRRGWLTSEGREIKNKSEILALLKALFLPKRLSIIHCLGHQKGDSAEARGNRLADQAAREAAIKTPPDTSTLLAGKRTADGSEFEKRTADGSEFESPKKKAKVE

SEQ ID NO: 6135 - protein, 2100 aa, synthetic construct
MPAAKRVKLDGGDKKYSIGLDIGTNSVGWAVITDEYKVPSKKFKVLGNTDRHSIKKNLIGALLFDSGETAEATRLKRTARRRYTRRKNRICYLQEIFSNEMAKVDDSFFHRLEESFLVEEDKKHERHPIFGNIVDEVAYHEKYPTIYHLRKKLVDSTDKADLRLIYLALAHMIKFRGHFLIEGDLNPDNSDVDKLFIQLVQTYNQLFEENPINASGVDAKAILSARLSKSRRLENLIAQLPGEKKNGLFGNLIALSLGLTPNFKSNFDLAEDAKLQLSKDTYDDDLDNLLAQIGDQYADLFLAAKNLSDAILLSDILRVNTEITKAPLSASMIKRYDEHHQDLTLLKALVRQQLPEKYKEIFFDQSKNGYAGYIDGGASQEEFYKFIKPILEKMDGTEELLVKLNREDLLRKQRTFDNGSIPHQIHLGELHAILRRQEDFYPFLKDNREKIEKILTFRIPYYVGPLARGNSRFAWMTRKSEETITPWNFEEVVDKGASAQSFIERMTNFDKNLPNEKVLPKHSLLYEYFTVYNELTKVKYVTEGMRKPAFLSGEQKKAIVDLLFKTNRKVTVKQLKEDYFKKIECFDSVEISGVEDRFNASLGTYHDLLKIIKDKDFLDNEENEDILEDIVLTLTLFEDREMIEERLKTYAHLFDDKVMKQLKRRRYTGWGRLSRKLINGIRDKQSGKTILDFLKSDGFANRNFMQLIHDDSLTFKEDIQKAQVSGQGDSLHEHIANLAGSPAIKKGILQTVKVVDELVKVMGRHKPENIVIEMARENQTTQKGQKNSRERMKRIEEGIKELGSQILKEHPVENTQLQNEKLYLYYLQNGRDMYVDQELDINRLSDYDVDHIVPQSFLKDDSIDNKVLTRSDKARGKSDNVPSEEVVKKMKNYWRQLLNAKLITQRKFDNLTKAERGGLSELDKAGFIKRQLVETRQITKHVAQILDSRMNTKYDENDKLIREVKVITLKSKLVSDFRKDFQFYKVREINNYHHAHDAYLNAVVGTALIKKYPKLESEFVYGDYKVYDVRKMIAKSEQEIGKATAKYFFYSNIMNFFKTEITLANGEIRKRPLIETNGETGEIVWDKGRDFATVRKVLSMPQVNIVKKTEVQTGGFSKESILPKRNSDKLIARKKDWDPKKYGGFDSPTVAYSVLVVAKVEKGKSKKLKSVKELLGITIMERSSFEKNPIDFLEAKGYKEVKKDLIIKLPKYSLFELENGRKRMLASAGELQKGNELALPSKYVNFLYLASHYEKLKGSPEDNEQKQLFVEQHKHYLDEIIEQISEFSKRVILADANLDKVLSAYNKHRDKPIREQAENIIHLFTLTNLGAPAAFKYFDTTIDRKRYTSTKEVLDATLIHQSITGLYETRIDLSQLGGDGGGGGGSGGGGSGGGGSGGTLNIEDEYRLHETSKEPDVSLGSTWLSDFPQAWAETGGMGLAVRQAPLIIPLKATSTPVSIKQYPMSQEARLGIKPHIQRLLDQGILVPCQSPWNTPLLPVKKPGTNDYRPVQDLREVNKRVEDIHPTVPNPYNLLSGLPPSHQWYTVLDLKDAFFCLRLHPTSQPLFAFEWRDPEMGISGQLTWTRLPQGFKNSPTLFDEALHRDLAGFRIQHPDLILLQYVDDLLLAATSELDCQQGTRALLQTLGDLGYRASAKKAQICQKQVKYLGYLLKEGQRWLTEARKETVMGQPIPKTPRQLREFLGTAGFCRLWIPGFAEMAAPLYPLTKTGTLFNWGPDQQKAFQEIKQALLTAPALGLPDLTKPFELFVDEKQGYAKGVLTQKLGPWRRPVAYLSKKLDPVAAGWPPCLRMVAAIAVLTKDAGKLTMGQPLVILAPHAVEALVKQPPDRWLSNARMTHYQALLLDTDRVQFGPVVALNPATLLPLPEEGLQHDCLDILAEAHGTRSDLMDQPLPDADHTWYTDGSSFLQEGQRKAGAAVTTETEVIWARALPAGTSAQRAELIALTQALKMAEGKKLNVYTDSRYAFATAHIHGEIYRRRGLLTSEGKEIKNKDEILALLKALFLPKRLSIIHCPGHQKGNSAEARGNRMADQAAREVATRETPETSTLLAGKRTADGSEFEKRTADGSEFESPKKKAKVE

SEQ ID NO: 6136 - protein, 2100 aa, synthetic construct
MPAAKRVKLDGGDKKYSIGLDIGTNSVGWAVITDEYKVPSKKFKVLGNTDRHSIKKNLIGALLFDSGETAEATRLKRTARRRYTRRKNRICYLQEIFSNEMAKVDDSFFHRLEESFLVEEDKKHERHPIFGNIVDEVAYHEKYPTIYHLRKKLVDSTDKADLRLIYLALAHMIKFRGHFLIEGDLNPDNSDVDKLFIQLVQTYNQLFEENPINASGVDAKAILSARLSKSRRLENLIAQLPGEKKNGLFGNLIALSLGLTPNFKSNFDLAEDAKLQLSKDTYDDDLDNLLAQIGDQYADLFLAAKNLSDAILLSDILRVNTEITKAPLSASMIKRYDEHHQDLTLLKALVRQQLPEKYKEIFFDQSKNGYAGYIDGGASQEEFYKFIKPILEKMDGTEELLVKLNREDLLRKQRTFDNGSIPHQIHLGELHAILRRQEDFYPFLKDNREKIEKILTFRIPYYVGPLARGNSRFAWMTRKSEETITPWNFEEVVDKGASAQSFIERMTNFDKNLPNEKVLPKHSLLYEYFTVYNELTKVKYVTEGMRKPAFLSGEQKKAIVDLLFKTNRKVTVKQLKEDYFKKIECFDSVEISGVEDRFNASLGTYHDLLKIIKDKDFLDNEENEDILEDIVLTLTLFEDREMIEERLKTYAHLFDDKVMKQLKRRRYTGWGRLSRKLINGIRDKQSGKTILDFLKSDGFANRNFMQLIHDDSLTFKEDIQKAQVSGQGDSLHEHIANLAGSPAIKKGILQTVKVVDELVKVMGRHKPENIVIEMARENQTTQKGQKNSRERMKRIEEGIKELGSQILKEHPVENTQLQNEKLYLYYLQNGRDMYVDQELDINRLSDYDVDHIVPQSFLKDDSIDNKVLTRSDKARGKSDNVPSEEVVKKMKNYWRQLLNAKLITQRKFDNLTKAERGGLSELDKAGFIKRQLVETRQITKHVAQILDSRMNTKYDENDKLIREVKVITLKSKLVSDFRKDFQFYKVREINNYHHAHDAYLNAVVGTALIKKYPKLESEFVYGDYKVYDVRKMIAKSEQEIGKATAKYFFYSNIMNFFKTEITLANGEIRKRPLIETNGETGEIVWDKGRDFATVRKVLSMPQVNIVKKTEVQTGGFSKESILPKRNSDKLIARKKDWDPKKYGGFDSPTVAYSVLVVAKVEKGKSKKLKSVKELLGITIMERSSFEKNPIDFLEAKGYKEVKKDLIIKLPKYSLFELENGRKRMLASAGELQKGNELALPSKYVNFLYLASHYEKLKGSPEDNEQKQLFVEQHKHYLDEIIEQISEFSKRVILADANLDKVLSAYNKHRDKPIREQAENIIHLFTLTNLGAPAAFKYFDTTIDRKRYTSTKEVLDATLIHQSITGLYETRIDLSQLGGDGGGGGGSGGGGSGGGGSGGTLNIEDEHRLHETSKEPDVSLGSTWLSDFPQAWAETGGMGLAVRQAPLIIPLKATSTPVSIKQYPMSQEARLGIKPHIQRLLDQGILVPCQSPWNTPLLPVKKPGTNDYRPVQDLREVNKRVEDIHPTVPNPYNLLSGLPPSHQWYTVLDLKDAFFCLRLHPTSQPLFAFEWRDPEMGISGQLTWTRLPQGFKNSPTLFDEALHRDLADFRIQHPDLILLQYVDDLLLAATSELDCQQGTRALLQTLGNLGYRASAKKAQICQKQVKYLGYLLKEGQRWLTEARKETVMGQPTPKTPRQLREFLGTAGFCRLWIPGFAEMAAPLYPLTKTGTLFNWGPDQQKAYQEIKQALLTAPALGLPDLTKPFELFVDEKQGYAKGVLTQKLGPWRRPVAYLSKKLDPVAAGWPPCLRMVAAIAVLTKDAGKLTMGQPLVILAPHAVEALVKQPPDRWLSNARMTHYQALLLDTDRVQFGPVVALNPATLLPLPEEGLQHNCLDILAEAHGTRPDLTDQPLPDADHTWYTDGSSLLQEGQRKAGAAVTTETEVIWAKALPAGTSAQRAELIALTQALKMAEGKKLNVYTDSRYAFATAHIHGEIYRRRGLLTSEGKEIKNKDEILALLKALFLPKRLSIIHCPGHQKGHSAEARGNRMADQAARKAAITETPDTSTLLAGKRTADGSEFEKRTADGSEFESPKKKAKVE

SEQ ID NO: 6137 - protein, 2180 aa, synthetic construct
MPAAKRVKLDGGDKKYSIGLDIGTNSVGWAVITDEYKVPSKKFKVLGNTDRHSIKKNLIGALLFDSGETAEATRLKRTARRRYTRRKNRICYLQEIFSNEMAKVDDSFFHRLEESFLVEEDKKHERHPIFGNIVDEVAYHEKYPTIYHLRKKLVDSTDKADLRLIYLALAHMIKFRGHFLIEGDLNPDNSDVDKLFIQLVQTYNQLFEENPINASGVDAKAILSARLSKSRRLENLIAQLPGEKKNGLFGNLIALSLGLTPNFKSNFDLAEDAKLQLSKDTYDDDLDNLLAQIGDQYADLFLAAKNLSDAILLSDILRVNTEITKAPLSASMIKRYDEHHQDLTLLKALVRQQLPEKYKEIFFDQSKNGYAGYIDGGASQEEFYKFIKPILEKMDGTEELLVKLNREDLLRKQRTFDNGSIPHQIHLGELHAILRRQEDFYPFLKDNREKIEKILTFRIPYYVGPLARGNSRFAWMTRKSEETITPWNFEEVVDKGASAQSFIERMTNFDKNLPNEKVLPKHSLLYEYFTVYNELTKVKYVTEGMRKPAFLSGEQKKAIVDLLFKTNRKVTVKQLKEDYFKKIECFDSVEISGVEDRFNASLGTYHDLLKIIKDKDFLDNEENEDILEDIVLTLTLFEDREMIEERLKTYAHLFDDKVMKQLKRRRYTGWGRLSRKLINGIRDKQSGKTILDFLKSDGFANRNFMQLIHDDSLTFKEDIQKAQVSGQGDSLHEHIANLAGSPAIKKGILQTVKVVDELVKVMGRHKPENIVIEMARENQTTQKGQKNSRERMKRIEEGIKELGSQILKEHPVENTQLQNEKLYLYYLQNGRDMYVDQELDINRLSDYDVDHIVPQSFLKDDSIDNKVLTRSDKARGKSDNVPSEEVVKKMKNYWRQLLNAKLITQRKFDNLTKAERGGLSELDKAGFIKRQLVETRQITKHVAQILDSRMNTKYDENDKLIREVKVITLKSKLVSDFRKDFQFYKVREINNYHHAHDAYLNAVVGTALIKKYPKLESEFVYGDYKVYDVRKMIAKSEQEIGKATAKYFFYSNIMNFFKTEITLANGEIRKRPLIETNGETGEIVWDKGRDFATVRKVLSMPQVNIVKKTEVQTGGFSKESILPKRNSDKLIARKKDWDPKKYGGFDSPTVAYSVLVVAKVEKGKSKKLKSVKELLGITIMERSSFEKNPIDFLEAKGYKEVKKDLIIKLPKYSLFELENGRKRMLASAGELQKGNELALPSKYVNFLYLASHYEKLKGSPEDNEQKQLFVEQHKHYLDEIIEQISEFSKRVILADANLDKVLSAYNKHRDKPIREQAENIIHLFTLTNLGAPAAFKYFDTTIDRKRYTSTKEVLDATLIHQSITGLYETRIDLSQLGGDGGGGGGSGGGGSGGGGSGGMDPLQLLQPLEAEIKGTKLKAHWNSGATITCVPEAFLEDERPIQTMLIKTIHGEKQQDVYYLTFKVQGRKVEAEVLASPYDYILLNPSDVPWLMKKPLQLTVLVPLHEYQERLLQQTALPKEQKELLQKLFLKYDALWQHWENQVGHRRIKPHNIATGTLAPRPQKQYPINPKAKPSIQIVIDDLLKQGVLIQQNSTMNTPVYPVPKPDGKWRMVLDYREVNKTIPLIAAQNQHSAGILSSIYRGKYKTTLDLTNGFWAHPITPESYWLTAFTWQGKQYCWTRLPQGFLNSPALFNADVVDLLKEIPNVQAYVDDIYISHDDPQEHLEQLEKIFSILLNAGYVVSLKKSEIAQREVEFLGFNITKEGRGLTDTFKQKLLNITPPKDLKQLQSILGLLNFARNFIPNYSELVKPLYTIVAPANGKFISWTEDNSNQLQHIISVLNQADNLEERNPETRLIIKVNSSPSAGYIRYYNEGSKRPIMYVNYIFSKAEAKFTQTEKLLTTMHKGLIKAMDLAMGQEILVYSPIVSMTKIQRTPLPERKALPVRWITWMTYLEDPRIQFHYDKSLPELQQIPNVTEDVIAKTKHPSEFAMVFYTDGSAIKHPDVNKSHSAGMGIAQVQFIPEYKIVHQWSIPLGDHTAQLAEIAAVEFACKKALKISGPVLIVTDSFYVAESANKELPYWKSNGFLNNKKKPLRHVSKWKSIAECLQLKPDIIIMHEKGHQQPMTTLHTEGNNLADKLATQGSYVVHAGKRTADGSEFEKRTADGSEFESPKKKAKVE

SEQ ID NO: 6138 - protein, 2091 aa, synthetic construct
MPAAKRVKLDGGDKKYSIGLDIGTNSVGWAVITDEYKVPSKKFKVLGNTDRHSIKKNLIGALLFDSGETAEATRLKRTARRRYTRRKNRICYLQEIFSNEMAKVDDSFFHRLEESFLVEEDKKHERHPIFGNIVDEVAYHEKYPTIYHLRKKLVDSTDKADLRLIYLALAHMIKFRGHFLIEGDLNPDNSDVDKLFIQLVQTYNQLFEENPINASGVDAKAILSARLSKSRRLENLIAQLPGEKKNGLFGNLIALSLGLTPNFKSNFDLAEDAKLQLSKDTYDDDLDNLLAQIGDQYADLFLAAKNLSDAILLSDILRVNTEITKAPLSASMIKRYDEHHQDLTLLKALVRQQLPEKYKEIFFDQSKNGYAGYIDGGASQEEFYKFIKPILEKMDGTEELLVKLNREDLLRKQRTFDNGSIPHQIHLGELHAILRRQEDFYPFLKDNREKIEKILTFRIPYYVGPLARGNSRFAWMTRKSEETITPWNFEEVVDKGASAQSFIERMTNFDKNLPNEKVLPKHSLLYEYFTVYNELTKVKYVTEGMRKPAFLSGEQKKAIVDLLFKTNRKVTVKQLKEDYFKKIECFDSVEISGVEDRFNASLGTYHDLLKIIKDKDFLDNEENEDILEDIVLTLTLFEDREMIEERLKTYAHLFDDKVMKQLKRRRYTGWGRLSRKLINGIRDKQSGKTILDFLKSDGFANRNFMQLIHDDSLTFKEDIQKAQVSGQGDSLHEHIANLAGSPAIKKGILQTVKVVDELVKVMGRHKPENIVIEMARENQTTQKGQKNSRERMKRIEEGIKELGSQILKEHPVENTQLQNEKLYLYYLQNGRDMYVDQELDINRLSDYDVDHIVPQSFLKDDSIDNKVLTRSDKARGKSDNVPSEEVVKKMKNYWRQLLNAKLITQRKFDNLTKAERGGLSELDKAGFIKRQLVETRQITKHVAQILDSRMNTKYDENDKLIREVKVITLKSKLVSDFRKDFQFYKVREINNYHHAHDAYLNAVVGTALIKKYPKLESEFVYGDYKVYDVRKMIAKSEQEIGKATAKYFFYSNIMNFFKTEITLANGEIRKRPLIETNGETGEIVWDKGRDFATVRKVLSMPQVNIVKKTEVQTGGFSKESILPKRNSDKLIARKKDWDPKKYGGFDSPTVAYSVLVVAKVEKGKSKKLKSVKELLGITIMERSSFEKNPIDFLEAKGYKEVKKDLIIKLPKYSLFELENGRKRMLASAGELQKGNELALPSKYVNFLYLASHYEKLKGSPEDNEQKQLFVEQHKHYLDEIIEQISEFSKRVILADANLDKVLSAYNKHRDKPIREQAENIIHLFTLTNLGAPAAFKYFDTTIDRKRYTSTKEVLDATLIHQSITGLYETRIDLSQLGGDGGGGGGSGGGGSGGGGSGGIPWLMKKPLQLTTLVPLQEYEERLLKQTMLTGSYKEKLQSLFLKYDALWQHWENQVGHRRIKPHHIATGTVNPRPQKQYPINPKAKASIQTVINDLLKQGVLIQQNSIMNTPVYPVPKPDGKWRMVLDYREVNKTIPLIAAQNQHSAGILSSIFRGKYKTTLDLSNGFWAHSITPESYWLTAFTWLGQQYCWTRLPQGFLNSPALFNADVVDLLKEVPNVQVYVDDIYISHDDPREHLEQLEKVFSLLLNAGYVVSLKKSEIAQHEVEFLGFNITKEGRGLTETFKQKLLNITPPRDLKQLQSILGLLNFARNFIPNFSELVKPLYNIIATAPGKYITWTTDNSQQLQNIISMLNSAENLEERNPEVRLIMKVNTSPSAGYIRFYNEFAKRPIMYLNYVYTKAEVKFTNTEKLLTTIHKGLIKALDLGMGQEILVYSPIVSMTKIQKTPLPERKALPIRWITWMSYLEDPRIQFHYDKTLPELQQVPTVTDDIIAKIKHPSEFSMVFYTDGSAIKHPNVNKSHNAGMGIAQVQFKPEFTVINTWSIPLGDHTAQLAEVAAVEFACKKALKIDGPVLIVTDSFYVAESVNKELPYWQSNGFFNNKKKPLKHVSKWKSIADCIQLKPDIIIIHEKGHQPTASTFHTEGNNLADKLATQGSYVVNAGKRTADGSEFEKRTADGSEFESPKKKAKVE

SEQ ID NO: 6139 - protein, 2091 aa, synthetic construct
MPAAKRVKLDGGDKKYSIGLDIGTNSVGWAVITDEYKVPSKKFKVLGNTDRHSIKKNLIGALLFDSGETAEATRLKRTARRRYTRRKNRICYLQEIFSNEMAKVDDSFFHRLEESFLVEEDKKHERHPIFGNIVDEVAYHEKYPTIYHLRKKLVDSTDKADLRLIYLALAHMIKFRGHFLIEGDLNPDNSDVDKLFIQLVQTYNQLFEENPINASGVDAKAILSARLSKSRRLENLIAQLPGEKKNGLFGNLIALSLGLTPNFKSNFDLAEDAKLQLSKDTYDDDLDNLLAQIGDQYADLFLAAKNLSDAILLSDILRVNTEITKAPLSASMIKRYDEHHQDLTLLKALVRQQLPEKYKEIFFDQSKNGYAGYIDGGASQEEFYKFIKPILEKMDGTEELLVKLNREDLLRKQRTFDNGSIPHQIHLGELHAILRRQEDFYPFLKDNREKIEKILTFRIPYYVGPLARGNSRFAWMTRKSEETITPWNFEEVVDKGASAQSFIERMTNFDKNLPNEKVLPKHSLLYEYFTVYNELTKVKYVTEGMRKPAFLSGEQKKAIVDLLFKTNRKVTVKQLKEDYFKKIECFDSVEISGVEDRFNASLGTYHDLLKIIKDKDFLDNEENEDILEDIVLTLTLFEDREMIEERLKTYAHLFDDKVMKQLKRRRYTGWGRLSRKLINGIRDKQSGKTILDFLKSDGFANRNFMQLIHDDSLTFKEDIQKAQVSGQGDSLHEHIANLAGSPAIKKGILQTVKVVDELVKVMGRHKPENIVIEMARENQTTQKGQKNSRERMKRIEEGIKELGSQILKEHPVENTQLQNEKLYLYYLQNGRDMYVDQELDINRLSDYDVDHIVPQSFLKDDSIDNKVLTRSDKARGKSDNVPSEEVVKKMKNYWRQLLNAKLITQRKFDNLTKAERGGLSELDKAGFIKRQLVETRQITKHVAQILDSRMNTKYDENDKLIREVKVITLKSKLVSDFRKDFQFYKVREINNYHHAHDAYLNAVVGTALIKKYPKLESEFVYGDYKVYDVRKMIAKSEQEIGKATAKYFFYSNIMNFFKTEITLANGEIRKRPLIETNGETGEIVWDKGRDFATVRKVLSMPQVNIVKKTEVQTGGFSKESILPKRNSDKLIARKKDWDPKKYGGFDSPTVAYSVLVVAKVEKGKSKKLKSVKELLGITIMERSSFEKNPIDFLEAKGYKEVKKDLIIKLPKYSLFELENGRKRMLASAGELQKGNELALPSKYVNFLYLASHYEKLKGSPEDNEQKQLFVEQHKHYLDEIIEQISEFSKRVILADANLDKVLSAYNKHRDKPIREQAENIIHLFTLTNLGAPAAFKYFDTTIDRKRYTSTKEVLDATLIHQSITGLYETRIDLSQLGGDGGGGGGSGGGGSGGGGSGGIPWLMKKPLQLTTLVPLQEYEERLLKQTMLTGSYKEKLQSLFLKYDALWQHWENQVGHRRIKPHHIATGTVNPRPQKQYPINPKAKASIQTVINDLLKQGVLIQQNSIMNTPVYPVPKPDGKWRMVLDYREVNKTIPLIAAQNQHSAGILSSIFRGKYKTTLDLSNGFWAHSITPESYWLTAFTWLGQQYCWTRLPQGFLNSPALFNADVVDLLKEVPNVQVYVDDIYISHDDPREHLEQLEKVFSLLLNAGYVVSLKKSEIAQHEVEFLGFNITKEGRGLTETFKQKLLNITPPRDLKQLQSILGKLNFARNFIPNFSELVKPLYNIIATAPGKYITWTTDNSQQLQNIISMLNSAENLEERNPEVRLIMKVNTSPSAGYIRFYNEFAKRPIMYLNYVYTKAEVKFTNTEKLLTTIHKGLIKALDLGMGQEILVYSPIVSMTKIQKTPLPERKALPIRWITWMSYLEDPRIQFHYDKTLPELQQVPTVTDDIIAKIKHPSEFSMVFYTDGSAIKHPNVNKSHNAGMGIAQVQFKPEFTVINTWSIPLGDHTAQLAEVAAVEFACKKALKIDGPVLIVTDSFYVAESVNKELPYWQSNGFFNNKKKPLKHVSKWKSIADCIQLKPDIIIIHEKGHQPTASTFHTEGNNLADKLATQGSYVVNAGKRTADGSEFEKRTADGSEFESPKKKAKVE

SEQ ID NO: 6140 - protein, 2098 aa, synthetic construct
MPAAKRVKLDGGDKKYSIGLDIGTNSVGWAVITDEYKVPSKKFKVLGNTDRHSIKKNLIGALLFDSGETAEATRLKRTARRRYTRRKNRICYLQEIFSNEMAKVDDSFFHRLEESFLVEEDKKHERHPIFGNIVDEVAYHEKYPTIYHLRKKLVDSTDKADLRLIYLALAHMIKFRGHFLIEGDLNPDNSDVDKLFIQLVQTYNQLFEENPINASGVDAKAILSARLSKSRRLENLIAQLPGEKKNGLFGNLIALSLGLTPNFKSNFDLAEDAKLQLSKDTYDDDLDNLLAQIGDQYADLFLAAKNLSDAILLSDILRVNTEITKAPLSASMIKRYDEHHQDLTLLKALVRQQLPEKYKEIFFDQSKNGYAGYIDGGASQEEFYKFIKPILEKMDGTEELLVKLNREDLLRKQRTFDNGSIPHQIHLGELHAILRRQEDFYPFLKDNREKIEKILTFRIPYYVGPLARGNSRFAWMTRKSEETITPWNFEEVVDKGASAQSFIERMTNFDKNLPNEKVLPKHSLLYEYFTVYNELTKVKYVTEGMRKPAFLSGEQKKAIVDLLFKTNRKVTVKQLKEDYFKKIECFDSVEISGVEDRFNASLGTYHDLLKIIKDKDFLDNEENEDILEDIVLTLTLFEDREMIEERLKTYAHLFDDKVMKQLKRRRYTGWGRLSRKLINGIRDKQSGKTILDFLKSDGFANRNFMQLIHDDSLTFKEDIQKAQVSGQGDSLHEHIANLAGSPAIKKGILQTVKVVDELVKVMGRHKPENIVIEMARENQTTQKGQKNSRERMKRIEEGIKELGSQILKEHPVENTQLQNEKLYLYYLQNGRDMYVDQELDINRLSDYDVDHIVPQSFLKDDSIDNKVLTRSDKARGKSDNVPSEEVVKKMKNYWRQLLNAKLITQRKFDNLTKAERGGLSELDKAGFIKRQLVETRQITKHVAQILDSRMNTKYDENDKLIREVKVITLKSKLVSDFRKDFQFYKVREINNYHHAHDAYLNAVVGTALIKKYPKLESEFVYGDYKVYDVRKMIAKSEQEIGKATAKYFFYSNIMNFFKTEITLANGEIRKRPLIETNGETGEIVWDKGRDFATVRKVLSMPQVNIVKKTEVQTGGFSKESILPKRNSDKLIARKKDWDPKKYGGFDSPTVAYSVLVVAKVEKGKSKKLKSVKELLGITIMERSSFEKNPIDFLEAKGYKEVKKDLIIKLPKYSLFELENGRKRMLASAGELQKGNELALPSKYVNFLYLASHYEKLKGSPEDNEQKQLFVEQHKHYLDEIIEQISEFSKRVILADANLDKVLSAYNKHRDKPIREQAENIIHLFTLTNLGAPAAFKYFDTTIDRKRYTSTKEVLDATLIHQSITGLYETRIDLSQLGGDGGGGGGSGGGGSGGGGSGGVLNLEEEYRLHEKPVPSSIDPSWLQLFPTVWAERAGMGLANQVPPVVVELRSGASPVAVRQYPMSKEAREGIRPHIQRFLDLGVLVPCQSPWNTPLLPVKKPGTNDYRPVQDLREINKRVQDIHPTVPNPYNLLSSLPPSHTWYSVLDLKDAFFCLKLHPNSQPLFAFEWRDPEKGNTGQLTWTRLPQGFKNSPTLFNEALHRDLAPFRALNPQVVLLQYVDDLLVAAPTYRDCKEGTQKLLQELSKLGYRVSAKKAQLCQKEVTYLGYLLKEGKRWLTPARKATVMKIPPPTTPRQVREFLGTAGFCRLWIPGFASLAAPLYPLTKPSIPFIWTEEHQKAFDRIKEALLSAPALALPDLTKPFTLYVDERAGVARGVLTQTLGPWRRPVAYLSKKLDPVASGWPTCLKAVAAVALLLKDADKLTLGQNVTVIASHSLESIVRQPPDRWMTNARMTHYQSLLLNERVSFAPPAVLNPATLLPVESEATPVHRCSEILAEETGTRRDLKDQPLPGVPAWYTDGSSFIAEGKRRAGAAIVDGKRTVWASSLPEGTSAQKAELVALTQALRLAEGKDINIYTDSRYAFATAHIHGAIYKQRGWLTSAGKDIKNKEEILALLEAIHLPKRVAIIHCPGHQKGNDPVATGNRRADEAAKQAALSTRVLAETTKPAGKRTADGSEFEKRTADGSEFESPKKKAKVE

SEQ ID NO: 6141 - protein, 2098 aa, synthetic construct
MPAAKRVKLDGGDKKYSIGLDIGTNSVGWAVITDEYKVPSKKFKVLGNTDRHSIKKNLIGALLFDSGETAEATRLKRTARRRYTRRKNRICYLQEIFSNEMAKVDDSFFHRLEESFLVEEDKKHERHPIFGNIVDEVAYHEKYPTIYHLRKKLVDSTDKADLRLIYLALAHMIKFRGHFLIEGDLNPDNSDVDKLFIQLVQTYNQLFEENPINASGVDAKAILSARLSKSRRLENLIAQLPGEKKNGLFGNLIALSLGLTPNFKSNFDLAEDAKLQLSKDTYDDDLDNLLAQIGDQYADLFLAAKNLSDAILLSDILRVNTEITKAPLSASMIKRYDEHHQDLTLLKALVRQQLPEKYKEIFFDQSKNGYAGYIDGGASQEEFYKFIKPILEKMDGTEELLVKLNREDLLRKQRTFDNGSIPHQIHLGELHAILRRQEDFYPFLKDNREKIEKILTFRIPYYVGPLARGNSRFAWMTRKSEETITPWNFEEVVDKGASAQSFIERMTNFDKNLPNEKVLPKHSLLYEYFTVYNELTKVKYVTEGMRKPAFLSGEQKKAIVDLLFKTNRKVTVKQLKEDYFKKIECFDSVEISGVEDRFNASLGTYHDLLKIIKDKDFLDNEENEDILEDIVLTLTLFEDREMIEERLKTYAHLFDDKVMKQLKRRRYTGWGRLSRKLINGIRDKQSGKTILDFLKSDGFANRNFMQLIHDDSLTFKEDIQKAQVSGQGDSLHEHIANLAGSPAIKKGILQTVKVVDELVKVMGRHKPENIVIEMARENQTTQKGQKNSRERMKRIEEGIKELGSQILKEHPVENTQLQNEKLYLYYLQNGRDMYVDQELDINRLSDYDVDHIVPQSFLKDDSIDNKVLTRSDKARGKSDNVPSEEVVKKMKNYWRQLLNAKLITQRKFDNLTKAERGGLSELDKAGFIKRQLVETRQITKHVAQILDSRMNTKYDENDKLIREVKVITLKSKLVSDFRKDFQFYKVREINNYHHAHDAYLNAVVGTALIKKYPKLESEFVYGDYKVYDVRKMIAKSEQEIGKATAKYFFYSNIMNFFKTEITLANGEIRKRPLIETNGETGEIVWDKGRDFATVRKVLSMPQVNIVKKTEVQTGGFSKESILPKRNSDKLIARKKDWDPKKYGGFDSPTVAYSVLVVAKVEKGKSKKLKSVKELLGITIMERSSFEKNPIDFLEAKGYKEVKKDLIIKLPKYSLFELENGRKRMLASAGELQKGNELALPSKYVNFLYLASHYEKLKGSPEDNEQKQLFVEQHKHYLDEIIEQISEFSKRVILADANLDKVLSAYNKHRDKPIREQAENIIHLFTLTNLGAPAAFKYFDTTIDRKRYTSTKEVLDATLIHQSITGLYETRIDLSQLGGDGGGGGGSGGGGSGGGGSGGVLNLEEEYRLHEKPVPSSIDPSWLQLFPTVWAERAGMGLANQVPPVVVELRSGASPVAVRQYPMSKEAREGIRPHIQRFLDLGVLVPCQSPWNTPLLPVKKPGTNDYRPVQDLREINKRVQDIHPTVPNPYNLLSSLPPSHTWYSVLDLKDAFFCLKLHPNSQPLFAFEWRDPEKGNTGQLTWTRLPQGFKNSPTLFNEALHRDLAPFRALNPQVVLLQYVDDLLVAAPTYRDCKEGTQKLLQELSKLGYRVSAKKAQLCQKEVTYLGYLLKEGKRWLTPARKATVMKIPPPTTPRQVREFLGKAGFCRLFIPGFASLAAPLYPLTKPSIPFIWTEEHQKAFDRIKEALLSAPALALPDLTKPFTLYVDERAGVARGVLTQTLGPWRRPVAYLSKKLDPVASGWPTCLKAVAAVALLLKDADKLTLGQNVTVIASHSLESIVRQPPDRWMTNARMTHYQSLLLNERVSFAPPAVLNPATLLPVESEATPVHRCSEILAEETGTRRDLKDQPLPGVPAWYTDGSSFIAEGKRRAGAAIVDGKRTVWASSLPEGTSAQKAELVALTQALRLAEGKDINIYTDSRYAFATAHIHGAIYKQRGWLTSAGKDIKNKEEILALLEAIHLPKRVAIIHCPGHQKGNDPVATGNRRADEAAKQAALSTRVLAETTKPAGKRTADGSEFEKRTADGSEFESPKKKAKVE

SEQ ID NO: 6142 - protein, 2100 aa, synthetic construct
MPAAKRVKLDGGDKKYSIGLDIGTNSVGWAVITDEYKVPSKKFKVLGNTDRHSIKKNLIGALLFDSGETAEATRLKRTARRRYTRRKNRICYLQEIFSNEMAKVDDSFFHRLEESFLVEEDKKHERHPIFGNIVDEVAYHEKYPTIYHLRKKLVDSTDKADLRLIYLALAHMIKFRGHFLIEGDLNPDNSDVDKLFIQLVQTYNQLFEENPINASGVDAKAILSARLSKSRRLENLIAQLPGEKKNGLFGNLIALSLGLTPNFKSNFDLAEDAKLQLSKDTYDDDLDNLLAQIGDQYADLFLAAKNLSDAILLSDILRVNTEITKAPLSASMIKRYDEHHQDLTLLKALVRQQLPEKYKEIFFDQSKNGYAGYIDGGASQEEFYKFIKPILEKMDGTEELLVKLNREDLLRKQRTFDNGSIPHQIHLGELHAILRRQEDFYPFLKDNREKIEKILTFRIPYYVGPLARGNSRFAWMTRKSEETITPWNFEEVVDKGASAQSFIERMTNFDKNLPNEKVLPKHSLLYEYFTVYNELTKVKYVTEGMRKPAFLSGEQKKAIVDLLFKTNRKVTVKQLKEDYFKKIECFDSVEISGVEDRFNASLGTYHDLLKIIKDKDFLDNEENEDILEDIVLTLTLFEDREMIEERLKTYAHLFDDKVMKQLKRRRYTGWGRLSRKLINGIRDKQSGKTILDFLKSDGFANRNFMQLIHDDSLTFKEDIQKAQVSGQGDSLHEHIANLAGSPAIKKGILQTVKVVDELVKVMGRHKPENIVIEMARENQTTQKGQKNSRERMKRIEEGIKELGSQILKEHPVENTQLQNEKLYLYYLQNGRDMYVDQELDINRLSDYDVDHIVPQSFLKDDSIDNKVLTRSDKARGKSDNVPSEEVVKKMKNYWRQLLNAKLITQRKFDNLTKAERGGLSELDKAGFIKRQLVETRQITKHVAQILDSRMNTKYDENDKLIREVKVITLKSKLVSDFRKDFQFYKVREINNYHHAHDAYLNAVVGTALIKKYPKLESEFVYGDYKVYDVRKMIAKSEQEIGKATAKYFFYSNIMNFFKTEITLANGEIRKRPLIETNGETGEIVWDKGRDFATVRKVLSMPQVNIVKKTEVQTGGFSKESILPKRNSDKLIARKKDWDPKKYGGFDSPTVAYSVLVVAKVEKGKSKKLKSVKELLGITIMERSSFEKNPIDFLEAKGYKEVKKDLIIKLPKYSLFELENGRKRMLASAGELQKGNELALPSKYVNFLYLASHYEKLKGSPEDNEQKQLFVEQHKHYLDEIIEQISEFSKRVILADANLDKVLSAYNKHRDKPIREQAENIIHLFTLTNLGAPAAFKYFDTTIDRKRYTSTKEVLDATLIHQSITGLYETRIDLSQLGGDGGGGGGSGGGGSGGGGSGGTLNIEDEYRLHETSKEPDVPLGSTWLSDFPQAWAETGGMGLAVRQAPLIIPLKATSTPVSIKQYPMSQEARLGIKPHIQRLLDQGILVPCQSPWNTPLLPVKKPGTNDYRPVQDLREVNKRVEDIHPTVPNPYNLLSGLPPSHQWYTVLDLKDAFFCLRLHPTSQPLFAFEWRDPEMGISGQLTWTRLPQGFKNSPTLFNEALHRDLADFRIQHPDLILLQYVDDLLLAATSEQDCQRGTRALLQTLGNLGYRASAKKAQICQKQVKYLGYLLKEGQRWLTEARKETVMGQPTPKTPRQLREFLGTAGFCRLWIPGFAEMAAPLYPLTKPGTLFNWGPDQQKAYQEIKQALLTAPALGLPDLTKPFELFVDEKQGYAKGVLTQKLGPWRRPVAYLSKKLDPVAAGWPPCLRMVAAIAVLTKDAGKLTMGQPLVILAPHAVEALVKQPPDRWLSNARMTHYQAMLLDTDRVQFGPVVALNPATLLPLPEKEAPHDCLEILAETHGTRPDLTDQPIPDADYTWYTDGSSFLQEGQRRAGAAVTTETEVIWARALPAGTSAQRAELIALTQALKMAEGKKLNVYTDSRYAFATAHVHGEIYRRRGWLTSEGREIKNKNEILALLKALFLPKRLSIIHCPGHQKGNSAEARGNRMADQAAREAAMKAVLETSTLLAGKRTADGSEFEKRTADGSEFESPKKKAKVE

SEQ ID NO: 6143 - protein, 2107 aa, synthetic construct
MPAAKRVKLDGGDKKYSIGLDIGTNSVGWAVITDEYKVPSKKFKVLGNTDRHSIKKNLIGALLFDSGETAEATRLKRTARRRYTRRKNRICYLQEIFSNEMAKVDDSFFHRLEESFLVEEDKKHERHPIFGNIVDEVAYHEKYPTIYHLRKKLVDSTDKADLRLIYLALAHMIKFRGHFLIEGDLNPDNSDVDKLFIQLVQTYNQLFEENPINASGVDAKAILSARLSKSRRLENLIAQLPGEKKNGLFGNLIALSLGLTPNFKSNFDLAEDAKLQLSKDTYDDDLDNLLAQIGDQYADLFLAAKNLSDAILLSDILRVNTEITKAPLSASMIKRYDEHHQDLTLLKALVRQQLPEKYKEIFFDQSKNGYAGYIDGGASQEEFYKFIKPILEKMDGTEELLVKLNREDLLRKQRTFDNGSIPHQIHLGELHAILRRQEDFYPFLKDNREKIEKILTFRIPYYVGPLARGNSRFAWMTRKSEETITPWNFEEVVDKGASAQSFIERMTNFDKNLPNEKVLPKHSLLYEYFTVYNELTKVKYVTEGMRKPAFLSGEQKKAIVDLLFKTNRKVTVKQLKEDYFKKIECFDSVEISGVEDRFNASLGTYHDLLKIIKDKDFLDNEENEDILEDIVLTLTLFEDREMIEERLKTYAHLFDDKVMKQLKRRRYTGWGRLSRKLINGIRDKQSGKTILDFLKSDGFANRNFMQLIHDDSLTFKEDIQKAQVSGQGDSLHEHIANLAGSPAIKKGILQTVKVVDELVKVMGRHKPENIVIEMARENQTTQKGQKNSRERMKRIEEGIKELGSQILKEHPVENTQLQNEKLYLYYLQNGRDMYVDQELDINRLSDYDVDHIVPQSFLKDDSIDNKVLTRSDKARGKSDNVPSEEVVKKMKNYWRQLLNAKLITQRKFDNLTKAERGGLSELDKAGFIKRQLVETRQITKHVAQILDSRMNTKYDENDKLIREVKVITLKSKLVSDFRKDFQFYKVREINNYHHAHDAYLNAVVGTALIKKYPKLESEFVYGDYKVYDVRKMIAKSEQEIGKATAKYFFYSNIMNFFKTEITLANGEIRKRPLIETNGETGEIVWDKGRDFATVRKVLSMPQVNIVKKTEVQTGGFSKESILPKRNSDKLIARKKDWDPKKYGGFDSPTVAYSVLVVAKVEKGKSKKLKSVKELLGITIMERSSFEKNPIDFLEAKGYKEVKKDLIIKLPKYSLFELENGRKRMLASAGELQKGNELALPSKYVNFLYLASHYEKLKGSPEDNEQKQLFVEQHKHYLDEIIEQISEFSKRVILADANLDKVLSAYNKHRDKPIREQAENIIHLFTLTNLGAPAAFKYFDTTIDRKRYTSTKEVLDATLIHQSITGLYETRIDLSQLGGDGGGGGGSGGGGSGGGGSGGGGSGGTAPLEEEYRLFLEAPIQNVTLLEQWKREIPKVWAEINPPGLASTQAPIHVQLLSTALPVRVRQYPITLEAKRSLRETIRKFRAAGILRPVHSPWNTPLLPVRKSGTSEYRMVQDLREVNKRVETIHPTVPNPYTLLSLLPPDRIWYSVLDLKDAFFCIPLAPESQLIFAFEWADAEEGESGQLTWTRLPQGFKNSPTLFDEALNRDLQGFRLDHPSVSLLQYVDDLLIAADTQAACLSATRDLLMTLAELGYRVSGKKAQLCQEEVTYLGFKIHKGSRSLSNSRTQAILQIPVPKTKRQVREFLGTIGYCRLWIPGFAELAQPLYAATRGGNDPLVWGEKEEEAFQSLKLALTQPPALALPSLDKPFQLFVEETSGAAKGVLTQALGPWKRPVAYLSKRLDPVAAGWPRCLRAIAAAALLTREASKLTFGQDIEITSSHNLESLLRSPPDKWLTNARITQYQVLLLDPPRVRFKQTAALNPATLLPETDDTLPIHHCLDTLDSLTSTRPDLTDQPLAQAEATLFTDGSSYIRDGKRYAGAAVVTLDSVIWAEPLPIGTSAQKAELIALTKALEWSKDKSVNIYTDSRYAFATLHVHGMIYRERGLLTAGGKAIKNAPEILALLTAVWLPKRVAVMHCKGHQKDDAPTSTGNRRADEVAREVAIRPLSTQATISAGKRTADGSEFEKRTADGSEFESPKKKAKVE

SEQ ID NO: 6144 - protein, 2107 aa, synthetic construct
MPAAKRVKLDGGDKKYSIGLDIGTNSVGWAVITDEYKVPSKKFKVLGNTDRHSIKKNLIGALLFDSGETAEATRLKRTARRRYTRRKNRICYLQEIFSNEMAKVDDSFFHRLEESFLVEEDKKHERHPIFGNIVDEVAYHEKYPTIYHLRKKLVDSTDKADLRLIYLALAHMIKFRGHFLIEGDLNPDNSDVDKLFIQLVQTYNQLFEENPINASGVDAKAILSARLSKSRRLENLIAQLPGEKKNGLFGNLIALSLGLTPNFKSNFDLAEDAKLQLSKDTYDDDLDNLLAQIGDQYADLFLAAKNLSDAILLSDILRVNTEITKAPLSASMIKRYDEHHQDLTLLKALVRQQLPEKYKEIFFDQSKNGYAGYIDGGASQEEFYKFIKPILEKMDGTEELLVKLNREDLLRKQRTFDNGSIPHQIHLGELHAILRRQEDFYPFLKDNREKIEKILTFRIPYYVGPLARGNSRFAWMTRKSEETITPWNFEEVVDKGASAQSFIERMTNFDKNLPNEKVLPKHSLLYEYFTVYNELTKVKYVTEGMRKPAFLSGEQKKAIVDLLFKTNRKVTVKQLKEDYFKKIECFDSVEISGVEDRFNASLGTYHDLLKIIKDKDFLDNEENEDILEDIVLTLTLFEDREMIEERLKTYAHLFDDKVMKQLKRRRYTGWGRLSRKLINGIRDKQSGKTILDFLKSDGFANRNFMQLIHDDSLTFKEDIQKAQVSGQGDSLHEHIANLAGSPAIKKGILQTVKVVDELVKVMGRHKPENIVIEMARENQTTQKGQKNSRERMKRIEEGIKELGSQILKEHPVENTQLQNEKLYLYYLQNGRDMYVDQELDINRLSDYDVDHIVPQSFLKDDSIDNKVLTRSDKARGKSDNVPSEEVVKKMKNYWRQLLNAKLITQRKFDNLTKAERGGLSELDKAGFIKRQLVETRQITKHVAQILDSRMNTKYDENDKLIREVKVITLKSKLVSDFRKDFQFYKVREINNYHHAHDAYLNAVVGTALIKKYPKLESEFVYGDYKVYDVRKMIAKSEQEIGKATAKYFFYSNIMNFFKTEITLANGEIRKRPLIETNGETGEIVWDKGRDFATVRKVLSMPQVNIVKKTEVQTGGFSKESILPKRNSDKLIARKKDWDPKKYGGFDSPTVAYSVLVVAKVEKGKSKKLKSVKELLGITIMERSSFEKNPIDFLEAKGYKEVKKDLIIKLPKYSLFELENGRKRMLASAGELQKGNELALPSKYVNFLYLASHYEKLKGSPEDNEQKQLFVEQHKHYLDEIIEQISEFSKRVILADANLDKVLSAYNKHRDKPIREQAENIIHLFTLTNLGAPAAFKYFDTTIDRKRYTSTKEVLDATLIHQSITGLYETRIDLSQLGGDGGGGGGSGGGGSGGGGSGGGGSGGTAPLEEEYRLFLEAPIQNVTLLEQWKREIPKVWAEINPPGLASTQAPIHVQLLSTALPVRVRQYPITLEAKRSLRETIRKFRAAGILRPVHSPWNTPLLPVRKSGTSEYRMVQDLREVNKRVETIHPTVPNPYTLLSLLPPDRIWYSVLDLKDAFFCIPLAPESQLIFAFEWADAEEGESGQLTWTRLPQGFKNSPTLFNEALNRDLQGFRLDHPSVSLLQYVDDLLIAADTQAACLSATRDLLMTLAELGYRVSGKKAQLCQEEVTYLGFKIHKGSRSLSNSRTQAILQIPVPKTKRQVREFLGTIGYCRLWIPGFAELAQPLYAATRPGNDPLVWGEKEEEAFQSLKLALTQPPALALPSLDKPFQLFVEETSGAAKGVLTQALGPWKRPVAYLSKRLDPVAAGWPRCLRAIAAAALLTREASKLTFGQDIEITSSHNLESLLRSPPDKWLTNARITQYQVLLLDPPRVRFKQTAALNPATLLPETDDTLPIHHCLDTLDSLTSTRPDLTDQPLAQAEATLFTDGSSYIRDGKRYAGAAVVTLDSVIWAEPLPIGTSAQKAELIALTKALEWSKDKSVNIYTDSRYAFATLHVHGMIYRERGWLTAGGKAIKNAPEILALLTAVWLPKRVAVMHCKGHQKDDAPTSTGNRRADEVAREVAIRPLSTQATISAGKRTADGSEFEKRTADGSEFESPKKKAKVE

SEQ ID NO: 6145 - protein, 2096 aa, synthetic construct
MPAAKRVKLDGGDKKYSIGLDIGTNSVGWAVITDEYKVPSKKFKVLGNTDRHSIKKNLIGALLFDSGETAEATRLKRTARRRYTRRKNRICYLQEIFSNEMAKVDDSFFHRLEESFLVEEDKKHERHPIFGNIVDEVAYHEKYPTIYHLRKKLVDSTDKADLRLIYLALAHMIKFRGHFLIEGDLNPDNSDVDKLFIQLVQTYNQLFEENPINASGVDAKAILSARLSKSRRLENLIAQLPGEKKNGLFGNLIALSLGLTPNFKSNFDLAEDAKLQLSKDTYDDDLDNLLAQIGDQYADLFLAAKNLSDAILLSDILRVNTEITKAPLSASMIKRYDEHHQDLTLLKALVRQQLPEKYKEIFFDQSKNGYAGYIDGGASQEEFYKFIKPILEKMDGTEELLVKLNREDLLRKQRTFDNGSIPHQIHLGELHAILRRQEDFYPFLKDNREKIEKILTFRIPYYVGPLARGNSRFAWMTRKSEETITPWNFEEVVDKGASAQSFIERMTNFDKNLPNEKVLPKHSLLYEYFTVYNELTKVKYVTEGMRKPAFLSGEQKKAIVDLLFKTNRKVTVKQLKEDYFKKIECFDSVEISGVEDRFNASLGTYHDLLKIIKDKDFLDNEENEDILEDIVLTLTLFEDREMIEERLKTYAHLFDDKVMKQLKRRRYTGWGRLSRKLINGIRDKQSGKTILDFLKSDGFANRNFMQLIHDDSLTFKEDIQKAQVSGQGDSLHEHIANLAGSPAIKKGILQTVKVVDELVKVMGRHKPENIVIEMARENQTTQKGQKNSRERMKRIEEGIKELGSQILKEHPVENTQLQNEKLYLYYLQNGRDMYVDQELDINRLSDYDVDHIVPQSFLKDDSIDNKVLTRSDKARGKSDNVPSEEVVKKMKNYWRQLLNAKLITQRKFDNLTKAERGGLSELDKAGFIKRQLVETRQITKHVAQILDSRMNTKYDENDKLIREVKVITLKSKLVSDFRKDFQFYKVREINNYHHAHDAYLNAVVGTALIKKYPKLESEFVYGDYKVYDVRKMIAKSEQEIGKATAKYFFYSNIMNFFKTEITLANGEIRKRPLIETNGETGEIVWDKGRDFATVRKVLSMPQVNIVKKTEVQTGGFSKESILPKRNSDKLIARKKDWDPKKYGGFDSPTVAYSVLVVAKVEKGKSKKLKSVKELLGITIMERSSFEKNPIDFLEAKGYKEVKKDLIIKLPKYSLFELENGRKRMLASAGELQKGNELALPSKYVNFLYLASHYEKLKGSPEDNEQKQLFVEQHKHYLDEIIEQISEFSKRVILADANLDKVLSAYNKHRDKPIREQAENIIHLFTLTNLGAPAAFKYFDTTIDRKRYTSTKEVLDATLIHQSITGLYETRIDLSQLGGDGGGGGGSGGGGSGGGGSGGGGSGGVPWILKKPLELTIKLDLEEQQGTLLNNSILSKKGKEELKQLFEKYSALWQSWENQVGHRRIRPHKIATGTVKPTPQKQYHINPKAKPDIQIVINDLLKQGVLIQKESTMNTPVYPVPKPNGRWRMVLDYRAVNKVTPLIAVQNQHSYGILGSLFKGRYKTTIDLSNGFWAHPIVPEDYWITAFTWQGKQYCWTVLPQGFLNSPGLFNGDVVDLLQGIPNVEVYVDDVYISHDSEKEHLEYLDILFNRLKEAGYIISLKKSNIANSIVDFLGFQITNEGRGLTDTFKEKLENITAPTTLKQLQSILGLLNFARNFIPDFTELIAPLYALIPKSPKNYVPWQIEHSTTLETLITKLNGAEYLQGRKGDKTLIMKVNASYTTGYIRYYNEGEKKPISYVSIVFSKTELKFTELEKLLTTVHKGLLKALDLSMGQNIHVYSPIVSMQNIQKTPQTAKKALASRWLSWLSYLEDPRIRFFYDPQMPALKDLPAVDTGKDNKKHPSNFQHIFYTDGSAITSPTKEGHLNAGMGIVYFINKDGNLQKQQEWSISLGNHTAQFAEIAAFEFALKKCLPLGGNILVVTDSNYVAKAYNEELDVWASNGFVNNRKKPLKHISKWKSVADLKRLRPDVVVTHEPGHQKLDSSPHAYGNNLADQLATQASFKVHAGKRTADGSEFEKRTADGSEFESPKKKAKVE

SEQ ID NO: 6146 - protein, 2104 aa, synthetic construct
MPAAKRVKLDGGDKKYSIGLDIGTNSVGWAVITDEYKVPSKKFKVLGNTDRHSIKKNLIGALLFDSGETAEATRLKRTARRRYTRRKNRICYLQEIFSNEMAKVDDSFFHRLEESFLVEEDKKHERHPIFGNIVDEVAYHEKYPTIYHLRKKLVDSTDKADLRLIYLALAHMIKFRGHFLIEGDLNPDNSDVDKLFIQLVQTYNQLFEENPINASGVDAKAILSARLSKSRRLENLIAQLPGEKKNGLFGNLIALSLGLTPNFKSNFDLAEDAKLQLSKDTYDDDLDNLLAQIGDQYADLFLAAKNLSDAILLSDILRVNTEITKAPLSASMIKRYDEHHQDLTLLKALVRQQLPEKYKEIFFDQSKNGYAGYIDGGASQEEFYKFIKPILEKMDGTEELLVKLNREDLLRKQRTFDNGSIPHQIHLGELHAILRRQEDFYPFLKDNREKIEKILTFRIPYYVGPLARGNSRFAWMTRKSEETITPWNFEEVVDKGASAQSFIERMTNFDKNLPNEKVLPKHSLLYEYFTVYNELTKVKYVTEGMRKPAFLSGEQKKAIVDLLFKTNRKVTVKQLKEDYFKKIECFDSVEISGVEDRFNASLGTYHDLLKIIKDKDFLDNEENEDILEDIVLTLTLFEDREMIEERLKTYAHLFDDKVMKQLKRRRYTGWGRLSRKLINGIRDKQSGKTILDFLKSDGFANRNFMQLIHDDSLTFKEDIQKAQVSGQGDSLHEHIANLAGSPAIKKGILQTVKVVDELVKVMGRHKPENIVIEMARENQTTQKGQKNSRERMKRIEEGIKELGSQILKEHPVENTQLQNEKLYLYYLQNGRDMYVDQELDINRLSDYDVDHIVPQSFLKDDSIDNKVLTRSDKARGKSDNVPSEEVVKKMKNYWRQLLNAKLITQRKFDNLTKAERGGLSELDKAGFIKRQLVETRQITKHVAQILDSRMNTKYDENDKLIREVKVITLKSKLVSDFRKDFQFYKVREINNYHHAHDAYLNAVVGTALIKKYPKLESEFVYGDYKVYDVRKMIAKSEQEIGKATAKYFFYSNIMNFFKTEITLANGEIRKRPLIETNGETGEIVWDKGRDFATVRKVLSMPQVNIVKKTEVQTGGFSKESILPKRNSDKLIARKKDWDPKKYGGFDSPTVAYSVLVVAKVEKGKSKKLKSVKELLGITIMERSSFEKNPIDFLEAKGYKEVKKDLIIKLPKYSLFELENGRKRMLASAGELQKGNELALPSKYVNFLYLASHYEKLKGSPEDNEQKQLFVEQHKHYLDEIIEQISEFSKRVILADANLDKVLSAYNKHRDKPIREQAENIIHLFTLTNLGAPAAFKYFDTTIDRKRYTSTKEVLDATLIHQSITGLYETRIDLSQLGGDGGGGGGSGGGGSGGGGSGGGGSGGTLQLEEEYRLFEPESTQKQEMDIWLKNFPQAWAETGGMGTAHCQAPVLIQLKATATPISIRQYPMPHEAYQGIKPHIRRMLDQGILKPCQSPWNTPLLPVKKPGTEDYRPVQDLREVNKRVEDIHPTVPNPYNLLSTLPPSHPWYTVLDLKDAFFCLRLHSESQLLFAFEWRDPEIGLSGQLTWTRLPQGFKNSPTLFDEALHSDLADFRVRYPALVLLQYVDDLLLAAATRTECLEGTKALLETLGNKGYRASAKKAQICLQEVTYLGYSLKDGQRWLTKARKEAILSIPVPKNSRQVREFLGTAGYCRLWIPGFAELAAPLYPLTRPGTLFQWGTEQQLAFEDIKKALLSSPALGLPDITKPFELFIDENSGFAKGVLVQKLGPWKRPVAYLSKKLDTVASGWPPCLRMVAAIAILVKDAGKLTLGQPLTILTSHPVEALVRQPPNKWLSNARMTHYQAMLLDAERVHFGPTVSLNPATLLPLPSGGNHHDCLQILAETHGTRPDLTDQPLPDADLTWYTDGSSFIRNGEREAGAAVTTESEVIWAAPLPPGTSAQRAELIALTQALKMAEGKKLTVYTDSRYAFATTHVHGEIYRRRGLLTSEGKEIKNKNEILALLEALFLPKRLSIIHCPGHQKGDSPQAKGNRLADDTAKKAATETHSSLTVLPAGKRTADGSEFEKRTADGSEFESPKKKAKVE

SEQ ID NO: 6147 - protein, 2104 aa, synthetic construct
MPAAKRVKLDGGDKKYSIGLDIGTNSVGWAVITDEYKVPSKKFKVLGNTDRHSIKKNLIGALLFDSGETAEATRLKRTARRRYTRRKNRICYLQEIFSNEMAKVDDSFFHRLEESFLVEEDKKHERHPIFGNIVDEVAYHEKYPTIYHLRKKLVDSTDKADLRLIYLALAHMIKFRGHFLIEGDLNPDNSDVDKLFIQLVQTYNQLFEENPINASGVDAKAILSARLSKSRRLENLIAQLPGEKKNGLFGNLIALSLGLTPNFKSNFDLAEDAKLQLSKDTYDDDLDNLLAQIGDQYADLFLAAKNLSDAILLSDILRVNTEITKAPLSASMIKRYDEHHQDLTLLKALVRQQLPEKYKEIFFDQSKNGYAGYIDGGASQEEFYKFIKPILEKMDGTEELLVKLNREDLLRKQRTFDNGSIPHQIHLGELHAILRRQEDFYPFLKDNREKIEKILTFRIPYYVGPLARGNSRFAWMTRKSEETITPWNFEEVVDKGASAQSFIERMTNFDKNLPNEKVLPKHSLLYEYFTVYNELTKVKYVTEGMRKPAFLSGEQKKAIVDLLFKTNRKVTVKQLKEDYFKKIECFDSVEISGVEDRFNASLGTYHDLLKIIKDKDFLDNEENEDILEDIVLTLTLFEDREMIEERLKTYAHLFDDKVMKQLKRRRYTGWGRLSRKLINGIRDKQSGKTILDFLKSDGFANRNFMQLIHDDSLTFKEDIQKAQVSGQGDSLHEHIANLAGSPAIKKGILQTVKVVDELVKVMGRHKPENIVIEMARENQTTQKGQKNSRERMKRIEEGIKELGSQILKEHPVENTQLQNEKLYLYYLQNGRDMYVDQELDINRLSDYDVDHIVPQSFLKDDSIDNKVLTRSDKARGKSDNVPSEEVVKKMKNYWRQLLNAKLITQRKFDNLTKAERGGLSELDKAGFIKRQLVETRQITKHVAQILDSRMNTKYDENDKLIREVKVITLKSKLVSDFRKDFQFYKVREINNYHHAHDAYLNAVVGTALIKKYPKLESEFVYGDYKVYDVRKMIAKSEQEIGKATAKYFFYSNIMNFFKTEITLANGEIRKRPLIETNGETGEIVWDKGRDFATVRKVLSMPQVNIVKKTEVQTGGFSKESILPKRNSDKLIARKKDWDPKKYGGFDSPTVAYSVLVVAKVEKGKSKKLKSVKELLGITIMERSSFEKNPIDFLEAKGYKEVKKDLIIKLPKYSLFELENGRKRMLASAGELQKGNELALPSKYVNFLYLASHYEKLKGSPEDNEQKQLFVEQHKHYLDEIIEQISEFSKRVILADANLDKVLSAYNKHRDKPIREQAENIIHLFTLTNLGAPAAFKYFDTTIDRKRYTSTKEVLDATLIHQSITGLYETRIDLSQLGGDGGGGGGSGGGGSGGGGSGGGGSGGTLQLEEEYRLFEPESTQKQEMDIWLKNFPQAWAETGGMGTAHCQAPVLIQLKATATPISIRQYPMPHEAYQGIKPHIRRMLDQGILKPCQSPWNTPLLPVKKPGTEDYRPVQDLREVNKRVEDIHPTVPNPYNLLSTLPPSHPWYTVLDLKDAFFCLRLHSESQLLFAFEWRDPEIGLSGQLTWTRLPQGFKNSPTLFNEALHSDLADFRVRYPALVLLQYVDDLLLAAATRTECLEGTKALLETLGNKGYRASAKKAQICLQEVTYLGYSLKDGQRWLTKARKEAILSIPVPKNSRQVREFLGTAGYCRLWIPGFAELAAPLYPLTRPGTLFQWGTEQQLAFEDIKKALLSSPALGLPDITKPFELFIDENSGFAKGVLVQKLGPWKRPVAYLSKKLDTVASGWPPCLRMVAAIAILVKDAGKLTLGQPLTILTSHPVEALVRQPPNKWLSNARMTHYQAMLLDAERVHFGPTVSLNPATLLPLPSGGNHHDCLQILAETHGTRPDLTDQPLPDADLTWYTDGSSFIRNGEREAGAAVTTESEVIWAAPLPPGTSAQRAELIALTQALKMAEGKKLTVYTDSRYAFATTHVHGEIYRRRGWLTSEGKEIKNKNEILALLEALFLPKRLSIIHCPGHQKGDSPQAKGNRLADDTAKKAATETHSSLTVLPAGKRTADGSEFEKRTADGSEFESPKKKAKVE

SEQ ID NO: 6148 - protein, 2104 aa, synthetic construct
MPAAKRVKLDGGDKKYSIGLDIGTNSVGWAVITDEYKVPSKKFKVLGNTDRHSIKKNLIGALLFDSGETAEATRLKRTARRRYTRRKNRICYLQEIFSNEMAKVDDSFFHRLEESFLVEEDKKHERHPIFGNIVDEVAYHEKYPTIYHLRKKLVDSTDKADLRLIYLALAHMIKFRGHFLIEGDLNPDNSDVDKLFIQLVQTYNQLFEENPINASGVDAKAILSARLSKSRRLENLIAQLPGEKKNGLFGNLIALSLGLTPNFKSNFDLAEDAKLQLSKDTYDDDLDNLLAQIGDQYADLFLAAKNLSDAILLSDILRVNTEITKAPLSASMIKRYDEHHQDLTLLKALVRQQLPEKYKEIFFDQSKNGYAGYIDGGASQEEFYKFIKPILEKMDGTEELLVKLNREDLLRKQRTFDNGSIPHQIHLGELHAILRRQEDFYPFLKDNREKIEKILTFRIPYYVGPLARGNSRFAWMTRKSEETITPWNFEEVVDKGASAQSFIERMTNFDKNLPNEKVLPKHSLLYEYFTVYNELTKVKYVTEGMRKPAFLSGEQKKAIVDLLFKTNRKVTVKQLKEDYFKKIECFDSVEISGVEDRFNASLGTYHDLLKIIKDKDFLDNEENEDILEDIVLTLTLFEDREMIEERLKTYAHLFDDKVMKQLKRRRYTGWGRLSRKLINGIRDKQSGKTILDFLKSDGFANRNFMQLIHDDSLTFKEDIQKAQVSGQGDSLHEHIANLAGSPAIKKGILQTVKVVDELVKVMGRHKPENIVIEMARENQTTQKGQKNSRERMKRIEEGIKELGSQILKEHPVENTQLQNEKLYLYYLQNGRDMYVDQELDINRLSDYDVDHIVPQSFLKDDSIDNKVLTRSDKARGKSDNVPSEEVVKKMKNYWRQLLNAKLITQRKFDNLTKAERGGLSELDKAGFIKRQLVETRQITKHVAQILDSRMNTKYDENDKLIREVKVITLKSKLVSDFRKDFQFYKVREINNYHHAHDAYLNAVVGTALIKKYPKLESEFVYGDYKVYDVRKMIAKSEQEIGKATAKYFFYSNIMNFFKTEITLANGEIRKRPLIETNGETGEIVWDKGRDFATVRKVLSMPQVNIVKKTEVQTGGFSKESILPKRNSDKLIARKKDWDPKKYGGFDSPTVAYSVLVVAKVEKGKSKKLKSVKELLGITIMERSSFEKNPIDFLEAKGYKEVKKDLIIKLPKYSLFELENGRKRMLASAGELQKGNELALPSKYVNFLYLASHYEKLKGSPEDNEQKQLFVEQHKHYLDEIIEQISEFSKRVILADANLDKVLSAYNKHRDKPIREQAENIIHLFTLTNLGAPAAFKYFDTTIDRKRYTSTKEVLDATLIHQSITGLYETRIDLSQLGGDGGGGGGSGGGGSGGGGSGGGGSGGTLQLEEEYRLFEPESTQKQEMDIWLKNFPQAWAETGGMGTAHCQAPVLIQLKATATPISIRQYPMPHEAYQGIKPHIRRMLDQGILKPCQSPWNTPLLPVKKPGTEDYRPVQDLREVNKRVEDIHPTVPNPYNLLSTLPPSHPWYTVLDLKDAFFCLRLHSESQLLFAFEWRDPEIGLSGQLTWTRLPQGFKNSPTLFNEALHSDLADFRVRYPALVLLQYVDDLLLAAATRTECLEGTKALLETLGNKGYRASAKKAQICLQEVTYLGYSLKDGQRWLTKARKEAILSIPVPKNSRQVREFLGKAGYCRLFIPGFAELAAPLYPLTRPGTLFQWGTEQQLAFEDIKKALLSSPALGLPDITKPFELFIDENSGFAKGVLVQKLGPWKRPVAYLSKKLDTVASGWPPCLRMVAAIAILVKDAGKLTLGQPLTILTSHPVEALVRQPPNKWLSNARMTHYQAMLLDAERVHFGPTVSLNPATLLPLPSGGNHHDCLQILAETHGTRPDLTDQPLPDADLTWYTDGSSFIRNGEREAGAAVTTESEVIWAAPLPPGTSAQRAELIALTQALKMAEGKKLTVYTDSRYAFATTHVHGEIYRRRGWLTSEGKEIKNKNEILALLEALFLPKRLSIIHCPGHQKGDSPQAKGNRLADDTAKKAATETHSSLTVLPAGKRTADGSEFEKRTADGSEFESPKKKAKVE

SEQ ID NO: 6149 - protein, 2185 aa, synthetic construct
MPAAKRVKLDGGDKKYSIGLDIGTNSVGWAVITDEYKVPSKKFKVLGNTDRHSIKKNLIGALLFDSGETAEATRLKRTARRRYTRRKNRICYLQEIFSNEMAKVDDSFFHRLEESFLVEEDKKHERHPIFGNIVDEVAYHEKYPTIYHLRKKLVDSTDKADLRLIYLALAHMIKFRGHFLIEGDLNPDNSDVDKLFIQLVQTYNQLFEENPINASGVDAKAILSARLSKSRRLENLIAQLPGEKKNGLFGNLIALSLGLTPNFKSNFDLAEDAKLQLSKDTYDDDLDNLLAQIGDQYADLFLAAKNLSDAILLSDILRVNTEITKAPLSASMIKRYDEHHQDLTLLKALVRQQLPEKYKEIFFDQSKNGYAGYIDGGASQEEFYKFIKPILEKMDGTEELLVKLNREDLLRKQRTFDNGSIPHQIHLGELHAILRRQEDFYPFLKDNREKIEKILTFRIPYYVGPLARGNSRFAWMTRKSEETITPWNFEEVVDKGASAQSFIERMTNFDKNLPNEKVLPKHSLLYEYFTVYNELTKVKYVTEGMRKPAFLSGEQKKAIVDLLFKTNRKVTVKQLKEDYFKKIECFDSVEISGVEDRFNASLGTYHDLLKIIKDKDFLDNEENEDILEDIVLTLTLFEDREMIEERLKTYAHLFDDKVMKQLKRRRYTGWGRLSRKLINGIRDKQSGKTILDFLKSDGFANRNFMQLIHDDSLTFKEDIQKAQVSGQGDSLHEHIANLAGSPAIKKGILQTVKVVDELVKVMGRHKPENIVIEMARENQTTQKGQKNSRERMKRIEEGIKELGSQILKEHPVENTQLQNEKLYLYYLQNGRDMYVDQELDINRLSDYDVDHIVPQSFLKDDSIDNKVLTRSDKARGKSDNVPSEEVVKKMKNYWRQLLNAKLITQRKFDNLTKAERGGLSELDKAGFIKRQLVETRQITKHVAQILDSRMNTKYDENDKLIREVKVITLKSKLVSDFRKDFQFYKVREINNYHHAHDAYLNAVVGTALIKKYPKLESEFVYGDYKVYDVRKMIAKSEQEIGKATAKYFFYSNIMNFFKTEITLANGEIRKRPLIETNGETGEIVWDKGRDFATVRKVLSMPQVNIVKKTEVQTGGFSKESILPKRNSDKLIARKKDWDPKKYGGFDSPTVAYSVLVVAKVEKGKSKKLKSVKELLGITIMERSSFEKNPIDFLEAKGYKEVKKDLIIKLPKYSLFELENGRKRMLASAGELQKGNELALPSKYVNFLYLASHYEKLKGSPEDNEQKQLFVEQHKHYLDEIIEQISEFSKRVILADANLDKVLSAYNKHRDKPIREQAENIIHLFTLTNLGAPAAFKYFDTTIDRKRYTSTKEVLDATLIHQSITGLYETRIDLSQLGGDGGGGGGSGGGGSGGGGSGGGGSGGMNPLQLLQPLPAEIKGTKLLAHWNSGATITCIPESFLEDEQPIKKTLIKTIHGEKQQNVYYVTFKVKGRKVEAEVIASPYEYILLSPTDVPWLTQQPLQLTILVPLQEYQEKILSKTALPEDQKQQLKTLFVKYDNLWQHWENQVGHRKIRPHNIATGDYPPRPQKQYPINPKAKPSIQIVIDDLLKQGVLTPQNSTMNTPVYPVPKPDGRWRMVLDYREVNKTIPLTAAQNQHSAGILATIVRQKYKTTLDLANGFWAHPITPESYWLTAFTWQGKQYCWTRLPQGFLNSPALFNADVVDLLKEIPNVQVYVDDIYLSHDDPKEHVQQLEKVFQILLQAGYVVSLKKSEIGQKTVEFLGFNITKEGRGLTDTFKTKLLNITPPKDLKQLQSILGLLNFARNFIPNFAELVQPLYNLIAPAKGKYIEWSEENTKQLNMVIEALNTASNLEERLPEQRLVIKVNTSPSAGYVRYYNETGKKPIMYLNYVFSKAELKFSMLEKLLTTMHKALIKAMDLAMGQEILVYSPIVSMTKIQKTPLPERKALPIRWITWMTYLEDPRIQFHYDKTLPELKHIPDVYTSSQSPVKHPSQYEGVFYTDGSAIKSPDPTKSNNAGMGIVHATYKPEYQVLNQWSIPLGNHTAQMAEIAAVEFACKKALKIPGPVLVITDSFYVAESANKELPYWKSNGFVNNKKKPLKHISKWKSIAECLSMKPDITIQHEKGISLQIPVFILKGNALADKLATQGSYVVNAGKRTADGSEFEKRTADGSEFESPKKKAKVE

SEQ ID NO: 6150 - protein, 2185 aa, synthetic construct
MPAAKRVKLDGGDKKYSIGLDIGTNSVGWAVITDEYKVPSKKFKVLGNTDRHSIKKNLIGALLFDSGETAEATRLKRTARRRYTRRKNRICYLQEIFSNEMAKVDDSFFHRLEESFLVEEDKKHERHPIFGNIVDEVAYHEKYPTIYHLRKKLVDSTDKADLRLIYLALAHMIKFRGHFLIEGDLNPDNSDVDKLFIQLVQTYNQLFEENPINASGVDAKAILSARLSKSRRLENLIAQLPGEKKNGLFGNLIALSLGLTPNFKSNFDLAEDAKLQLSKDTYDDDLDNLLAQIGDQYADLFLAAKNLSDAILLSDILRVNTEITKAPLSASMIKRYDEHHQDLTLLKALVRQQLPEKYKEIFFDQSKNGYAGYIDGGASQEEFYKFIKPILEKMDGTEELLVKLNREDLLRKQRTFDNGSIPHQIHLGELHAILRRQEDFYPFLKDNREKIEKILTFRIPYYVGPLARGNSRFAWMTRKSEETITPWNFEEVVDKGASAQSFIERMTNFDKNLPNEKVLPKHSLLYEYFTVYNELTKVKYVTEGMRKPAFLSGEQKKAIVDLLFKTNRKVTVKQLKEDYFKKIECFDSVEISGVEDRFNASLGTYHDLLKIIKDKDFLDNEENEDILEDIVLTLTLFEDREMIEERLKTYAHLFDDKVMKQLKRRRYTGWGRLSRKLINGIRDKQSGKTILDFLKSDGFANRNFMQLIHDDSLTFKEDIQKAQVSGQGDSLHEHIANLAGSPAIKKGILQTVKVVDELVKVMGRHKPENIVIEMARENQTTQKGQKNSRERMKRIEEGIKELGSQILKEHPVENTQLQNEKLYLYYLQNGRDMYVDQELDINRLSDYDVDHIVPQSFLKDDSIDNKVLTRSDKARGKSDNVPSEEVVKKMKNYWRQLLNAKLITQRKFDNLTKAERGGLSELDKAGFIKRQLVETRQITKHVAQILDSRMNTKYDENDKLIREVKVITLKSKLVSDFRKDFQFYKVREINNYHHAHDAYLNAVVGTALIKKYPKLESEFVYGDYKVYDVRKMIAKSEQEIGKATAKYFFYSNIMNFFKTEITLANGEIRKRPLIETNGETGEIVWDKGRDFATVRKVLSMPQVNIVKKTEVQTGGFSKESILPKRNSDKLIARKKDWDPKKYGGFDSPTVAYSVLVVAKVEKGKSKKLKSVKELLGITIMERSSFEKNPIDFLEAKGYKEVKKDLIIKLPKYSLFELENGRKRMLASAGELQKGNELALPSKYVNFLYLASHYEKLKGSPEDNEQKQLFVEQHKHYLDEIIEQISEFSKRVILADANLDKVLSAYNKHRDKPIREQAENIIHLFTLTNLGAPAAFKYFDTTIDRKRYTSTKEVLDATLIHQSITGLYETRIDLSQLGGDGGGGGGSGGGGSGGGGSGGGGSGGMNPLQLLQPLPAEIKGTKLLAHWNSGATITCIPESFLEDEQPIKKTLIKTIHGEKQQNVYYVTFKVKGRKVEAEVIASPYEYILLSPTDVPWLTQQPLQLTILVPLQEYQEKILSKTALPEDQKQQLKTLFVKYDNLWQHWENQVGHRKIRPHNIATGDYPPRPQKQYPINPKAKPSIQIVIDDLLKQGVLTPQNSTMNTPVYPVPKPDGRWRMVLDYREVNKTIPLTAAQNQHSAGILATIVRQKYKTTLDLANGFWAHPITPESYWLTAFTWQGKQYCWTRLPQGFLNSPALFNADVVDLLKEIPNVQVYVDDIYLSHDDPKEHVQQLEKVFQILLQAGYVVSLKKSEIGQKTVEFLGFNITKEGRGLTDTFKTKLLNITPPKDLKQLQSILGKLNFARNFIPNFAELVQPLYNLIAPAKGKYIEWSEENTKQLNMVIEALNTASNLEERLPEQRLVIKVNTSPSAGYVRYYNETGKKPIMYLNYVFSKAELKFSMLEKLLTTMHKALIKAMDLAMGQEILVYSPIVSMTKIQKTPLPERKALPIRWITWMTYLEDPRIQFHYDKTLPELKHIPDVYTSSQSPVKHPSQYEGVFYTDGSAIKSPDPTKSNNAGMGIVHATYKPEYQVLNQWSIPLGNHTAQMAEIAAVEFACKKALKIPGPVLVITDSFYVAESANKELPYWKSNGFVNNKKKPLKHISKWKSIAECLSMKPDITIQHEKGISLQIPVFILKGNALADKLATQGSYVVNAGKRTADGSEFEKRTADGSEFESPKKKAKVE

SEQ ID NO: 6151 - protein, 2136 aa, synthetic construct
MPAAKRVKLDGGDKKYSIGLDIGTNSVGWAVITDEYKVPSKKFKVLGNTDRHSIKKNLIGALLFDSGETAEATRLKRTARRRYTRRKNRICYLQEIFSNEMAKVDDSFFHRLEESFLVEEDKKHERHPIFGNIVDEVAYHEKYPTIYHLRKKLVDSTDKADLRLIYLALAHMIKFRGHFLIEGDLNPDNSDVDKLFIQLVQTYNQLFEENPINASGVDAKAILSARLSKSRRLENLIAQLPGEKKNGLFGNLIALSLGLTPNFKSNFDLAEDAKLQLSKDTYDDDLDNLLAQIGDQYADLFLAAKNLSDAILLSDILRVNTEITKAPLSASMIKRYDEHHQDLTLLKALVRQQLPEKYKEIFFDQSKNGYAGYIDGGASQEEFYKFIKPILEKMDGTEELLVKLNREDLLRKQRTFDNGSIPHQIHLGELHAILRRQEDFYPFLKDNREKIEKILTFRIPYYVGPLARGNSRFAWMTRKSEETITPWNFEEVVDKGASAQSFIERMTNFDKNLPNEKVLPKHSLLYEYFTVYNELTKVKYVTEGMRKPAFLSGEQKKAIVDLLFKTNRKVTVKQLKEDYFKKIECFDSVEISGVEDRFNASLGTYHDLLKIIKDKDFLDNEENEDILEDIVLTLTLFEDREMIEERLKTYAHLFDDKVMKQLKRRRYTGWGRLSRKLINGIRDKQSGKTILDFLKSDGFANRNFMQLIHDDSLTFKEDIQKAQVSGQGDSLHEHIANLAGSPAIKKGILQTVKVVDELVKVMGRHKPENIVIEMARENQTTQKGQKNSRERMKRIEEGIKELGSQILKEHPVENTQLQNEKLYLYYLQNGRDMYVDQELDINRLSDYDVDHIVPQSFLKDDSIDNKVLTRSDKARGKSDNVPSEEVVKKMKNYWRQLLNAKLITQRKFDNLTKAERGGLSELDKAGFIKRQLVETRQITKHVAQILDSRMNTKYDENDKLIREVKVITLKSKLVSDFRKDFQFYKVREINNYHHAHDAYLNAVVGTALIKKYPKLESEFVYGDYKVYDVRKMIAKSEQEIGKATAKYFFYSNIMNFFKTEITLANGEIRKRPLIETNGETGEIVWDKGRDFATVRKVLSMPQVNIVKKTEVQTGGFSKESILPKRNSDKLIARKKDWDPKKYGGFDSPTVAYSVLVVAKVEKGKSKKLKSVKELLGITIMERSSFEKNPIDFLEAKGYKEVKKDLIIKLPKYSLFELENGRKRMLASAGELQKGNELALPSKYVNFLYLASHYEKLKGSPEDNEQKQLFVEQHKHYLDEIIEQISEFSKRVILADANLDKVLSAYNKHRDKPIREQAENIIHLFTLTNLGAPAAFKYFDTTIDRKRYTSTKEVLDATLIHQSITGLYETRIDLSQLGGDGGGGGGSGGGGSGGGGSGGGGSGGLLGRDLLTKLKAQIQFSTEGPQVTWEDRPAMCLVLNLEEEYRLHEKPVPPSIDPSWLQLFPMVWAEKAGMGLANQVPPVVVELKSDASPVAVRQYPMSKEAREGIRPHIQRFLDLGILVPCQSPWNTPLLPVKKPGTNDYRPVQDLREVNKRVQDIHPTVPNPYNLLSSLPPSHTWYSVLDLKDAFFCLKLHPNSQPLFAFEWRDPEKGNTGQLTWTRLPQGFKNSPTLFNEALHRDLASFRALNPQVVMLQYVDDLLVAAPTYRDCKEGTRRLLQELSKLGYRVSAKKAQLCREEVTYLGYLLKGGKRWLTPARKATVMKIPTPTTPRQVREFLGTAGFCRLWIPGFASLAAPLYPLTRPKVPFTWTEAHQEAFGRIKEALLSAPALALPDLTKPFALYVDEKEGVARGVLTQTLGPWRRPVAYLSKKLDPVASGWPTCLKAIAAVALLLKDADKLTLGQNVLVIAPHNLESIVRQPPDRWMTNARMTHYQSLLLNERVSFAPPAILNPATLLPVESDDTPIHICSEILAEETGTRPDLRDQPLPGVPAWYTDGSSFIMDGRRQAGAAIVDNKRTVWASNLPEGTSAQKAELIALTQALRLAEGKSINIYTDSRYAFATAHVHGAIYKQRGWLTSAGKDIKNKEEILALLEAIHLPKRVAIIHCPGHQRGTDPVATGNRKADEAAKQAAQSTRILTETTKNAGKRTADGSEFEKRTADGSEFESPKKKAKVE

SEQ ID NO: 6152 - protein, 2136 aa, synthetic construct
MPAAKRVKLDGGDKKYSIGLDIGTNSVGWAVITDEYKVPSKKFKVLGNTDRHSIKKNLIGALLFDSGETAEATRLKRTARRRYTRRKNRICYLQEIFSNEMAKVDDSFFHRLEESFLVEEDKKHERHPIFGNIVDEVAYHEKYPTIYHLRKKLVDSTDKADLRLIYLALAHMIKFRGHFLIEGDLNPDNSDVDKLFIQLVQTYNQLFEENPINASGVDAKAILSARLSKSRRLENLIAQLPGEKKNGLFGNLIALSLGLTPNFKSNFDLAEDAKLQLSKDTYDDDLDNLLAQIGDQYADLFLAAKNLSDAILLSDILRVNTEITKAPLSASMIKRYDEHHQDLTLLKALVRQQLPEKYKEIFFDQSKNGYAGYIDGGASQEEFYKFIKPILEKMDGTEELLVKLNREDLLRKQRTFDNGSIPHQIHLGELHAILRRQEDFYPFLKDNREKIEKILTFRIPYYVGPLARGNSRFAWMTRKSEETITPWNFEEVVDKGASAQSFIERMTNFDKNLPNEKVLPKHSLLYEYFTVYNELTKVKYVTEGMRKPAFLSGEQKKAIVDLLFKTNRKVTVKQLKEDYFKKIECFDSVEISGVEDRFNASLGTYHDLLKIIKDKDFLDNEENEDILEDIVLTLTLFEDREMIEERLKTYAHLFDDKVMKQLKRRRYTGWGRLSRKLINGIRDKQSGKTILDFLKSDGFANRNFMQLIHDDSLTFKEDIQKAQVSGQGDSLHEHIANLAGSPAIKKGILQTVKVVDELVKVMGRHKPENIVIEMARENQTTQKGQKNSRERMKRIEEGIKELGSQILKEHPVENTQLQNEKLYLYYLQNGRDMYVDQELDINRLSDYDVDHIVPQSFLKDDSIDNKVLTRSDKARGKSDNVPSEEVVKKMKNYWRQLLNAKLITQRKFDNLTKAERGGLSELDKAGFIKRQLVETRQITKHVAQILDSRMNTKYDENDKLIREVKVITLKSKLVSDFRKDFQFYKVREINNYHHAHDAYLNAVVGTALIKKYPKLESEFVYGDYKVYDVRKMIAKSEQEIGKATAKYFFYSNIMNFFKTEITLANGEIRKRPLIETNGETGEIVWDKGRDFATVRKVLSMPQVNIVKKTEVQTGGFSKESILPKRNSDKLIARKKDWDPKKYGGFDSPTVAYSVLVVAKVEKGKSKKLKSVKELLGITIMERSSFEKNPIDFLEAKGYKEVKKDLIIKLPKYSLFELENGRKRMLASAGELQKGNELALPSKYVNFLYLASHYEKLKGSPEDNEQKQLFVEQHKHYLDEIIEQISEFSKRVILADANLDKVLSAYNKHRDKPIREQAENIIHLFTLTNLGAPAAFKYFDTTIDRKRYTSTKEVLDATLIHQSITGLYETRIDLSQLGGDGGGGGGSGGGGSGGGGSGGGGSGGLLGRDLLTKLKAQIQFSTEGPQVTWEDRPAMCLVLNLEEEYRLHEKPVPPSIDPSWLQLFPMVWAEKAGMGLANQVPPVVVELKSDASPVAVRQYPMSKEAREGIRPHIQRFLDLGILVPCQSPWNTPLLPVKKPGTNDYRPVQDLREVNKRVQDIHPTVPNPYNLLSSLPPSHTWYSVLDLKDAFFCLKLHPNSQPLFAFEWRDPEKGNTGQLTWTRLPQGFKNSPTLFNEALHRDLASFRALNPQVVMLQYVDDLLVAAPTYRDCKEGTRRLLQELSKLGYRVSAKKAQLCREEVTYLGYLLKGGKRWLTPARKATVMKIPTPTTPRQVREFLGKAGFCRLFIPGFASLAAPLYPLTRPKVPFTWTEAHQEAFGRIKEALLSAPALALPDLTKPFALYVDEKEGVARGVLTQTLGPWRRPVAYLSKKLDPVASGWPTCLKAIAAVALLLKDADKLTLGQNVLVIAPHNLESIVRQPPDRWMTNARMTHYQSLLLNERVSFAPPAILNPATLLPVESDDTPIHICSEILAEETGTRPDLRDQPLPGVPAWYTDGSSFIMDGRRQAGAAIVDNKRTVWASNLPEGTSAQKAELIALTQALRLAEGKSINIYTDSRYAFATAHVHGAIYKQRGWLTSAGKDIKNKEEILALLEAIHLPKRVAIIHCPGHQRGTDPVATGNRKADEAAKQAAQSTRILTETTKNAGKRTADGSEFEKRTADGSEFESPKKKAKVE

SEQ ID NO: 6153 - protein, 2227 aa, synthetic construct
MPAAKRVKLDGGDKKYSIGLDIGTNSVGWAVITDEYKVPSKKFKVLGNTDRHSIKKNLIGALLFDSGETAEATRLKRTARRRYTRRKNRICYLQEIFSNEMAKVDDSFFHRLEESFLVEEDKKHERHPIFGNIVDEVAYHEKYPTIYHLRKKLVDSTDKADLRLIYLALAHMIKFRGHFLIEGDLNPDNSDVDKLFIQLVQTYNQLFEENPINASGVDAKAILSARLSKSRRLENLIAQLPGEKKNGLFGNLIALSLGLTPNFKSNFDLAEDAKLQLSKDTYDDDLDNLLAQIGDQYADLFLAAKNLSDAILLSDILRVNTEITKAPLSASMIKRYDEHHQDLTLLKALVRQQLPEKYKEIFFDQSKNGYAGYIDGGASQEEFYKFIKPILEKMDGTEELLVKLNREDLLRKQRTFDNGSIPHQIHLGELHAILRRQEDFYPFLKDNREKIEKILTFRIPYYVGPLARGNSRFAWMTRKSEETITPWNFEEVVDKGASAQSFIERMTNFDKNLPNEKVLPKHSLLYEYFTVYNELTKVKYVTEGMRKPAFLSGEQKKAIVDLLFKTNRKVTVKQLKEDYFKKIECFDSVEISGVEDRFNASLGTYHDLLKIIKDKDFLDNEENEDILEDIVLTLTLFEDREMIEERLKTYAHLFDDKVMKQLKRRRYTGWGRLSRKLINGIRDKQSGKTILDFLKSDGFANRNFMQLIHDDSLTFKEDIQKAQVSGQGDSLHEHIANLAGSPAIKKGILQTVKVVDELVKVMGRHKPENIVIEMARENQTTQKGQKNSRERMKRIEEGIKELGSQILKEHPVENTQLQNEKLYLYYLQNGRDMYVDQELDINRLSDYDVDHIVPQSFLKDDSIDNKVLTRSDKARGKSDNVPSEEVVKKMKNYWRQLLNAKLITQRKFDNLTKAERGGLSELDKAGFIKRQLVETRQITKHVAQILDSRMNTKYDENDKLIREVKVITLKSKLVSDFRKDFQFYKVREINNYHHAHDAYLNAVVGTALIKKYPKLESEFVYGDYKVYDVRKMIAKSEQEIGKATAKYFFYSNIMNFFKTEITLANGEIRKRPLIETNGETGEIVWDKGRDFATVRKVLSMPQVNIVKKTEVQTGGFSKESILPKRNSDKLIARKKDWDPKKYGGFDSPTVAYSVLVVAKVEKGKSKKLKSVKELLGITIMERSSFEKNPIDFLEAKGYKEVKKDLIIKLPKYSLFELENGRKRMLASAGELQKGNELALPSKYVNFLYLASHYEKLKGSPEDNEQKQLFVEQHKHYLDEIIEQISEFSKRVILADANLDKVLSAYNKHRDKPIREQAENIIHLFTLTNLGAPAAFKYFDTTIDRKRYTSTKEVLDATLIHQSITGLYETRIDLSQLGGDGGGGGGSGGGGSGGGGSGGGGSGGTLGDQGSRGSDPLPEPRVTLTVEGIPTEFLVNTGAEHSVLTKPMGKMGSKRTVVAGATGSKVYPWTTKRLLKIGQKQVTHSFLVIPECPAPLLGRDLLTKLKAQIQFSTEGPQVTWEDRPAMCLVLNLEEEYRLHEKPVPPSIDPSWLQLFPMVWAEKAGMGLANQVPPVVVELKSDASPVAVRQYPMSKEAREGIRPHIQRFLDLGILVPCQSPWNTPLLPVKKPGTNDYRPVQDLREVNKRVQDIHPTVPNPYNLLSSLPPSHTWYSVLDLKDAFFCLKLHPNSQPLFAFEWRDPEKGNTGQLTWTRLPQGFKNSPTLFNEALHRDLASFRALNPQVVMLQYVDDLLVAAPTYRDCKEGTRRLLQELSKLGYRVSAKKAQLCREEVTYLGYLLKGGKRWLTPARKATVMKIPTPTTPRQVREFLGTAGFCRLWIPGFASLAAPLYPLTRPKVPFTWTEAHQEAFGRIKEALLSAPALALPDLTKPFALYVDEKEGVARGVLTQTLGPWRRPVAYLSKKLDPVASGWPTCLKAIAAVALLLKDADKLTLGQNVLVIAPHNLESIVRQPPDRWMTNARMTHYQSLLLNERVSFAPPAILNPATLLPVESDDTPIHICSEILAEETGTRPDLRDQPLPGVPAWYTDGSSFIMDGRRQAGAAIVDNKRTVWASNLPEGTSAQKAELIALTQALRLAEGKSINIYTDSRYAFATAHVHGAIYKQRGWLTSAGKDIKNKEEILALLEAIHLPKRVAIIHCPGHQRGTDPVATGNRKADEAAKQAAQSTRILTETTKNAGKRTADGSEFEKRTADGSEFESPKKKAKVE

SEQ ID NO: 6154 - protein, 2105 aa, synthetic construct
MPAAKRVKLDGGDKKYSIGLDIGTNSVGWAVITDEYKVPSKKFKVLGNTDRHSIKKNLIGALLFDSGETAEATRLKRTARRRYTRRKNRICYLQEIFSNEMAKVDDSFFHRLEESFLVEEDKKHERHPIFGNIVDEVAYHEKYPTIYHLRKKLVDSTDKADLRLIYLALAHMIKFRGHFLIEGDLNPDNSDVDKLFIQLVQTYNQLFEENPINASGVDAKAILSARLSKSRRLENLIAQLPGEKKNGLFGNLIALSLGLTPNFKSNFDLAEDAKLQLSKDTYDDDLDNLLAQIGDQYADLFLAAKNLSDAILLSDILRVNTEITKAPLSASMIKRYDEHHQDLTLLKALVRQQLPEKYKEIFFDQSKNGYAGYIDGGASQEEFYKFIKPILEKMDGTEELLVKLNREDLLRKQRTFDNGSIPHQIHLGELHAILRRQEDFYPFLKDNREKIEKILTFRIPYYVGPLARGNSRFAWMTRKSEETITPWNFEEVVDKGASAQSFIERMTNFDKNLPNEKVLPKHSLLYEYFTVYNELTKVKYVTEGMRKPAFLSGEQKKAIVDLLFKTNRKVTVKQLKEDYFKKIECFDSVEISGVEDRFNASLGTYHDLLKIIKDKDFLDNEENEDILEDIVLTLTLFEDREMIEERLKTYAHLFDDKVMKQLKRRRYTGWGRLSRKLINGIRDKQSGKTILDFLKSDGFANRNFMQLIHDDSLTFKEDIQKAQVSGQGDSLHEHIANLAGSPAIKKGILQTVKVVDELVKVMGRHKPENIVIEMARENQTTQKGQKNSRERMKRIEEGIKELGSQILKEHPVENTQLQNEKLYLYYLQNGRDMYVDQELDINRLSDYDVDHIVPQSFLKDDSIDNKVLTRSDKARGKSDNVPSEEVVKKMKNYWRQLLNAKLITQRKFDNLTKAERGGLSELDKAGFIKRQLVETRQITKHVAQILDSRMNTKYDENDKLIREVKVITLKSKLVSDFRKDFQFYKVREINNYHHAHDAYLNAVVGTALIKKYPKLESEFVYGDYKVYDVRKMIAKSEQEIGKATAKYFFYSNIMNFFKTEITLANGEIRKRPLIETNGETGEIVWDKGRDFATVRKVLSMPQVNIVKKTEVQTGGFSKESILPKRNSDKLIARKKDWDPKKYGGFDSPTVAYSVLVVAKVEKGKSKKLKSVKELLGITIMERSSFEKNPIDFLEAKGYKEVKKDLIIKLPKYSLFELENGRKRMLASAGELQKGNELALPSKYVNFLYLASHYEKLKGSPEDNEQKQLFVEQHKHYLDEIIEQISEFSKRVILADANLDKVLSAYNKHRDKPIREQAENIIHLFTLTNLGAPAAFKYFDTTIDRKRYTSTKEVLDATLIHQSITGLYETRIDLSQLGGDGGGGGGSGGGGSGGGGSGGGGSGGTLNIEDEYRLHETSKEPDVSLGSTWLSDFPQAWAETGGMGLAVRQAPLIIPLKATSTPVSIKQYPMSQEARLGIKPHIQRLLDQGILVPCQSPWNTPLLPVKKPGTNDYRPVQDLREVNKRVEDIHPTVPNPYNLLSGLPPSHQWYTVLDLKDAFFCLRLHPTSQPLFAFEWRDPEMGISGQLTWTRLPQGFKNSPTLFNEALHRDLAGFRIQHPDLILLQYVDDLLLAATSELDCQQGTRALLQTLGDLGYRASAKKAQICQKQVKYLGYLLKEGQRWLTEARKETVMGQPIPKTPRQLREFLGTAGFCRLWIPGFAEMAAPLYPLTKPGTLFNWGPDQQKAFQEIKQALLTAPALGLPDLTKPFELFVDEKQGYAKGVLTQKLGPWRRPVAYLSKKLDPVAAGWPPCLRMVAAIAVLTKDAGKLTMGQPLVILAPHAVEALVKQPPDRWLSNARMTHYQALLLDTDRVQFGPVVALNPATLLPLPEEGLQHDCLDILAEAHGTRSDLMDQPLPDADHTWYTDGSSFLQEGQRKAGAAVTTETEVIWARALPAGTSAQRAELIALTQALKMAEGKKLNVYTDSRYAFATAHIHGEIYRRRGWLTSEGKEIKNKDEILALLKALFLPKRLSIIHCPGHQKGNSAEARGNRMADQAAREVATRETPETSTLLAGKRTADGSEFEKRTADGSEFESPKKKAKVE

SEQ ID NO: 6155 - protein, 2105 aa, synthetic construct
MPAAKRVKLDGGDKKYSIGLDIGTNSVGWAVITDEYKVPSKKFKVLGNTDRHSIKKNLIGALLFDSGETAEATRLKRTARRRYTRRKNRICYLQEIFSNEMAKVDDSFFHRLEESFLVEEDKKHERHPIFGNIVDEVAYHEKYPTIYHLRKKLVDSTDKADLRLIYLALAHMIKFRGHFLIEGDLNPDNSDVDKLFIQLVQTYNQLFEENPINASGVDAKAILSARLSKSRRLENLIAQLPGEKKNGLFGNLIALSLGLTPNFKSNFDLAEDAKLQLSKDTYDDDLDNLLAQIGDQYADLFLAAKNLSDAILLSDILRVNTEITKAPLSASMIKRYDEHHQDLTLLKALVRQQLPEKYKEIFFDQSKNGYAGYIDGGASQEEFYKFIKPILEKMDGTEELLVKLNREDLLRKQRTFDNGSIPHQIHLGELHAILRRQEDFYPFLKDNREKIEKILTFRIPYYVGPLARGNSRFAWMTRKSEETITPWNFEEVVDKGASAQSFIERMTNFDKNLPNEKVLPKHSLLYEYFTVYNELTKVKYVTEGMRKPAFLSGEQKKAIVDLLFKTNRKVTVKQLKEDYFKKIECFDSVEISGVEDRFNASLGTYHDLLKIIKDKDFLDNEENEDILEDIVLTLTLFEDREMIEERLKTYAHLFDDKVMKQLKRRRYTGWGRLSRKLINGIRDKQSGKTILDFLKSDGFANRNFMQLIHDDSLTFKEDIQKAQVSGQGDSLHEHIANLAGSPAIKKGILQTVKVVDELVKVMGRHKPENIVIEMARENQTTQKGQKNSRERMKRIEEGIKELGSQILKEHPVENTQLQNEKLYLYYLQNGRDMYVDQELDINRLSDYDVDHIVPQSFLKDDSIDNKVLTRSDKARGKSDNVPSEEVVKKMKNYWRQLLNAKLITQRKFDNLTKAERGGLSELDKAGFIKRQLVETRQITKHVAQILDSRMNTKYDENDKLIREVKVITLKSKLVSDFRKDFQFYKVREINNYHHAHDAYLNAVVGTALIKKYPKLESEFVYGDYKVYDVRKMIAKSEQEIGKATAKYFFYSNIMNFFKTEITLANGEIRKRPLIETNGETGEIVWDKGRDFATVRKVLSMPQVNIVKKTEVQTGGFSKESILPKRNSDKLIARKKDWDPKKYGGFDSPTVAYSVLVVAKVEKGKSKKLKSVKELLGITIMERSSFEKNPIDFLEAKGYKEVKKDLIIKLPKYSLFELENGRKRMLASAGELQKGNELALPSKYVNFLYLASHYEKLKGSPEDNEQKQLFVEQHKHYLDEIIEQISEFSKRVILADANLDKVLSAYNKHRDKPIREQAENIIHLFTLTNLGAPAAFKYFDTTIDRKRYTSTKEVLDATLIHQSITGLYETRIDLSQLGGDGGGGGGSGGGGSGGGGSGGGGSGGTLNIEDEYRLHETSKGPDVPLGSTWLSDFPQAWAETGGMGLAVRQAPLIIPLKATSTPVSIKQYPMSQEARLGIKPHIQRLLDQGILVPCQSPWNTPLLPVKKPGTNDYRPVQDLREVNKRVEDIHPTVPNPYNLLSGLPPSHQWYTVLDLKDAFFCLRLHPTSQSLFAFEWRDPEMGISGQLTWTRLPQGFKNSPTLFNEALHRDLADFRIQHPDLILLQYVDDLLLAATSELDCQQGTRALLQTLGDLGYRASAKKAQICQKQVKYLGYLLKEGQRWLTEARKETVMGQPTPKTPRQLREFLGKAGFCRLFIPGFAEMAAPLYPLTKPGTLFEWGPDQQKAYQEIKQALLTAPALGLPDLTKPFELFVDEKQGYAKGVLTQKLGPWRRPVAYLSKKLDPVAAGWPPCLRMVAAIAVLTKDAGKLTMGQPLVILAPHAVEALVKQPPDRWLSNARMTHYQALLLDTDRVQFGPIVALNPATLLPLPEEGLQHDCLDILAEAHGTRPDLTDQPLPDADHTWYTDGSSFLQEGQRKAGAAVTTETEVVWAKALPAGTSAQRAELIALTQALKMAEGKKLNVYTDSRYAFATAHIHGEIYRRRGWLTSEGKEIKNKDEILALLKALFLPKRLSIIHCPGHQKGNRAEARGNRMADQAAREVATRETPETSTLLAGKRTADGSEFEKRTADGSEFESPKKKAKVE

SEQ ID NO: 6156 - protein, 2105 aa, synthetic construct
MPAAKRVKLDGGDKKYSIGLDIGTNSVGWAVITDEYKVPSKKFKVLGNTDRHSIKKNLIGALLFDSGETAEATRLKRTARRRYTRRKNRICYLQEIFSNEMAKVDDSFFHRLEESFLVEEDKKHERHPIFGNIVDEVAYHEKYPTIYHLRKKLVDSTDKADLRLIYLALAHMIKFRGHFLIEGDLNPDNSDVDKLFIQLVQTYNQLFEENPINASGVDAKAILSARLSKSRRLENLIAQLPGEKKNGLFGNLIALSLGLTPNFKSNFDLAEDAKLQLSKDTYDDDLDNLLAQIGDQYADLFLAAKNLSDAILLSDILRVNTEITKAPLSASMIKRYDEHHQDLTLLKALVRQQLPEKYKEIFFDQSKNGYAGYIDGGASQEEFYKFIKPILEKMDGTEELLVKLNREDLLRKQRTFDNGSIPHQIHLGELHAILRRQEDFYPFLKDNREKIEKILTFRIPYYVGPLARGNSRFAWMTRKSEETITPWNFEEVVDKGASAQSFIERMTNFDKNLPNEKVLPKHSLLYEYFTVYNELTKVKYVTEGMRKPAFLSGEQKKAIVDLLFKTNRKVTVKQLKEDYFKKIECFDSVEISGVEDRFNASLGTYHDLLKIIKDKDFLDNEENEDILEDIVLTLTLFEDREMIEERLKTYAHLFDDKVMKQLKRRRYTGWGRLSRKLINGIRDKQSGKTILDFLKSDGFANRNFMQLIHDDSLTFKEDIQKAQVSGQGDSLHEHIANLAGSPAIKKGILQTVKVVDELVKVMGRHKPENIVIEMARENQTTQKGQKNSRERMKRIEEGIKELGSQILKEHPVENTQLQNEKLYLYYLQNGRDMYVDQELDINRLSDYDVDHIVPQSFLKDDSIDNKVLTRSDKARGKSDNVPSEEVVKKMKNYWRQLLNAKLITQRKFDNLTKAERGGLSELDKAGFIKRQLVETRQITKHVAQILDSRMNTKYDENDKLIREVKVITLKSKLVSDFRKDFQFYKVREINNYHHAHDAYLNAVVGTALIKKYPKLESEFVYGDYKVYDVRKMIAKSEQEIGKATAKYFFYSNIMNFFKTEITLANGEIRKRPLIETNGETGEIVWDKGRDFATVRKVLSMPQVNIVKKTEVQTGGFSKESILPKRNSDKLIARKKDWDPKKYGGFDSPTVAYSVLVVAKVEKGKSKKLKSVKELLGITIMERSSFEKNPIDFLEAKGYKEVKKDLIIKLPKYSLFELENGRKRMLASAGELQKGNELALPSKYVNFLYLASHYEKLKGSPEDNEQKQLFVEQHKHYLDEIIEQISEFSKRVILADANLDKVLSAYNKHRDKPIREQAENIIHLFTLTNLGAPAAFKYFDTTIDRKRYTSTKEVLDATLIHQSITGLYETRIDLSQLGGDGGGGGGSGGGGSGGGGSGGGGSGGTLNIEDEHRLHETSKEPDVSLGSTWLSDFPQAWAETGGMGLAVRQAPLIIPLKATSTPVSIKQYPMSQEARLGIKPHIQRLLDQGILVPCQSPWNTPLLPVKKPGTNDYRPVQDLREVNKRVEDIHPTVPNPYNLLSGLPPSHQWYTVLDLKDAFFCLRLHPTSQPLFAFEWRDPEMGISGQLTWTRLPQGFKNSPTLFDEALHRDLADFRIQHPDLILLQYVDDLLLAATSELDCQQGTRALLQTLGNLGYRASAKKAQICQKQVKYLGYLLKEGQRWLTEARKETVMGQPTPKTPRQLREFLGTAGFCRLWIPGFAEMAAPLYPLTKTGTLFNWGPDQQKAYQEIKQALLTAPALGLPDLTKPFELFVDEKQGYAKGVLTQKLGPWRRPVAYLSKKLDPVAAGWPPCLRMVAAIAVLTKDAGKLTMGQPLVILAPHAVEALVKQPPDRWLSNARMTHYQALLLDTDRVQFGPVVALNPATLLPLPEEGLQHNCLDILAEAHGTRPDLTDQPLPDADHTWYTDGSSLLQEGQRKAGAAVTTETEVIWAKALPAGTSAQRAELIALTQALKMAEGKKLNVYTDSRYAFATAHIHGEIYRRRGLLTSEGKEIKNKDEILALLKALFLPKRLSIIHCPGHQKGHSAEARGNRMADQAARKAAITETPDTSTLLAGKRTADGSEFEKRTADGSEFESPKKKAKVE

SEQ ID NO: 6157 - protein, 2033 aa, synthetic construct
MPAAKRVKLDGGDKKYSIGLDIGTNSVGWAVITDEYKVPSKKFKVLGNTDRHSIKKNLIGALLFDSGETAEATRLKRTARRRYTRRKNRICYLQEIFSNEMAKVDDSFFHRLEESFLVEEDKKHERHPIFGNIVDEVAYHEKYPTIYHLRKKLVDSTDKADLRLIYLALAHMIKFRGHFLIEGDLNPDNSDVDKLFIQLVQTYNQLFEENPINASGVDAKAILSARLSKSRRLENLIAQLPGEKKNGLFGNLIALSLGLTPNFKSNFDLAEDAKLQLSKDTYDDDLDNLLAQIGDQYADLFLAAKNLSDAILLSDILRVNTEITKAPLSASMIKRYDEHHQDLTLLKALVRQQLPEKYKEIFFDQSKNGYAGYIDGGASQEEFYKFIKPILEKMDGTEELLVKLNREDLLRKQRTFDNGSIPHQIHLGELHAILRRQEDFYPFLKDNREKIEKILTFRIPYYVGPLARGNSRFAWMTRKSEETITPWNFEEVVDKGASAQSFIERMTNFDKNLPNEKVLPKHSLLYEYFTVYNELTKVKYVTEGMRKPAFLSGEQKKAIVDLLFKTNRKVTVKQLKEDYFKKIECFDSVEISGVEDRFNASLGTYHDLLKIIKDKDFLDNEENEDILEDIVLTLTLFEDREMIEERLKTYAHLFDDKVMKQLKRRRYTGWGRLSRKLINGIRDKQSGKTILDFLKSDGFANRNFMQLIHDDSLTFKEDIQKAQVSGQGDSLHEHIANLAGSPAIKKGILQTVKVVDELVKVMGRHKPENIVIEMARENQTTQKGQKNSRERMKRIEEGIKELGSQILKEHPVENTQLQNEKLYLYYLQNGRDMYVDQELDINRLSDYDVDHIVPQSFLKDDSIDNKVLTRSDKARGKSDNVPSEEVVKKMKNYWRQLLNAKLITQRKFDNLTKAERGGLSELDKAGFIKRQLVETRQITKHVAQILDSRMNTKYDENDKLIREVKVITLKSKLVSDFRKDFQFYKVREINNYHHAHDAYLNAVVGTALIKKYPKLESEFVYGDYKVYDVRKMIAKSEQEIGKATAKYFFYSNIMNFFKTEITLANGEIRKRPLIETNGETGEIVWDKGRDFATVRKVLSMPQVNIVKKTEVQTGGFSKESILPKRNSDKLIARKKDWDPKKYGGFDSPTVAYSVLVVAKVEKGKSKKLKSVKELLGITIMERSSFEKNPIDFLEAKGYKEVKKDLIIKLPKYSLFELENGRKRMLASAGELQKGNELALPSKYVNFLYLASHYEKLKGSPEDNEQKQLFVEQHKHYLDEIIEQISEFSKRVILADANLDKVLSAYNKHRDKPIREQAENIIHLFTLTNLGAPAAFKYFDTTIDRKRYTSTKEVLDATLIHQSITGLYETRIDLSQLGGDGGGGGGSGGGGSGGGGSGGGGSGGGRDIMKDIKVRLMTDSPDDSQDLMIGAIESNLFADQISWKSDQPVWLNQWPLKQEKLQALQQLVTEQLQLGHLEESNSPWNTPVFVIKKKSGKWRLLQDLRAVNATMHDMGALQPGLPSPVAVPKGWEIIIIDLQDCFFNIKLHPEDCKRFAFSVPSPNFKRPYQRFQWKVLPQGMKNSPTLCQKFVDKAILTVRDKYQDSYIVHYMDDILLAHPSRSIVDEILTSMIQALNKHGLVVSTEKIQKYDNLKYLGTHIQGDSVSYQKLQIRTDKLRTLNDFQKLLGNINWIRPFLKLTTGELKPLFEILNGDSNPISTRKLTPEACKALQLMNERLSTARVKRLDLSQPWSLCILKTEYTPTACLWQDGVVEWIHLPHISPKVITPYDIFCTQLIIKGRHRSKELFSKDPDYIVVPYTKVQFDLLLQEKEDWPISLLGFLGEVHFHLPKDPLLTFTLQTAIIFPHMTSTTPLEKGIVIFTDGSANGRSVTYIQGREPIIKENTQNTAQQAEIVAVITAFEEVSQPFNLYTDSKYVTGLFPEIETATLSPRTKIYTELKHLQRLIHKRQEKFYIGHIRGHTGLPGPLAQGNAYADSLTRILTAGKRTADGSEFEKRTADGSEFESPKKKAKVE

SEQ ID NO: 6158 - protein, 2097 aa, synthetic construct
MPAAKRVKLDGGDKKYSIGLDIGTNSVGWAVITDEYKVPSKKFKVLGNTDRHSIKKNLIGALLFDSGETAEATRLKRTARRRYTRRKNRICYLQEIFSNEMAKVDDSFFHRLEESFLVEEDKKHERHPIFGNIVDEVAYHEKYPTIYHLRKKLVDSTDKADLRLIYLALAHMIKFRGHFLIEGDLNPDNSDVDKLFIQLVQTYNQLFEENPINASGVDAKAILSARLSKSRRLENLIAQLPGEKKNGLFGNLIALSLGLTPNFKSNFDLAEDAKLQLSKDTYDDDLDNLLAQIGDQYADLFLAAKNLSDAILLSDILRVNTEITKAPLSASMIKRYDEHHQDLTLLKALVRQQLPEKYKEIFFDQSKNGYAGYIDGGASQEEFYKFIKPILEKMDGTEELLVKLNREDLLRKQRTFDNGSIPHQIHLGELHAILRRQEDFYPFLKDNREKIEKILTFRIPYYVGPLARGNSRFAWMTRKSEETITPWNFEEVVDKGASAQSFIERMTNFDKNLPNEKVLPKHSLLYEYFTVYNELTKVKYVTEGMRKPAFLSGEQKKAIVDLLFKTNRKVTVKQLKEDYFKKIECFDSVEISGVEDRFNASLGTYHDLLKIIKDKDFLDNEENEDILEDIVLTLTLFEDREMIEERLKTYAHLFDDKVMKQLKRRRYTGWGRLSRKLINGIRDKQSGKTILDFLKSDGFANRNFMQLIHDDSLTFKEDIQKAQVSGQGDSLHEHIANLAGSPAIKKGILQTVKVVDELVKVMGRHKPENIVIEMARENQTTQKGQKNSRERMKRIEEGIKELGSQILKEHPVENTQLQNEKLYLYYLQNGRDMYVDQELDINRLSDYDVDHIVPQSFLKDDSIDNKVLTRSDKARGKSDNVPSEEVVKKMKNYWRQLLNAKLITQRKFDNLTKAERGGLSELDKAGFIKRQLVETRQITKHVAQILDSRMNTKYDENDKLIREVKVITLKSKLVSDFRKDFQFYKVREINNYHHAHDAYLNAVVGTALIKKYPKLESEFVYGDYKVYDVRKMIAKSEQEIGKATAKYFFYSNIMNFFKTEITLANGEIRKRPLIETNGETGEIVWDKGRDFATVRKVLSMPQVNIVKKTEVQTGGFSKESILPKRNSDKLIARKKDWDPKKYGGFDSPTVAYSVLVVAKVEKGKSKKLKSVKELLGITIMERSSFEKNPIDFLEAKGYKEVKKDLIIKLPKYSLFELENGRKRMLASAGELQKGNELALPSKYVNFLYLASHYEKLKGSPEDNEQKQLFVEQHKHYLDEIIEQISEFSKRVILADANLDKVLSAYNKHRDKPIREQAENIIHLFTLTNLGAPAAFKYFDTTIDRKRYTSTKEVLDATLIHQSITGLYETRIDLSQLGGDGGGGGGSGGGGSGGGGSGGGGSGGLDDEYRLYSPLVKPDQNIQFWLEQFPQAWAETAGMGLAKQVPPQVIQLKASATPVSVRQYPLSKEAQEGIRPHVQRLIQQGILVPVQSPWNTPLLPVRKPGTNDYRPVQDLREVNKRVQDIHPTVPNPYNLLCALPPQRSWYTVLDLKDAFFCLRLHPTSQPLFAFEWRDPGTGRTGQLTWTRLPQGFKNSPTIFNEALHRDLANFRIQHPQVTLLQYVDDLLLAGATKQDCLEGTKALLLELSDLGYRASAKKAQICRREVTYLGYSLRDGQRWLTEARKKTVVQIPAPTTAKQVREFLGKAGFCRLFIPGFATLAAPLYPLTKPKGEFSWAPEHQKAFDAIKKALLSAPALALPDVTKPFTLYVDERKGVARGVLTQTLGPWRRPVAYLSKKLDPVASGWPVCLKAIAAVAILVKDADKLTLGQNITVIAPHALENIVRQPPDRWMTNARMTHYQSLLLTERVTFAPPAALNPATLLPEETDEPVTHDCHQLLIEETGVRKDLTDIPLTGEVLTWFTDGSSYVVEGKRMAGAAVVDGTRTIWASSLPEGTSAQKAELMALTQALRLAEGKSINIYTDSRYAFATAHVHGAIYKQRGWLTSAGREIKNKEEILSLLEALHLPKRLAIIHCPGHQKAKDPISRGNQMADRVAKQAAQGVNLLPAGKRTADGSEFEKRTADGSEFESPKKKAKVE

SEQ ID NO: 6159 - protein, 2097 aa, synthetic construct; identical to SEQ ID NO: 6158

SEQ ID NO: 6160 - protein, 2096 aa, synthetic construct
MPAAKRVKLDGGDKKYSIGLDIGTNSVGWAVITDEYKVPSKKFKVLGNTDRHSIKKNLIGALLFDSGETAEATRLKRTARRRYTRRKNRICYLQEIFSNEMAKVDDSFFHRLEESFLVEEDKKHERHPIFGNIVDEVAYHEKYPTIYHLRKKLVDSTDKADLRLIYLALAHMIKFRGHFLIEGDLNPDNSDVDKLFIQLVQTYNQLFEENPINASGVDAKAILSARLSKSRRLENLIAQLPGEKKNGLFGNLIALSLGLTPNFKSNFDLAEDAKLQLSKDTYDDDLDNLLAQIGDQYADLFLAAKNLSDAILLSDILRVNTEITKAPLSASMIKRYDEHHQDLTLLKALVRQQLPEKYKEIFFDQSKNGYAGYIDGGASQEEFYKFIKPILEKMDGTEELLVKLNREDLLRKQRTFDNGSIPHQIHLGELHAILRRQEDFYPFLKDNREKIEKILTFRIPYYVGPLARGNSRFAWMTRKSEETITPWNFEEVVDKGASAQSFIERMTNFDKNLPNEKVLPKHSLLYEYFTVYNELTKVKYVTEGMRKPAFLSGEQKKAIVDLLFKTNRKVTVKQLKEDYFKKIECFDSVEISGVEDRFNASLGTYHDLLKIIKDKDFLDNEENEDILEDIVLTLTLFEDREMIEERLKTYAHLFDDKVMKQLKRRRYTGWGRLSRKLINGIRDKQSGKTILDFLKSDGFANRNFMQLIHDDSLTFKEDIQKAQVSGQGDSLHEHIANLAGSPAIKKGILQTVKVVDELVKVMGRHKPENIVIEMARENQTTQKGQKNSRERMKRIEEGIKELGSQILKEHPVENTQLQNEKLYLYYLQNGRDMYVDQELDINRLSDYDVDHIVPQSFLKDDSIDNKVLTRSDKARGKSDNVPSEEVVKKMKNYWRQLLNAKLITQRKFDNLTKAERGGLSELDKAGFIKRQLVETRQITKHVAQILDSRMNTKYDENDKLIREVKVITLKSKLVSDFRKDFQFYKVREINNYHHAHDAYLNAVVGTALIKKYPKLESEFVYGDYKVYDVRKMIAKSEQEIGKATAKYFFYSNIMNFFKTEITLANGEIRKRPLIETNGETGEIVWDKGRDFATVRKVLSMPQVNIVKKTEVQTGGFSKESILPKRNSDKLIARKKDWDPKKYGGFDSPTVAYSVLVVAKVEKGKSKKLKSVKELLGITIMERSSFEKNPIDFLEAKGYKEVKKDLIIKLPKYSLFELENGRKRMLASAGELQKGNELALPSKYVNFLYLASHYEKLKGSPEDNEQKQLFVEQHKHYLDEIIEQISEFSKRVILADANLDKVLSAYNKHRDKPIREQAENIIHLFTLTNLGAPAAFKYFDTTIDRKRYTSTKEVLDATLIHQSITGLYETRIDLSQLGGDGGGGGGSGGGGSGGGGSGGGGSGGVPWLMKKPLQLTVLVPLHEYQERLLQQTALPKEQKELLQKLFLKYDALWQHWENQVGHRRIKPHNIATGTLAPRPQKQYPINPKAKPSIQIVIDDLLKQGVLIQQNSTMNTPVYPVPKPDGKWRMVLDYREVNKTIPLIAAQNQHSAGILSSIYRGKYKTTLDLTNGFWAHPITPESYWLTAFTWQGKQYCWTRLPQGFLNSPALFTADVVDLLKEIPNVQAYVDDIYISHDDPQEHLEQLEKIFSILLNAGYVVSLKKSEIAQREVEFLGFNITKEGRGLTDTFKQKLLNITPPKDLKQLQSILGLLNFARNFIPNYSELVKPLYTIVANANGKFISWTEDNSNQLQHIISVLNQADNLEERNPETRLIIKVNSSPSAGYIRYYNEGSKRPIMYVNYIFSKAEAKFTQTEKLLTTMHKGLIKAMDLAMGQEILVYSPIVSMTKIQRTPLPERKALPVRWITWMTYLEDPRIQFHYDKSLPELQQIPNVTEDVIAKTKHPSEFAMVFYTDGSAIKHPDVNKSHSAGMGIAQVQFIPEYKIVHQWSIPLGDHTAQLAEIAAVEFACKKALKISGPVLIVTDSFYVAESANKELPYWKSNGFLNNKKKPLRHVSKWKSIAECLQLKPDIIIMHEKGHQQPMTTLHTEGNNLADKLATQGSYVVHAGKRTADGSEFEKRTADGSEFESPKKKAKVE

SEQ ID NO: 6161 - protein, 2185 aa, synthetic construct
MPAAKRVKLDGGDKKYSIGLDIGTNSVGWAVITDEYKVPSKKFKVLGNTDRHSIKKNLIGALLFDSGETAEATRLKRTARRRYTRRKNRICYLQEIFSNEMAKVDDSFFHRLEESFLVEEDKKHERHPIFGNIVDEVAYHEKYPTIYHLRKKLVDSTDKADLRLIYLALAHMIKFRGHFLIEGDLNPDNSDVDKLFIQLVQTYNQLFEENPINASGVDAKAILSARLSKSRRLENLIAQLPGEKKNGLFGNLIALSLGLTPNFKSNFDLAEDAKLQLSKDTYDDDLDNLLAQIGDQYADLFLAAKNLSDAILLSDILRVNTEITKAPLSASMIKRYDEHHQDLTLLKALVRQQLPEKYKEIFFDQSKNGYAGYIDGGASQEEFYKFIKPILEKMDGTEELLVKLNREDLLRKQRTFDNGSIPHQIHLGELHAILRRQEDFYPFLKDNREKIEKILTFRIPYYVGPLARGNSRFAWMTRKSEETITPWNFEEVVDKGASAQSFIERMTNFDKNLPNEKVLPKHSLLYEYFTVYNELTKVKYVTEGMRKPAFLSGEQKKAIVDLLFKTNRKVTVKQLKEDYFKKIECFDSVEISGVEDRFNASLGTYHDLLKIIKDKDFLDNEENEDILEDIVLTLTLFEDREMIEERLKTYAHLFDDKVMKQLKRRRYTGWGRLSRKLINGIRDKQSGKTILDFLKSDGFANRNFMQLIHDDSLTFKEDIQKAQVSGQGDSLHEHIANLAGSPAIKKGILQTVKVVDELVKVMGRHKPENIVIEMARENQTTQKGQKNSRERMKRIEEGIKELGSQILKEHPVENTQLQNEKLYLYYLQNGRDMYVDQELDINRLSDYDVDHIVPQSFLKDDSIDNKVLTRSDKARGKSDNVPSEEVVKKMKNYWRQLLNAKLITQRKFDNLTKAERGGLSELDKAGFIKRQLVETRQITKHVAQILDSRMNTKYDENDKLIREVKVITLKSKLVSDFRKDFQFYKVREINNYHHAHDAYLNAVVGTALIKKYPKLESEFVYGDYKVYDVRKMIAKSEQEIGKATAKYFFYSNIMNFFKTEITLANGEIRKRPLIETNGETGEIVWDKGRDFATVRKVLSMPQVNIVKKTEVQTGGFSKESILPKRNSDKLIARKKDWDPKKYGGFDSPTVAYSVLVVAKVEKGKSKKLKSVKELLGITIMERSSFEKNPIDFLEAKGYKEVKKDLIIKLPKYSLFELENGRKRMLASAGELQKGNELALPSKYVNFLYLASHYEKLKGSPEDNEQKQLFVEQHKHYLDEIIEQISEFSKRVILADANLDKVLSAYNKHRDKPIREQAENIIHLFTLTNLGAPAAFKYFDTTIDRKRYTSTKEVLDATLIHQSITGLYETRIDLSQLGGDGGGGGGSGGGGSGGGGSGGGGSGGMDPLQLLQPLEAEIKGTKLKAHWNSGATITCVPQAFLEEEVPIKNIWIKTIHGEKEQPVYYLTFKIQGRKVEAEVISSPYDYILVSPSDIPWLMKKPLQLTTLVPLQEYEERLLKQTMLTGSYKEKLQSLFLKYDALWQHWENQVGHRRIKPHHIATGTVNPRPQKQYPINPKAKASIQTVINDLLKQGVLIQQNSIMNTPVYPVPKPDGKWRMVLDYREVNKTIPLIAAQNQHSAGILSSIFRGKYKTTLDLSNGFWAHSITPESYWLTAFTWLGQQYCWTRLPQGFLNSPALFTADVVDLLKEVPNVQVYVDDIYISHDDPREHLEQLEKVFSLLLNAGYVVSLKKSEIAQHEVEFLGFNITKEGRGLTETFKQKLLNITPPRDLKQLQSILGLLNFARNFIPNFSELVKPLYNIIATANGKYITWTTDNSQQLQNIISMLNSAENLEERNPEVRLIMKVNTSPSAGYIRFYNEFAKRPIMYLNYVYTKAEVKFTNTEKLLTTIHKGLIKALDLGMGQEILVYSPIVSMTKIQKTPLPERKALPIRWITWMSYLEDPRIQFHYDKTLPELQQVPTVTDDIIAKIKHPSEFSMVFYTDGSAIKHPNVNKSHNAGMGIAQVQFKPEFTVINTWSIPLGDHTAQLAEVAAVEFACKKALKIDGPVLIVTDSFYVAESVNKELPYWQSNGFFNNKKKPLKHVSKWKSIADCIQLKPDIIIIHEKGHQPTASTFHTEGNNLADKLATQGSYVVNAGKRTADGSEFEKRTADGSEFESPKKKAKVE

SEQ ID NO: 6162 - protein, 2096 aa, synthetic construct
MPAAKRVKLDGGDKKYSIGLDIGTNSVGWAVITDEYKVPSKKFKVLGNTDRHSIKKNLIGALLFDSGETAEATRLKRTARRRYTRRKNRICYLQEIFSNEMAKVDDSFFHRLEESFLVEEDKKHERHPIFGNIVDEVAYHEKYPTIYHLRKKLVDSTDKADLRLIYLALAHMIKFRGHFLIEGDLNPDNSDVDKLFIQLVQTYNQLFEENPINASGVDAKAILSARLSKSRRLENLIAQLPGEKKNGLFGNLIALSLGLTPNFKSNFDLAEDAKLQLSKDTYDDDLDNLLAQIGDQYADLFLAAKNLSDAILLSDILRVNTEITKAPLSASMIKRYDEHHQDLTLLKALVRQQLPEKYKEIFFDQSKNGYAGYIDGGASQEEFYKFIKPILEKMDGTEELLVKLNREDLLRKQRTFDNGSIPHQIHLGELHAILRRQEDFYPFLKDNREKIEKILTFRIPYYVGPLARGNSRFAWMTRKSEETITPWNFEEVVDKGASAQSFIERMTNFDKNLPNEKVLPKHSLLYEYFTVYNELTKVKYVTEGMRKPAFLSGEQKKAIVDLLFKTNRKVTVKQLKEDYFKKIECFDSVEISGVEDRFNASLGTYHDLLKIIKDKDFLDNEENEDILEDIVLTLTLFEDREMIEERLKTYAHLFDDKVMKQLKRRRYTGWGRLSRKLINGIRDKQSGKTILDFLKSDGFANRNFMQLIHDDSLTFKEDIQKAQVSGQGDSLHEHIANLAGSPAIKKGILQTVKVVDELVKVMGRHKPENIVIEMARENQTTQKGQKNSRERMKRIEEGIKELGSQILKEHPVENTQLQNEKLYLYYLQNGRDMYVDQELDINRLSDYDVDHIVPQSFLKDDSIDNKVLTRSDKARGKSDNVPSEEVVKKMKNYWRQLLNAKLITQRKFDNLTKAERGGLSELDKAGFIKRQLVETRQITKHVAQILDSRMNTKYDENDKLIREVKVITLKSKLVSDFRKDFQFYKVREINNYHHAHDAYLNAVVGTALIKKYPKLESEFVYGDYKVYDVRKMIAKSEQEIGKATAKYFFYSNIMNFFKTEITLANGEIRKRPLIETNGETGEIVWDKGRDFATVRKVLSMPQVNIVKKTEVQTGGFSKESILPKRNSDKLIARKKDWDPKKYGGFDSPTVAYSVLVVAKVEKGKSKKLKSVKELLGITIMERSSFEKNPIDFLEAKGYKEVKKDLIIKLPKYSLFELENGRKRMLASAGELQKGNELALPSKYVNFLYLASHYEKLKGSPEDNEQKQLFVEQHKHYLDEIIEQISEFSKRVILADANLDKVLSAYNKHRDKPIREQAENIIHLFTLTNLGAPAAFKYFDTTIDRKRYTSTKEVLDATLIHQSITGLYETRIDLSQLGGDGGGGGGSGGGGSGGGGSGGGGSGGIPWLMKKPLQLTTLVPLQEYEERLLKQTMLTGSYKEKLQSLFLKYDALWQHWENQVGHRRIKPHHIATGTVNPRPQKQYPINPKAKASIQTVINDLLKQGVLIQQNSIMNTPVYPVPKPDGKWRMVLDYREVNKTIPLIAAQNQHSAGILSSIFRGKYKTTLDLSNGFWAHSITPESYWLTAFTWLGQQYCWTRLPQGFLNSPALFNADVVDLLKEVPNVQVYVDDIYISHDDPREHLEQLEKVFSLLLNAGYVVSLKKSEIAQHEVEFLGFNITKEGRGLTETFKQKLLNITPPRDLKQLQSILGKLNFARNFIPNFSELVKPLYNIIATAPGKYITWTTDNSQQLQNIISMLNSAENLEERNPEVRLIMKVNTSPSAGYIRFYNEFAKRPIMYLNYVYTKAEVKFTNTEKLLTTIHKGLIKALDLGMGQEILVYSPIVSMTKIQKTPLPERKALPIRWITWMSYLEDPRIQFHYDKTLPELQQVPTVTDDIIAKIKHPSEFSMVFYTDGSAIKHPNVNKSHNAGMGIAQVQFKPEFTVINTWSIPLGDHTAQLAEVAAVEFACKKALKIDGPVLIVTDSFYVAESVNKELPYWQSNGFFNNKKKPLKHVSKWKSIADCIQLKPDIIIIHEKGHQPTASTFHTEGNNLADKLATQGSYVVNAGKRTADGSEFEKRTADGSEFESPKKKAKVE

SEQ ID NO: 6163 - protein, 2103 aa, synthetic construct
MPAAKRVKLDGGDKKYSIGLDIGTNSVGWAVITDEYKVPSKKFKVLGNTDRHSIKKNLIGALLFDSGETAEATRLKRTARRRYTRRKNRICYLQEIFSNEMAKVDDSFFHRLEESFLVEEDKKHERHPIFGNIVDEVAYHEKYPTIYHLRKKLVDSTDKADLRLIYLALAHMIKFRGHFLIEGDLNPDNSDVDKLFIQLVQTYNQLFEENPINASGVDAKAILSARLSKSRRLENLIAQLPGEKKNGLFGNLIALSLGLTPNFKSNFDLAEDAKLQLSKDTYDDDLDNLLAQIGDQYADLFLAAKNLSDAILLSDILRVNTEITKAPLSASMIKRYDEHHQDLTLLKALVRQQLPEKYKEIFFDQSKNGYAGYIDGGASQEEFYKFIKPILEKMDGTEELLVKLNREDLLRKQRTFDNGSIPHQIHLGELHAILRRQEDFYPFLKDNREKIEKILTFRIPYYVGPLARGNSRFAWMTRKSEETITPWNFEEVVDKGASAQSFIERMTNFDKNLPNEKVLPKHSLLYEYFTVYNELTKVKYVTEGMRKPAFLSGEQKKAIVDLLFKTNRKVTVKQLKEDYFKKIECFDSVEISGVEDRFNASLGTYHDLLKIIKDKDFLDNEENEDILEDIVLTLTLFEDREMIEERLKTYAHLFDDKVMKQLKRRRYTGWGRLSRKLINGIRDKQSGKTILDFLKSDGFANRNFMQLIHDDSLTFKEDIQKAQVSGQGDSLHEHIANLAGSPAIKKGILQTVKVVDELVKVMGRHKPENIVIEMARENQTTQKGQKNSRERMKRIEEGIKELGSQILKEHPVENTQLQNEKLYLYYLQNGRDMYVDQELDINRLSDYDVDHIVPQSFLKDDSIDNKVLTRSDKARGKSDNVPSEEVVKKMKNYWRQLLNAKLITQRKFDNLTKAERGGLSELDKAGFIKRQLVETRQITKHVAQILDSRMNTKYDENDKLIREVKVITLKSKLVSDFRKDFQFYKVREINNYHHAHDAYLNAVVGTALIKKYPKLESEFVYGDYKVYDVRKMIAKSEQEIGKATAKYFFYSNIMNFFKTEITLANGEIRKRPLIETNGETGEIVWDKGRDFATVRKVLSMPQVNIVKKTEVQTGGFSKESILPKRNSDKLIARKKDWDPKKYGGFDSPTVAYSVLVVAKVEKGKSKKLKSVKELLGITIMERSSFEKNPIDFLEAKGYKEVKKDLIIKLPKYSLFELENGRKRMLASAGELQKGNELALPSKYVNFLYLASHYEKLKGSPEDNEQKQLFVEQHKHYLDEIIEQISEFSKRVILADANLDKVLSAYNKHRDKPIREQAENIIHLFTLTNLGAPAAFKYFDTTIDRKRYTSTKEVLDATLIHQSITGLYETRIDLSQLGGDGGGGGGSGGGGSGGGGSGGGGSGGVLNLEEEYRLHEKPVPSSIDPSWLQLFPTVWAERAGMGLANQVPPVVVELRSGASPVAVRQYPMSKEAREGIRPHIQRFLDLGVLVPCQSPWNTPLLPVKKPGTNDYRPVQDLREINKRVQDIHPTVPNPYNLLSSLPPSHTWYSVLDLKDAFFCLKLHPNSQPLFAFEWRDPEKGNTGQLTWTRLPQGFKNSPTLFNEALHRDLAPFRALNPQVVLLQYVDDLLVAAPTYRDCKEGTQKLLQELSKLGYRVSAKKAQLCQKEVTYLGYLLKEGKRWLTPARKATVMKIPPPTTPRQVREFLGKAGFCRLFIPGFASLAAPLYPLTKPSIPFIWTEEHQKAFDRIKEALLSAPALALPDLTKPFTLYVDERAGVARGVLTQTLGPWRRPVAYLSKKLDPVASGWPTCLKAVAAVALLLKDADKLTLGQNVTVIASHSLESIVRQPPDRWMTNARMTHYQSLLLNERVSFAPPAVLNPATLLPVESEATPVHRCSEILAEETGTRRDLKDQPLPGVPAWYTDGSSFIAEGKRRAGAAIVDGKRTVWASSLPEGTSAQKAELVALTQALRLAEGKDINIYTDSRYAFATAHIHGAIYKQRGWLTSAGKDIKNKEEILALLEAIHLPKRVAIIHCPGHQKGNDPVATGNRRADEAAKQAALSTRVLAETTKPAGKRTADGSEFEKRTADGSEFESPKKKAKVE

SEQ ID NO: 6164 - protein, 2112 aa, synthetic construct
MPAAKRVKLDGGDKKYSIGLDIGTNSVGWAVITDEYKVPSKKFKVLGNTDRHSIKKNLIGALLFDSGETAEATRLKRTARRRYTRRKNRICYLQEIFSNEMAKVDDSFFHRLEESFLVEEDKKHERHPIFGNIVDEVAYHEKYPTIYHLRKKLVDSTDKADLRLIYLALAHMIKFRGHFLIEGDLNPDNSDVDKLFIQLVQTYNQLFEENPINASGVDAKAILSARLSKSRRLENLIAQLPGEKKNGLFGNLIALSLGLTPNFKSNFDLAEDAKLQLSKDTYDDDLDNLLAQIGDQYADLFLAAKNLSDAILLSDILRVNTEITKAPLSASMIKRYDEHHQDLTLLKALVRQQLPEKYKEIFFDQSKNGYAGYIDGGASQEEFYKFIKPILEKMDGTEELLVKLNREDLLRKQRTFDNGSIPHQIHLGELHAILRRQEDFYPFLKDNREKIEKILTFRIPYYVGPLARGNSRFAWMTRKSEETITPWNFEEVVDKGASAQSFIERMTNFDKNLPNEKVLPKHSLLYEYFTVYNELTKVKYVTEGMRKPAFLSGEQKKAIVDLLFKTNRKVTVKQLKEDYFKKIECFDSVEISGVEDRFNASLGTYHDLLKIIKDKDFLDNEENEDILEDIVLTLTLFEDREMIEERLKTYAHLFDDKVMKQLKRRRYTGWGRLSRKLINGIRDKQSGKTILDFLKSDGFANRNFMQLIHDDSLTFKEDIQKAQVSGQGDSLHEHIANLAGSPAIKKGILQTVKVVDELVKVMGRHKPENIVIEMARENQTTQKGQKNSRERMKRIEEGIKELGSQILKEHPVENTQLQNEKLYLYYLQNGRDMYVDQELDINRLSDYDVDHIVPQSFLKDDSIDNKVLTRSDKARGKSDNVPSEEVVKKMKNYWRQLLNAKLITQRKFDNLTKAERGGLSELDKAGFIKRQLVETRQITKHVAQILDSRMNTKYDENDKLIREVKVITLKSKLVSDFRKDFQFYKVREINNYHHAHDAYLNAVVGTALIKKYPKLESEFVYGDYKVYDVRKMIAKSEQEIGKATAKYFFYSNIMNFFKTEITLANGEIRKRPLIETNGETGEIVWDKGRDFATVRKVLSMPQVNIVKKTEVQTGGFSKESILPKRNSDKLIARKKDWDPKKYGGFDSPTVAYSVLVVAKVEKGKSKKLKSVKELLGITIMERSSFEKNPIDFLEAKGYKEVKKDLIIKLPKYSLFELENGRKRMLASAGELQKGNELALPSKYVNFLYLASHYEKLKGSPEDNEQKQLFVEQHKHYLDEIIEQISEFSKRVILADANLDKVLSAYNKHRDKPIREQAENIIHLFTLTNLGAPAAFKYFDTTIDRKRYTSTKEVLDATLIHQSITGLYETRIDLSQLGGDGGGGGGSGGGGSGGGGSGGGGSGGGGSGGTAPLEEEYRLFLEAPIQNVTLLEQWKREIPKVWAEINPPGLASTQAPIHVQLLSTALPVRVRQYPITLEAKRSLRETIRKFRAAGILRPVHSPWNTPLLPVRKSGTSEYRMVQDLREVNKRVETIHPTVPNPYTLLSLLPPDRIWYSVLDLKDAFFCIPLAPESQLIFAFEWADAEEGESGQLTWTRLPQGFKNSPTLFNEALNRDLQGFRLDHPSVSLLQYVDDLLIAADTQAACLSATRDLLMTLAELGYRVSGKKAQLCQEEVTYLGFKIHKGSRSLSNSRTQAILQIPVPKTKRQVREFLGTIGYCRLWIPGFAELAQPLYAATRPGNDPLVWGEKEEEAFQSLKLALTQPPALALPSLDKPFQLFVEETSGAAKGVLTQALGPWKRPVAYLSKRLDPVAAGWPRCLRAIAAAALLTREASKLTFGQDIEITSSHNLESLLRSPPDKWLTNARITQYQVLLLDPPRVRFKQTAALNPATLLPETDDTLPIHHCLDTLDSLTSTRPDLTDQPLAQAEATLFTDGSSYIRDGKRYAGAAVVTLDSVIWAEPLPIGTSAQKAELIALTKALEWSKDKSVNIYTDSRYAFATLHVHGMIYRERGWLTAGGKAIKNAPEILALLTAVWLPKRVAVMHCKGHQKDDAPTSTGNRRADEVAREVAIRPLSTQATISAGKRTADGSEFEKRTADGSEFESPKKKAKVE

SEQ ID NO: 6165 - protein, 2112 aa, synthetic construct
MPAAKRVKLDGGDKKYSIGLDIGTNSVGWAVITDEYKVPSKKFKVLGNTDRHSIKKNLIGALLFDSGETAEATRLKRTARRRYTRRKNRICYLQEIFSNEMAKVDDSFFHRLEESFLVEEDKKHERHPIFGNIVDEVAYHEKYPTIYHLRKKLVDSTDKADLRLIYLALAHMIKFRGHFLIEGDLNPDNSDVDKLFIQLVQTYNQLFEENPINASGVDAKAILSARLSKSRRLENLIAQLPGEKKNGLFGNLIALSLGLTPNFKSNFDLAEDAKLQLSKDTYDDDLDNLLAQIGDQYADLFLAAKNLSDAILLSDILRVNTEITKAPLSASMIKRYDEHHQDLTLLKALVRQQLPEKYKEIFFDQSKNGYAGYIDGGASQEEFYKFIKPILEKMDGTEELLVKLNREDLLRKQRTFDNGSIPHQIHLGELHAILRRQEDFYPFLKDNREKIEKILTFRIPYYVGPLARGNSRFAWMTRKSEETITPWNFEEVVDKGASAQSFIERMTNFDKNLPNEKVLPKHSLLYEYFTVYNELTKVKYVTEGMRKPAFLSGEQKKAIVDLLFKTNRKVTVKQLKEDYFKKIECFDSVEISGVEDRFNASLGTYHDLLKIIKDKDFLDNEENEDILEDIVLTLTLFEDREMIEERLKTYAHLFDDKVMKQLKRRRYTGWGRLSRKLINGIRDKQSGKTILDFLKSDGFANRNFMQLIHDDSLTFKEDIQKAQVSGQGDSLHEHIANLAGSPAIKKGILQTVKVVDELVKVMGRHKPENIVIEMARENQTTQKGQKNSRERMKRIEEGIKELGSQILKEHPVENTQLQNEKLYLYYLQNGRDMYVDQELDINRLSDYDVDHIVPQSFLKDDSIDNKVLTRSDKARGKSDNVPSEEVVKKMKNYWRQLLNAKLITQRKFDNLTKAERGGLSELDKAGFIKRQLVETRQITKHVAQILDSRMNTKYDENDKLIREVKVITLKSKLVSDFRKDFQFYKVREINNYHHAHDAYLNAVVGTALIKKYPKLESEFVYGDYKVYDVRKMIAKSEQEIGKATAKYFFYSNIMNFFKTEITLANGEIRKRPLIETNGETGEIVWDKGRDFATVRKVLSMPQVNIVKKTEVQTGGFSKESILPKRNSDKLIARKKDWDPKKYGGFDSPTVAYSVLVVAKVEKGKSKKLKSVKELLGITIMERSSFEKNPIDFLEAKGYKEVKKDLIIKLPKYSLFELENGRKRMLASAGELQKGNELALPSKYVNFLYLASHYEKLKGSPEDNEQKQLFVEQHKHYLDEIIEQISEFSKRVILADANLDKVLSAYNKHRDKPIREQAENIIHLFTLTNLGAPAAFKYFDTTIDRKRYTSTKEVLDATLIHQSITGLYETRIDLSQLGGDGGGGGGSGGGGSGGGGSGGGGSGGGGSGGTAPLEEEYRLFLEAPIQNVTLLEQWKREIPKVWAEINPPGLASTQAPIHVQLLSTALPVRVRQYPITLEAKRSLRETIRKFRAAGILRPVHSPWNTPLLPVRKSGTSEYRMVQDLREVNKRVETIHPTVPNPYTLLSLLPPDRIWYSVLDLKDAFFCIPLAPESQLIFAFEWADAEEGESGQLTWTRLPQGFKNSPTLFNEALNRDLQGFRLDHPSVSLLQYVDDLLIAADTQAACLSATRDLLMTLAELGYRVSGKKAQLCQEEVTYLGFKIHKGSRSLSNSRTQAILQIPVPKTKRQVREFLGKIGYCRLFIPGFAELAQPLYAATRPGNDPLVWGEKEEEAFQSLKLALTQPPALALPSLDKPFQLFVEETSGAAKGVLTQALGPWKRPVAYLSKRLDPVAAGWPRCLRAIAAAALLTREASKLTFGQDIEITSSHNLESLLRSPPDKWLTNARITQYQVLLLDPPRVRFKQTAALNPATLLPETDDTLPIHHCLDTLDSLTSTRPDLTDQPLAQAEATLFTDGSSYIRDGKRYAGAAVVTLDSVIWAEPLPIGTSAQKAELIALTKALEWSKDKSVNIYTDSRYAFATLHVHGMIYRERGWLTAGGKAIKNAPEILALLTAVWLPKRVAVMHCKGHQKDDAPTSTGNRRADEVAREVAIRPLSTQATISAGKRTADGSEFEKRTADGSEFESPKKKAKVE

SEQ ID NO: 6166 - protein, 2116 aa, synthetic construct
MPAAKRVKLDGGDKKYSIGLDIGTNSVGWAVITDEYKVPSKKFKVLGNTDRHSIKKNLIGALLFDSGETAEATRLKRTARRRYTRRKNRICYLQEIFSNEMAKVDDSFFHRLEESFLVEEDKKHERHPIFGNIVDEVAYHEKYPTIYHLRKKLVDSTDKADLRLIYLALAHMIKFRGHFLIEGDLNPDNSDVDKLFIQLVQTYNQLFEENPINASGVDAKAILSARLSKSRRLENLIAQLPGEKKNGLFGNLIALSLGLTPNFKSNFDLAEDAKLQLSKDTYDDDLDNLLAQIGDQYADLFLAAKNLSDAILLSDILRVNTEITKAPLSASMIKRYDEHHQDLTLLKALVRQQLPEKYKEIFFDQSKNGYAGYIDGGASQEEFYKFIKPILEKMDGTEELLVKLNREDLLRKQRTFDNGSIPHQIHLGELHAILRRQEDFYPFLKDNREKIEKILTFRIPYYVGPLARGNSRFAWMTRKSEETITPWNFEEVVDKGASAQSFIERMTNFDKNLPNEKVLPKHSLLYEYFTVYNELTKVKYVTEGMRKPAFLSGEQKKAIVDLLFKTNRKVTVKQLKEDYFKKIECFDSVEISGVEDRFNASLGTYHDLLKIIKDKDFLDNEENEDILEDIVLTLTLFEDREMIEERLKTYAHLFDDKVMKQLKRRRYTGWGRLSRKLINGIRDKQSGKTILDFLKSDGFANRNFMQLIHDDSLTFKEDIQKAQVSGQGDSLHEHIANLAGSPAIKKGILQTVKVVDELVKVMGRHKPENIVIEMARENQTTQKGQKNSRERMKRIEEGIKELGSQILKEHPVENTQLQNEKLYLYYLQNGRDMYVDQELDINRLSDYDVDHIVPQSFLKDDSIDNKVLTRSDKARGKSDNVPSEEVVKKMKNYWRQLLNAKLITQRKFDNLTKAERGGLSELDKAGFIKRQLVETRQITKHVAQILDSRMNTKYDENDKLIREVKVITLKSKLVSDFRKDFQFYKVREINNYHHAHDAYLNAVVGTALIKKYPKLESEFVYGDYKVYDVRKMIAKSEQEIGKATAKYFFYSNIMNFFKTEITLANGEIRKRPLIETNGETGEIVWDKGRDFATVRKVLSMPQVNIVKKTEVQTGGFSKESILPKRNSDKLIARKKDWDPKKYGGFDSPTVAYSVLVVAKVEKGKSKKLKSVKELLGITIMERSSFEKNPIDFLEAKGYKEVKKDLIIKLPKYSLFELENGRKRMLASAGELQKGNELALPSKYVNFLYLASHYEKLKGSPEDNEQKQLFVEQHKHYLDEIIEQISEFSKRVILADANLDKVLSAYNKHRDKPIREQAENIIHLFTLTNLGAPAAFKYFDTTIDRKRYTSTKEVLDATLIHQSITGLYETRIDLSQLGGDGGGGGGSGGGGSGGGGSGGGGSGGGGSGGTVSLQDEHRLFDIPVTTSLPDVWLQDFPQAWAETGGLGRAKCQAPIIIDLKPTAVPVSIKQYPMSLEAHMGIRQHIIKFLELGVLRPCRSPWNTPLLPVKKPGTQDYRPVQDLREINKRTVDIHPTVPNPYNLLSTLKPDYSWYTVLDLKDAFFCLPLAPQSQELFAFEWKDPERGISGQLTWTRLPQGFKNSPTLFDEALHRDLTDFRTQHPEVTLLQYVDDLLLAAPTKKACTQGTRHLLQELGEKGYRASAKKAQICQTKVTYLGYILSEGKRWLTPGRIETVARIPPPRNPREVREFLGTAGFCRLWIPGFAELAAPLYALTKESTPFTWQTEHQLAFEALKKALLSAPALGLPDTSKPFTLFLDERQGIAKGVLTQKLGPWKRPVAYLSKKLDPVAAGWPPCLRIMAATAMLVKDSAKLTLGQPLTVITPHTLEAIVRQPPDRWITNARLTHYQALLLDTDRVQFGPPVTLNPATLLPVPENQPSPHDCRQVLAETHGTREDLKDQELPDADHTWYTDGSSYLDSGTRRAGAAVVDGHNTIWAQSLPPGTSAQKAELIALTKALELSKGKKANIYTDSRYAFATAHTHGSIYERRGLLTSEGKEIKNKAEIIALLKALFLPQEVAIIHCPGHQKGQDPVAVGNRQADRVARQAAMAEVLTLATEPDNTSHITAGKRTADGSEFEKRTADGSEFESPKKKAKVE

SEQ ID NO: 6167 - protein, 2015 aa, synthetic construct
MPAAKRVKLDGGDKKYSIGLDIGTNSVGWAVITDEYKVPSKKFKVLGNTDRHSIKKNLIGALLFDSGETAEATRLKRTARRRYTRRKNRICYLQEIFSNEMAKVDDSFFHRLEESFLVEEDKKHERHPIFGNIVDEVAYHEKYPTIYHLRKKLVDSTDKADLRLIYLALAHMIKFRGHFLIEGDLNPDNSDVDKLFIQLVQTYNQLFEENPINASGVDAKAILSARLSKSRRLENLIAQLPGEKKNGLFGNLIALSLGLTPNFKSNFDLAEDAKLQLSKDTYDDDLDNLLAQIGDQYADLFLAAKNLSDAILLSDILRVNTEITKAPLSASMIKRYDEHHQDLTLLKALVRQQLPEKYKEIFFDQSKNGYAGYIDGGASQEEFYKFIKPILEKMDGTEELLVKLNREDLLRKQRTFDNGSIPHQIHLGELHAILRRQEDFYPFLKDNREKIEKILTFRIPYYVGPLARGNSRFAWMTRKSEETITPWNFEEVVDKGASAQSFIERMTNFDKNLPNEKVLPKHSLLYEYFTVYNELTKVKYVTEGMRKPAFLSGEQKKAIVDLLFKTNRKVTVKQLKEDYFKKIECFDSVEISGVEDRFNASLGTYHDLLKIIKDKDFLDNEENEDILEDIVLTLTLFEDREMIEERLKTYAHLFDDKVMKQLKRRRYTGWGRLSRKLINGIRDKQSGKTILDFLKSDGFANRNFMQLIHDDSLTFKEDIQKAQVSGQGDSLHEHIANLAGSPAIKKGILQTVKVVDELVKVMGRHKPENIVIEMARENQTTQKGQKNSRERMKRIEEGIKELGSQILKEHPVENTQLQNEKLYLYYLQNGRDMYVDQELDINRLSDYDVDHIVPQSFLKDDSIDNKVLTRSDKARGKSDNVPSEEVVKKMKNYWRQLLNAKLITQRKFDNLTKAERGGLSELDKAGFIKRQLVETRQITKHVAQILDSRMNTKYDENDKLIREVKVITLKSKLVSDFRKDFQFYKVREINNYHHAHDAYLNAVVGTALIKKYPKLESEFVYGDYKVYDVRKMIAKSEQEIGKATAKYFFYSNIMNFFKTEITLANGEIRKRPLIETNGETGEIVWDKGRDFATVRKVLSMPQVNIVKKTEVQTGGFSKESILPKRNSDKLIARKKDWDPKKYGGFDSPTVAYSVLVVAKVEKGKSKKLKSVKELLGITIMERSSFEKNPIDFLEAKGYKEVKKDLIIKLPKYSLFELENGRKRMLASAGELQKGNELALPSKYVNFLYLASHYEKLKGSPEDNEQKQLFVEQHKHYLDEIIEQISEFSKRVILADANLDKVLSAYNKHRDKPIREQAENIIHLFTLTNLGAPAAFKYFDTTIDRKRYTSTKEVLDATLIHQSITGLYETRIDLSQLGGDGGGGGGSGGGGSGGGGSGGGGSGGGGSGGGVLDAPPSHIGLEHLPPPPEVPQFPLNLERLQALQDLVHRSLEAGYISPWDGPGNNPVFPVRKPNGAWRFVHDLRVTNALTKPIPALSPGPPDLTAIPTHLPHIICLDLKDAFFQIPVEDRFRSYFAFTLPTPGGLQPHRRFAWRVLPQGFINSPALFQRALQEPLRQVSAAFSQSLLVSYMDDILYVSPTEEQRLQCYQTMAAHLRDLGFQVASEKTRQTPSPVPFLGQMVHERMVTYQSLPTLQISSPISLHQLQTVLGDLQWVSRGTPTTRRPLQLLYSSLKPIDDPRAIIHLSPEQQQGIAELRQALSHNARSRYNEQEPLLAYVHLTRAGSTLVLFQKGAQFPLAYFQTPLTDNQASPWGLLLLLGCQYLQAQALSSYAKTILKYYHNLPKTSLDNWIQSSEDPRVQELLQLWPQISSQGIQPPGPWKTLVTRAEVFLTPQFSPEPIPAALCLFSDGAARRGAYCLWKDHLLDFQAVPAPESAQKGELAGLLAGLAAAPPEPLNIWVDSKYLYSLLRTLVLGAWLQPDPVPSYALLYKSLLRHPAIFVGHVRSHSSASHPIASLNNYVDQLAGKRTADGSEFEKRTADGSEFESPKKKAKVE

SEQ ID NO: 6168 - protein, 2187 aa, synthetic construct
MPAAKRVKLDGGDKKYSIGLDIGTNSVGWAVITDEYKVPSKKFKVLGNTDRHSIKKNLIGALLFDSGETAEATRLKRTARRRYTRRKNRICYLQEIFSNEMAKVDDSFFHRLEESFLVEEDKKHERHPIFGNIVDEVAYHEKYPTIYHLRKKLVDSTDKADLRLIYLALAHMIKFRGHFLIEGDLNPDNSDVDKLFIQLVQTYNQLFEENPINASGVDAKAILSARLSKSRRLENLIAQLPGEKKNGLFGNLIALSLGLTPNFKSNFDLAEDAKLQLSKDTYDDDLDNLLAQIGDQYADLFLAAKNLSDAILLSDILRVNTEITKAPLSASMIKRYDEHHQDLTLLKALVRQQLPEKYKEIFFDQSKNGYAGYIDGGASQEEFYKFIKPILEKMDGTEELLVKLNREDLLRKQRTFDNGSIPHQIHLGELHAILRRQEDFYPFLKDNREKIEKILTFRIPYYVGPLARGNSRFAWMTRKSEETITPWNFEEVVDKGASAQSFIERMTNFDKNLPNEKVLPKHSLLYEYFTVYNELTKVKYVTEGMRKPAFLSGEQKKAIVDLLFKTNRKVTVKQLKEDYFKKIECFDSVEISGVEDRFNASLGTYHDLLKIIKDKDFLDNEENEDILEDIVLTLTLFEDREMIEERLKTYAHLFDDKVMKQLKRRRYTGWGRLSRKLINGIRDKQSGKTILDFLKSDGFANRNFMQLIHDDSLTFKEDIQKAQVSGQGDSLHEHIANLAGSPAIKKGILQTVKVVDELVKVMGRHKPENIVIEMARENQTTQKGQKNSRERMKRIEEGIKELGSQILKEHPVENTQLQNEKLYLYYLQNGRDMYVDQELDINRLSDYDVDHIVPQSFLKDDSIDNKVLTRSDKARGKSDNVPSEEVVKKMKNYWRQLLNAKLITQRKFDNLTKAERGGLSELDKAGFIKRQLVETRQITKHVAQILDSRMNTKYDENDKLIREVKVITLKSKLVSDFRKDFQFYKVREINNYHHAHDAYLNAVVGTALIKKYPKLESEFVYGDYKVYDVRKMIAKSEQEIGKATAKYFFYSNIMNFFKTEITLANGEIRKRPLIETNGETGEIVWDKGRDFATVRKVLSMPQVNIVKKTEVQTGGFSKESILPKRNSDKLIARKKDWDPKKYGGFDSPTVAYSVLVVAKVEKGKSKKLKSVKELLGITIMERSSFEKNPIDFLEAKGYKEVKKDLIIKLPKYSLFELENGRKRMLASAGELQKGNELALPSKYVNFLYLASHYEKLKGSPEDNEQKQLFVEQHKHYLDEIIEQISEFSKRVILADANLDKVLSAYNKHRDKPIREQAENIIHLFTLTNLGAPAAFKYFDTTIDRKRYTSTKEVLDATLIHQSITGLYETRIDLSQLGGDGGGGGGSGGGGSGGGGSGGGGSGGGGSGGMDLLKPLTVERKGVKIKGYWNSQADITCVPKDLLQGEEPVRQQNVTTIHGTQEGDVYYVNLKIDGRRINTEVIGTTLDYAIITPGDVPWILKKPLELTIKLDLEEQQGTLLNNSILSKKGKEELKQLFEKYSALWQSWENQVGHRRIRPHKIATGTVKPTPQKQYHINPKAKPDIQIVINDLLKQGVLIQKESTMNTPVYPVPKPNGRWRMVLDYRAVNKVTPLIAVQNQHSYGILGSLFKGRYKTTIDLSNGFWAHPIVPEDYWITAFTWQGKQYCWTVLPQGFLNSPGLFTGDVVDLLQGIPNVEVYVDDVYISHDSEKEHLEYLDILFNRLKEAGYIISLKKSNIANSIVDFLGFQITNEGRGLTDTFKEKLENITAPTTLKQLQSILGLLNFARNFIPDFTELIAPLYALIPKSTKNYVPWQIEHSTTLETLITKLNGAEYLQGRKGDKTLIMKVNASYTTGYIRYYNEGEKKPISYVSIVFSKTELKFTELEKLLTTVHKGLLKALDLSMGQNIHVYSPIVSMQNIQKTPQTAKKALASRWLSWLSYLEDPRIRFFYDPQMPALKDLPAVDTGKDNKKHPSNFQHIFYTDGSAITSPTKEGHLNAGMGIVYFINKDGNLQKQQEWSISLGNHTAQFAEIAAFEFALKKCLPLGGNILVVTDSNYVAKAYNEELDVWASNGFVNNRKKPLKHISKWKSVADLKRLRPDVVVTHEPGHQKLDSSPHAYGNNLADQLATQASFKVHAGKRTADGSEFEKRTADGSEFESPKKKAKVE

SEQ ID NO: 6169 - protein, 2101 aa, synthetic construct
MPAAKRVKLDGGDKKYSIGLDIGTNSVGWAVITDEYKVPSKKFKVLGNTDRHSIKKNLIGALLFDSGETAEATRLKRTARRRYTRRKNRICYLQEIFSNEMAKVDDSFFHRLEESFLVEEDKKHERHPIFGNIVDEVAYHEKYPTIYHLRKKLVDSTDKADLRLIYLALAHMIKFRGHFLIEGDLNPDNSDVDKLFIQLVQTYNQLFEENPINASGVDAKAILSARLSKSRRLENLIAQLPGEKKNGLFGNLIALSLGLTPNFKSNFDLAEDAKLQLSKDTYDDDLDNLLAQIGDQYADLFLAAKNLSDAILLSDILRVNTEITKAPLSASMIKRYDEHHQDLTLLKALVRQQLPEKYKEIFFDQSKNGYAGYIDGGASQEEFYKFIKPILEKMDGTEELLVKLNREDLLRKQRTFDNGSIPHQIHLGELHAILRRQEDFYPFLKDNREKIEKILTFRIPYYVGPLARGNSRFAWMTRKSEETITPWNFEEVVDKGASAQSFIERMTNFDKNLPNEKVLPKHSLLYEYFTVYNELTKVKYVTEGMRKPAFLSGEQKKAIVDLLFKTNRKVTVKQLKEDYFKKIECFDSVEISGVEDRFNASLGTYHDLLKIIKDKDFLDNEENEDILEDIVLTLTLFEDREMIEERLKTYAHLFDDKVMKQLKRRRYTGWGRLSRKLINGIRDKQSGKTILDFLKSDGFANRNFMQLIHDDSLTFKEDIQKAQVSGQGDSLHEHIANLAGSPAIKKGILQTVKVVDELVKVMGRHKPENIVIEMARENQTTQKGQKNSRERMKRIEEGIKELGSQILKEHPVENTQLQNEKLYLYYLQNGRDMYVDQELDINRLSDYDVDHIVPQSFLKDDSIDNKVLTRSDKARGKSDNVPSEEVVKKMKNYWRQLLNAKLITQRKFDNLTKAERGGLSELDKAGFIKRQLVETRQITKHVAQILDSRMNTKYDENDKLIREVKVITLKSKLVSDFRKDFQFYKVREINNYHHAHDAYLNAVVGTALIKKYPKLESEFVYGDYKVYDVRKMIAKSEQEIGKATAKYFFYSNIMNFFKTEITLANGEIRKRPLIETNGETGEIVWDKGRDFATVRKVLSMPQVNIVKKTEVQTGGFSKESILPKRNSDKLIARKKDWDPKKYGGFDSPTVAYSVLVVAKVEKGKSKKLKSVKELLGITIMERSSFEKNPIDFLEAKGYKEVKKDLIIKLPKYSLFELENGRKRMLASAGELQKGNELALPSKYVNFLYLASHYEKLKGSPEDNEQKQLFVEQHKHYLDEIIEQISEFSKRVILADANLDKVLSAYNKHRDKPIREQAENIIHLFTLTNLGAPAAFKYFDTTIDRKRYTSTKEVLDATLIHQSITGLYETRIDLSQLGGDGGGGGGSGGGGSGGGGSGGGGSGGGGSGGVPWILKKPLELTIKLDLEEQQGTLLNNSILSKKGKEELKQLFEKYSALWQSWENQVGHRRIRPHKIATGTVKPTPQKQYHINPKAKPDIQIVINDLLKQGVLIQKESTMNTPVYPVPKPNGRWRMVLDYRAVNKVTPLIAVQNQHSYGILGSLFKGRYKTTIDLSNGFWAHPIVPEDYWITAFTWQGKQYCWTVLPQGFLNSPGLFTGDVVDLLQGIPNVEVYVDDVYISHDSEKEHLEYLDILFNRLKEAGYIISLKKSNIANSIVDFLGFQITNEGRGLTDTFKEKLENITAPTTLKQLQSILGLLNFARNFIPDFTELIAPLYALIPKSTKNYVPWQIEHSTTLETLITKLNGAEYLQGRKGDKTLIMKVNASYTTGYIRYYNEGEKKPISYVSIVFSKTELKFTELEKLLTTVHKGLLKALDLSMGQNIHVYSPIVSMQNIQKTPQTAKKALASRWLSWLSYLEDPRIRFFYDPQMPALKDLPAVDTGKDNKKHPSNFQHIFYTDGSAITSPTKEGHLNAGMGIVYFINKDGNLQKQQEWSISLGNHTAQFAEIAAFEFALKKCLPLGGNILVVTDSNYVAKAYNEELDVWASNGFVNNRKKPLKHISKWKSVADLKRLRPDVVVTHEPGHQKLDSSPHAYGNNLADQLATQASFKVHAGKRTADGSEFEKRTADGSEFESPKKKAKVE

SEQ ID NO: 6170 - protein, 2101 aa, synthetic construct
MPAAKRVKLDGGDKKYSIGLDIGTNSVGWAVITDEYKVPSKKFKVLGNTDRHSIKKNLIGALLFDSGETAEATRLKRTARRRYTRRKNRICYLQEIFSNEMAKVDDSFFHRLEESFLVEEDKKHERHPIFGNIVDEVAYHEKYPTIYHLRKKLVDSTDKADLRLIYLALAHMIKFRGHFLIEGDLNPDNSDVDKLFIQLVQTYNQLFEENPINASGVDAKAILSARLSKSRRLENLIAQLPGEKKNGLFGNLIALSLGLTPNFKSNFDLAEDAKLQLSKDTYDDDLDNLLAQIGDQYADLFLAAKNLSDAILLSDILRVNTEITKAPLSASMIKRYDEHHQDLTLLKALVRQQLPEKYKEIFFDQSKNGYAGYIDGGASQEEFYKFIKPILEKMDGTEELLVKLNREDLLRKQRTFDNGSIPHQIHLGELHAILRRQEDFYPFLKDNREKIEKILTFRIPYYVGPLARGNSRFAWMTRKSEETITPWNFEEVVDKGASAQSFIERMTNFDKNLPNEKVLPKHSLLYEYFTVYNELTKVKYVTEGMRKPAFLSGEQKKAIVDLLFKTNRKVTVKQLKEDYFKKIECFDSVEISGVEDRFNASLGTYHDLLKIIKDKDFLDNEENEDILEDIVLTLTLFEDREMIEERLKTYAHLFDDKVMKQLKRRRYTGWGRLSRKLINGIRDKQSGKTILDFLKSDGFANRNFMQLIHDDSLTFKEDIQKAQVSGQGDSLHEHIANLAGSPAIKKGILQTVKVVDELVKVMGRHKPENIVIEMARENQTTQKGQKNSRERMKRIEEGIKELGSQILKEHPVENTQLQNEKLYLYYLQNGRDMYVDQELDINRLSDYDVDHIVPQSFLKDDSIDNKVLTRSDKARGKSDNVPSEEVVKKMKNYWRQLLNAKLITQRKFDNLTKAERGGLSELDKAGFIKRQLVETRQITKHVAQILDSRMNTKYDENDKLIREVKVITLKSKLVSDFRKDFQFYKVREINNYHHAHDAYLNAVVGTALIKKYPKLESEFVYGDYKVYDVRKMIAKSEQEIGKATAKYFFYSNIMNFFKTEITLANGEIRKRPLIETNGETGEIVWDKGRDFATVRKVLSMPQVNIVKKTEVQTGGFSKESILPKRNSDKLIARKKDWDPKKYGGFDSPTVAYSVLVVAKVEKGKSKKLKSVKELLGITIMERSSFEKNPIDFLEAKGYKEVKKDLIIKLPKYSLFELENGRKRMLASAGELQKGNELALPSKYVNFLYLASHYEKLKGSPEDNEQKQLFVEQHKHYLDEIIEQISEFSKRVILADANLDKVLSAYNKHRDKPIREQAENIIHLFTLTNLGAPAAFKYFDTTIDRKRYTSTKEVLDATLIHQSITGLYETRIDLSQLGGDGGGGGGSGGGGSGGGGSGGGGSGGGGSGGVPWILKKPLELTIKLDLEEQQGTLLNNSILSKKGKEELKQLFEKYSALWQSWENQVGHRRIRPHKIATGTVKPTPQKQYHINPKAKPDIQIVINDLLKQGVLIQKESTMNTPVYPVPKPNGRWRMVLDYRAVNKVTPLIAVQNQHSYGILGSLFKGRYKTTIDLSNGFWAHPIVPEDYWITAFTWQGKQYCWTVLPQGFLNSPGLFNGDVVDLLQGIPNVEVYVDDVYISHDSEKEHLEYLDILFNRLKEAGYIISLKKSNIANSIVDFLGFQITNEGRGLTDTFKEKLENITAPTTLKQLQSILGLLNFARNFIPDFTELIAPLYALIPKSPKNYVPWQIEHSTTLETLITKLNGAEYLQGRKGDKTLIMKVNASYTTGYIRYYNEGEKKPISYVSIVFSKTELKFTELEKLLTTVHKGLLKALDLSMGQNIHVYSPIVSMQNIQKTPQTAKKALASRWLSWLSYLEDPRIRFFYDPQMPALKDLPAVDTGKDNKKHPSNFQHIFYTDGSAITSPTKEGHLNAGMGIVYFINKDGNLQKQQEWSISLGNHTAQFAEIAAFEFALKKCLPLGGNILVVTDSNYVAKAYNEELDVWASNGFVNNRKKPLKHISKWKSVADLKRLRPDVVVTHEPGHQKLDSSPHAYGNNLADQLATQASFKVHAGKRTADGSEFEKRTADGSEFESPKKKAKVE

SEQ ID NO: 6171 - protein, 2109 aa, synthetic construct
MPAAKRVKLDGGDKKYSIGLDIGTNSVGWAVITDEYKVPSKKFKVLGNTDRHSIKKNLIGALLFDSGETAEATRLKRTARRRYTRRKNRICYLQEIFSNEMAKVDDSFFHRLEESFLVEEDKKHERHPIFGNIVDEVAYHEKYPTIYHLRKKLVDSTDKADLRLIYLALAHMIKFRGHFLIEGDLNPDNSDVDKLFIQLVQTYNQLFEENPINASGVDAKAILSARLSKSRRLENLIAQLPGEKKNGLFGNLIALSLGLTPNFKSNFDLAEDAKLQLSKDTYDDDLDNLLAQIGDQYADLFLAAKNLSDAILLSDILRVNTEITKAPLSASMIKRYDEHHQDLTLLKALVRQQLPEKYKEIFFDQSKNGYAGYIDGGASQEEFYKFIKPILEKMDGTEELLVKLNREDLLRKQRTFDNGSIPHQIHLGELHAILRRQEDFYPFLKDNREKIEKILTFRIPYYVGPLARGNSRFAWMTRKSEETITPWNFEEVVDKGASAQSFIERMTNFDKNLPNEKVLPKHSLLYEYFTVYNELTKVKYVTEGMRKPAFLSGEQKKAIVDLLFKTNRKVTVKQLKEDYFKKIECFDSVEISGVEDRFNASLGTYHDLLKIIKDKDFLDNEENEDILEDIVLTLTLFEDREMIEERLKTYAHLFDDKVMKQLKRRRYTGWGRLSRKLINGIRDKQSGKTILDFLKSDGFANRNFMQLIHDDSLTFKEDIQKAQVSGQGDSLHEHIANLAGSPAIKKGILQTVKVVDELVKVMGRHKPENIVIEMARENQTTQKGQKNSRERMKRIEEGIKELGSQILKEHPVENTQLQNEKLYLYYLQNGRDMYVDQELDINRLSDYDVDHIVPQSFLKDDSIDNKVLTRSDKARGKSDNVPSEEVVKKMKNYWRQLLNAKLITQRKFDNLTKAERGGLSELDKAGFIKRQLVETRQITKHVAQILDSRMNTKYDENDKLIREVKVITLKSKLVSDFRKDFQFYKVREINNYHHAHDAYLNAVVGTALIKKYPKLESEFVYGDYKVYDVRKMIAKSEQEIGKATAKYFFYSNIMNFFKTEITLANGEIRKRPLIETNGETGEIVWDKGRDFATVRKVLSMPQVNIVKKTEVQTGGFSKESILPKRNSDKLIARKKDWDPKKYGGFDSPTVAYSVLVVAKVEKGKSKKLKSVKELLGITIMERSSFEKNPIDFLEAKGYKEVKKDLIIKLPKYSLFELENGRKRMLASAGELQKGNELALPSKYVNFLYLASHYEKLKGSPEDNEQKQLFVEQHKHYLDEIIEQISEFSKRVILADANLDKVLSAYNKHRDKPIREQAENIIHLFTLTNLGAPAAFKYFDTTIDRKRYTSTKEVLDATLIHQSITGLYETRIDLSQLGGDGGGGGGSGGGGSGGGGSGGGGSGGGGSGGTLQLEEEYRLFEPESTQKQEMDIWLKNFPQAWAETGGMGTAHCQAPVLIQLKATATPISIRQYPMPHEAYQGIKPHIRRMLDQGILKPCQSPWNTPLLPVKKPGTEDYRPVQDLREVNKRVEDIHPTVPNPYNLLSTLPPSHPWYTVLDLKDAFFCLRLHSESQLLFAFEWRDPEIGLSGQLTWTRLPQGFKNSPTLFNEALHSDLADFRVRYPALVLLQYVDDLLLAAATRTECLEGTKALLETLGNKGYRASAKKAQICLQEVTYLGYSLKDGQRWLTKARKEAILSIPVPKNSRQVREFLGTAGYCRLWIPGFAELAAPLYPLTRPGTLFQWGTEQQLAFEDIKKALLSSPALGLPDITKPFELFIDENSGFAKGVLVQKLGPWKRPVAYLSKKLDTVASGWPPCLRMVAAIAILVKDAGKLTLGQPLTILTSHPVEALVRQPPNKWLSNARMTHYQAMLLDAERVHFGPTVSLNPATLLPLPSGGNHHDCLQILAETHGTRPDLTDQPLPDADLTWYTDGSSFIRNGEREAGAAVTTESEVIWAAPLPPGTSAQRAELIALTQALKMAEGKKLTVYTDSRYAFATTHVHGEIYRRRGWLTSEGKEIKNKNEILALLEALFLPKRLSIIHCPGHQKGDSPQAKGNRLADDTAKKAATETHSSLTVLPAGKRTADGSEFEKRTADGSEFESPKKKAKVE

SEQ ID NO: 6172 - protein, 2108 aa, synthetic construct
MPAAKRVKLDGGDKKYSIGLDIGTNSVGWAVITDEYKVPSKKFKVLGNTDRHSIKKNLIGALLFDSGETAEATRLKRTARRRYTRRKNRICYLQEIFSNEMAKVDDSFFHRLEESFLVEEDKKHERHPIFGNIVDEVAYHEKYPTIYHLRKKLVDSTDKADLRLIYLALAHMIKFRGHFLIEGDLNPDNSDVDKLFIQLVQTYNQLFEENPINASGVDAKAILSARLSKSRRLENLIAQLPGEKKNGLFGNLIALSLGLTPNFKSNFDLAEDAKLQLSKDTYDDDLDNLLAQIGDQYADLFLAAKNLSDAILLSDILRVNTEITKAPLSASMIKRYDEHHQDLTLLKALVRQQLPEKYKEIFFDQSKNGYAGYIDGGASQEEFYKFIKPILEKMDGTEELLVKLNREDLLRKQRTFDNGSIPHQIHLGELHAILRRQEDFYPFLKDNREKIEKILTFRIPYYVGPLARGNSRFAWMTRKSEETITPWNFEEVVDKGASAQSFIERMTNFDKNLPNEKVLPKHSLLYEYFTVYNELTKVKYVTEGMRKPAFLSGEQKKAIVDLLFKTNRKVTVKQLKEDYFKKIECFDSVEISGVEDRFNASLGTYHDLLKIIKDKDFLDNEENEDILEDIVLTLTLFEDREMIEERLKTYAHLFDDKVMKQLKRRRYTGWGRLSRKLINGIRDKQSGKTILDFLKSDGFANRNFMQLIHDDSLTFKEDIQKAQVSGQGDSLHEHIANLAGSPAIKKGILQTVKVVDELVKVMGRHKPENIVIEMARENQTTQKGQKNSRERMKRIEEGIKELGSQILKEHPVENTQLQNEKLYLYYLQNGRDMYVDQELDINRLSDYDVDHIVPQSFLKDDSIDNKVLTRSDKARGKSDNVPSEEVVKKMKNYWRQLLNAKLITQRKFDNLTKAERGGLSELDKAGFIKRQLVETRQITKHVAQILDSRMNTKYDENDKLIREVKVITLKSKLVSDFRKDFQFYKVREINNYHHAHDAYLNAVVGTALIKKYPKLESEFVYGDYKVYDVRKMIAKSEQEIGKATAKYFFYSNIMNFFKTEITLANGEIRKRPLIETNGETGEIVWDKGRDFATVRKVLSMPQVNIVKKTEVQTGGFSKESILPKRNSDKLIARKKDWDPKKYGGFDSPTVAYSVLVVAKVEKGKSKKLKSVKELLGITIMERSSFEKNPIDFLEAKGYKEVKKDLIIKLPKYSLFELENGRKRMLASAGELQKGNELALPSKYVNFLYLASHYEKLKGSPEDNEQKQLFVEQHKHYLDEIIEQISEFSKRVILADANLDKVLSAYNKHRDKPIREQAENIIHLFTLTNLGAPAAFKYFDTTIDRKRYTSTKEVLDATLIHQSITGLYETRIDLSQLGGDGGGGGGSGGGGSGGGGSGGGGSGGGGSGGVLNLEEEYRLHEKPVPSSIDPSWLQLFPTVWAERAGMGLANQVPPVVVELRSGASPVAVRQYPMSKEAREGIRPHIQKFLDLGVLVPCRSPWNTPLLPVKKPGTNDYRPVQDLREINKRVQDIHPTVPNPYNLLSSLPPSYTWYSVLDLKDAFFCLRLHPNSQPLFAFEWKDPEKGNTGQLTWTRLPQGFKNSPTLFNEALHRDLAPFRALNPQVVLLQYVDDLLVAAPTYEDCKKGTQKLLQELSKLGYRVSAKKAQLCQREVTYLGYLLKEGKRWLTPARKATVMKIPVPTTPRQVREFLGKAGFCRLFIPGFASLAAPLYPLTKPSIPFIWTEEHQQAFDHIKKALLSAPALALPDLTKPFTLYIDERAGVARGVLTQTLGPWRRPVAYLSKKLDPVASGWPTCLKAVAAVALLLKDADKLTLGQNVTVIASHSLESIVRQPPDRWMTNARMTHYQSLLLNERVSFAPPAVLNPATLLPVESEATPVHRCSEILAEETGTRRDLEDQPLPGVPTWYTDGSSFITEGKRRAGAPIVDGKRTVWASSLPEGTSAQKAELVALTQALRLAEGKNINIYTDSRYAFATAHIHGAIYKQRGWLTSAGKDIKNKEEILALLEAIHLPRRVAIIHCPGHQRGSNPVATGNRRADEAAKQAALSTRVLAGTTKPAGKRTADGSEFEKRTADGSEFESPKKKAKVE

SEQ ID NO: 6173 - protein, 2232 aa, synthetic construct
MPAAKRVKLDGGDKKYSIGLDIGTNSVGWAVITDEYKVPSKKFKVLGNTDRHSIKKNLIGALLFDSGETAEATRLKRTARRRYTRRKNRICYLQEIFSNEMAKVDDSFFHRLEESFLVEEDKKHERHPIFGNIVDEVAYHEKYPTIYHLRKKLVDSTDKADLRLIYLALAHMIKFRGHFLIEGDLNPDNSDVDKLFIQLVQTYNQLFEENPINASGVDAKAILSARLSKSRRLENLIAQLPGEKKNGLFGNLIALSLGLTPNFKSNFDLAEDAKLQLSKDTYDDDLDNLLAQIGDQYADLFLAAKNLSDAILLSDILRVNTEITKAPLSASMIKRYDEHHQDLTLLKALVRQQLPEKYKEIFFDQSKNGYAGYIDGGASQEEFYKFIKPILEKMDGTEELLVKLNREDLLRKQRTFDNGSIPHQIHLGELHAILRRQEDFYPFLKDNREKIEKILTFRIPYYVGPLARGNSRFAWMTRKSEETITPWNFEEVVDKGASAQSFIERMTNFDKNLPNEKVLPKHSLLYEYFTVYNELTKVKYVTEGMRKPAFLSGEQKKAIVDLLFKTNRKVTVKQLKEDYFKKIECFDSVEISGVEDRFNASLGTYHDLLKIIKDKDFLDNEENEDILEDIVLTLTLFEDREMIEERLKTYAHLFDDKVMKQLKRRRYTGWGRLSRKLINGIRDKQSGKTILDFLKSDGFANRNFMQLIHDDSLTFKEDIQKAQVSGQGDSLHEHIANLAGSPAIKKGILQTVKVVDELVKVMGRHKPENIVIEMARENQTTQKGQKNSRERMKRIEEGIKELGSQILKEHPVENTQLQNEKLYLYYLQNGRDMYVDQELDINRLSDYDVDHIVPQSFLKDDSIDNKVLTRSDKARGKSDNVPSEEVVKKMKNYWRQLLNAKLITQRKFDNLTKAERGGLSELDKAGFIKRQLVETRQITKHVAQILDSRMNTKYDENDKLIREVKVITLKSKLVSDFRKDFQFYKVREINNYHHAHDAYLNAVVGTALIKKYPKLESEFVYGDYKVYDVRKMIAKSEQEIGKATAKYFFYSNIMNFFKTEITLANGEIRKRPLIETNGETGEIVWDKGRDFATVRKVLSMPQVNIVKKTEVQTGGFSKESILPKRNSDKLIARKKDWDPKKYGGFDSPTVAYSVLVVAKVEKGKSKKLKSVKELLGITIMERSSFEKNPIDFLEAKGYKEVKKDLIIKLPKYSLFELENGRKRMLASAGELQKGNELALPSKYVNFLYLASHYEKLKGSPEDNEQKQLFVEQHKHYLDEIIEQISEFSKRVILADANLDKVLSAYNKHRDKPIREQAENIIHLFTLTNLGAPAAFKYFDTTIDRKRYTSTKEVLDATLIHQSITGLYETRIDLSQLGGDGGGGGGSGGGGSGGGGSGGGGSGGGGSGGTLGDQGSRGSDPLPEPRVTLTVEGIPTEFLVNTGAEHSVLTKPMGKMGSKRTVVAGATGSKVYPWTTKRLLKIGQKQVTHSFLVIPECPAPLLGRDLLTKLKAQIQFSTEGPQVTWEDRPAMCLVLNLEEEYRLHEKPVPPSIDPSWLQLFPMVWAEKAGMGLANQVPPVVVELKSDASPVAVRQYPMSKEAREGIRPHIQRFLDLGILVPCQSPWNTPLLPVKKPGTNDYRPVQDLREVNKRVQDIHPTVPNPYNLLSSLPPSHTWYSVLDLKDAFFCLKLHPNSQPLFAFEWRDPEKGNTGQLTWTRLPQGFKNSPTLFDEALHRDLASFRALNPQVVMLQYVDDLLVAAPTYRDCKEGTRRLLQELSKLGYRVSAKKAQLCREEVTYLGYLLKGGKRWLTPARKATVMKIPTPTTPRQVREFLGTAGFCRLWIPGFASLAAPLYPLTREKVPFTWTEAHQEAFGRIKEALLSAPALALPDLTKPFALYVDEKEGVARGVLTQTLGPWRRPVAYLSKKLDPVASGWPTCLKAIAAVALLLKDADKLTLGQNVLVIAPHNLESIVRQPPDRWMTNARMTHYQSLLLNERVSFAPPAILNPATLLPVESDDTPIHICSEILAEETGTRPDLRDQPLPGVPAWYTDGSSFIMDGRRQAGAAIVDNKRTVWASNLPEGTSAQKAELIALTQALRLAEGKSINIYTDSRYAFATAHVHGAIYKQRGLLTSAGKDIKNKEEILALLEAIHLPKRVAIIHCPGHQRGTDPVATGNRKADEAAKQAAQSTRILTETTKNAGKRTADGSEFEKRTADGSEFESPKKKAKVE

SEQ ID NO: 6174 - protein, 2141 aa, synthetic construct
MPAAKRVKLDGGDKKYSIGLDIGTNSVGWAVITDEYKVPSKKFKVLGNTDRHSIKKNLIGALLFDSGETAEATRLKRTARRRYTRRKNRICYLQEIFSNEMAKVDDSFFHRLEESFLVEEDKKHERHPIFGNIVDEVAYHEKYPTIYHLRKKLVDSTDKADLRLIYLALAHMIKFRGHFLIEGDLNPDNSDVDKLFIQLVQTYNQLFEENPINASGVDAKAILSARLSKSRRLENLIAQLPGEKKNGLFGNLIALSLGLTPNFKSNFDLAEDAKLQLSKDTYDDDLDNLLAQIGDQYADLFLAAKNLSDAILLSDILRVNTEITKAPLSASMIKRYDEHHQDLTLLKALVRQQLPEKYKEIFFDQSKNGYAGYIDGGASQEEFYKFIKPILEKMDGTEELLVKLNREDLLRKQRTFDNGSIPHQIHLGELHAILRRQEDFYPFLKDNREKIEKILTFRIPYYVGPLARGNSRFAWMTRKSEETITPWNFEEVVDKGASAQSFIERMTNFDKNLPNEKVLPKHSLLYEYFTVYNELTKVKYVTEGMRKPAFLSGEQKKAIVDLLFKTNRKVTVKQLKEDYFKKIECFDSVEISGVEDRFNASLGTYHDLLKIIKDKDFLDNEENEDILEDIVLTLTLFEDREMIEERLKTYAHLFDDKVMKQLKRRRYTGWGRLSRKLINGIRDKQSGKTILDFLKSDGFANRNFMQLIHDDSLTFKEDIQKAQVSGQGDSLHEHIANLAGSPAIKKGILQTVKVVDELVKVMGRHKPENIVIEMARENQTTQKGQKNSRERMKRIEEGIKELGSQILKEHPVENTQLQNEKLYLYYLQNGRDMYVDQELDINRLSDYDVDHIVPQSFLKDDSIDNKVLTRSDKARGKSDNVPSEEVVKKMKNYWRQLLNAKLITQRKFDNLTKAERGGLSELDKAGFIKRQLVETRQITKHVAQILDSRMNTKYDENDKLIREVKVITLKSKLVSDFRKDFQFYKVREINNYHHAHDAYLNAVVGTALIKKYPKLESEFVYGDYKVYDVRKMIAKSEQEIGKATAKYFFYSNIMNFFKTEITLANGEIRKRPLIETNGETGEIVWDKGRDFATVRKVLSMPQVNIVKKTEVQTGGFSKESILPKRNSDKLIARKKDWDPKKYGGFDSPTVAYSVLVVAKVEKGKSKKLKSVKELLGITIMERSSFEKNPIDFLEAKGYKEVKKDLIIKLPKYSLFELENGRKRMLASAGELQKGNELALPSKYVNFLYLASHYEKLKGSPEDNEQKQLFVEQHKHYLDEIIEQISEFSKRVILADANLDKVLSAYNKHRDKPIREQAENIIHLFTLTNLGAPAAFKYFDTTIDRKRYTSTKEVLDATLIHQSITGLYETRIDLSQLGGDGGGGGGSGGGGSGGGGSGGGGSGGGGSGGLLGRDLLTKLKAQIQFSTEGPQVTWEDRPAMCLVLNLEEEYRLHEKPVPPSIDPSWLQLFPMVWAEKAGMGLANQVPPVVVELKSDASPVAVRQYPMSKEAREGIRPHIQRFLDLGILVPCQSPWNTPLLPVKKPGTNDYRPVQDLREVNKRVQDIHPTVPNPYNLLSSLPPSHTWYSVLDLKDAFFCLKLHPNSQPLFAFEWRDPEKGNTGQLTWTRLPQGFKNSPTLFDEALHRDLASFRALNPQVVMLQYVDDLLVAAPTYRDCKEGTRRLLQELSKLGYRVSAKKAQLCREEVTYLGYLLKGGKRWLTPARKATVMKIPTPTTPRQVREFLGTAGFCRLWIPGFASLAAPLYPLTREKVPFTWTEAHQEAFGRIKEALLSAPALALPDLTKPFALYVDEKEGVARGVLTQTLGPWRRPVAYLSKKLDPVASGWPTCLKAIAAVALLLKDADKLTLGQNVLVIAPHNLESIVRQPPDRWMTNARMTHYQSLLLNERVSFAPPAILNPATLLPVESDDTPIHICSEILAEETGTRPDLRDQPLPGVPAWYTDGSSFIMDGRRQAGAAIVDNKRTVWASNLPEGTSAQKAELIALTQALRLAEGKSINIYTDSRYAFATAHVHGAIYKQRGLLTSAGKDIKNKEEILALLEAIHLPKRVAIIHCPGHQRGTDPVATGNRKADEAAKQAAQSTRILTETTKNAGKRTADGSEFEKRTADGSEFESPKKKAKVE

SEQ ID NO: 6175 - protein, 2141 aa, synthetic construct
MPAAKRVKLDGGDKKYSIGLDIGTNSVGWAVITDEYKVPSKKFKVLGNTDRHSIKKNLIGALLFDSGETAEATRLKRTARRRYTRRKNRICYLQEIFSNEMAKVDDSFFHRLEESFLVEEDKKHERHPIFGNIVDEVAYHEKYPTIYHLRKKLVDSTDKADLRLIYLALAHMIKFRGHFLIEGDLNPDNSDVDKLFIQLVQTYNQLFEENPINASGVDAKAILSARLSKSRRLENLIAQLPGEKKNGLFGNLIALSLGLTPNFKSNFDLAEDAKLQLSKDTYDDDLDNLLAQIGDQYADLFLAAKNLSDAILLSDILRVNTEITKAPLSASMIKRYDEHHQDLTLLKALVRQQLPEKYKEIFFDQSKNGYAGYIDGGASQEEFYKFIKPILEKMDGTEELLVKLNREDLLRKQRTFDNGSIPHQIHLGELHAILRRQEDFYPFLKDNREKIEKILTFRIPYYVGPLARGNSRFAWMTRKSEETITPWNFEEVVDKGASAQSFIERMTNFDKNLPNEKVLPKHSLLYEYFTVYNELTKVKYVTEGMRKPAFLSGEQKKAIVDLLFKTNRKVTVKQLKEDYFKKIECFDSVEISGVEDRFNASLGTYHDLLKIIKDKDFLDNEENEDILEDIVLTLTLFEDREMIEERLKTYAHLFDDKVMKQLKRRRYTGWGRLSRKLINGIRDKQSGKTILDFLKSDGFANRNFMQLIHDDSLTFKEDIQKAQVSGQGDSLHEHIANLAGSPAIKKGILQTVKVVDELVKVMGRHKPENIVIEMARENQTTQKGQKNSRERMKRIEEGIKELGSQILKEHPVENTQLQNEKLYLYYLQNGRDMYVDQELDINRLSDYDVDHIVPQSFLKDDSIDNKVLTRSDKARGKSDNVPSEEVVKKMKNYWRQLLNAKLITQRKFDNLTKAERGGLSELDKAGFIKRQLVETRQITKHVAQILDSRMNTKYDENDKLIREVKVITLKSKLVSDFRKDFQFYKVREINNYHHAHDAYLNAVVGTALIKKYPKLESEFVYGDYKVYDVRKMIAKSEQEIGKATAKYFFYSNIMNFFKTEITLANGEIRKRPLIETNGETGEIVWDKGRDFATVRKVLSMPQVNIVKKTEVQTGGFSKESILPKRNSDKLIARKKDWDPKKYGGFDSPTVAYSVLVVAKVEKGKSKKLKSVKELLGITIMERSSFEKNPIDFLEAKGYKEVKKDLIIKLPKYSLFELENGRKRMLASAGELQKGNELALPSKYVNFLYLASHYEKLKGSPEDNEQKQLFVEQHKHYLDEIIEQISEFSKRVILADANLDKVLSAYNKHRDKPIREQAENIIHLFTLTNLGAPAAFKYFDTTIDRKRYTSTKEVLDATLIHQSITGLYETRIDLSQLGGDGGGGGGSGGGGSGGGGSGGGGSGGGGSGGLLGRDLLTKLKAQIQFSTEGPQVTWEDRPAMCLVLNLEEEYRLHEKPVPPSIDPSWLQLFPMVWAEKAGMGLANQVPPVVVELKSDASPVAVRQYPMSKEAREGIRPHIQRFLDLGILVPCQSPWNTPLLPVKKPGTNDYRPVQDLREVNKRVQDIHPTVPNPYNLLSSLPPSHTWYSVLDLKDAFFCLKLHPNSQPLFAFEWRDPEKGNTGQLTWTRLPQGFKNSPTLFNEALHRDLASFRALNPQVVMLQYVDDLLVAAPTYRDCKEGTRRLLQELSKLGYRVSAKKAQLCREEVTYLGYLLKGGKRWLTPARKATVMKIPTPTTPRQVREFLGTAGFCRLWIPGFASLAAPLYPLTRPKVPFTWTEAHQEAFGRIKEALLSAPALALPDLTKPFALYVDEKEGVARGVLTQTLGPWRRPVAYLSKKLDPVASGWPTCLKAIAAVALLLKDADKLTLGQNVLVIAPHNLESIVRQPPDRWMTNARMTHYQSLLLNERVSFAPPAILNPATLLPVESDDTPIHICSEILAEETGTRPDLRDQPLPGVPAWYTDGSSFIMDGRRQAGAAIVDNKRTVWASNLPEGTSAQKAELIALTQALRLAEGKSINIYTDSRYAFATAHVHGAIYKQRGWLTSAGKDIKNKEEILALLEAIHLPKRVAIIHCPGHQRGTDPVATGNRKADEAAKQAAQSTRILTETTKNAGKRTADGSEFEKRTADGSEFESPKKKAKVE

SEQ ID NO: 6176 - protein, 2141 aa, synthetic construct
MPAAKRVKLDGGDKKYSIGLDIGTNSVGWAVITDEYKVPSKKFKVLGNTDRHSIKKNLIGALLFDSGETAEATRLKRTARRRYTRRKNRICYLQEIFSNEMAKVDDSFFHRLEESFLVEEDKKHERHPIFGNIVDEVAYHEKYPTIYHLRKKLVDSTDKADLRLIYLALAHMIKFRGHFLIEGDLNPDNSDVDKLFIQLVQTYNQLFEENPINASGVDAKAILSARLSKSRRLENLIAQLPGEKKNGLFGNLIALSLGLTPNFKSNFDLAEDAKLQLSKDTYDDDLDNLLAQIGDQYADLFLAAKNLSDAILLSDILRVNTEITKAPLSASMIKRYDEHHQDLTLLKALVRQQLPEKYKEIFFDQSKNGYAGYIDGGASQEEFYKFIKPILEKMDGTEELLVKLNREDLLRKQRTFDNGSIPHQIHLGELHAILRRQEDFYPFLKDNREKIEKILTFRIPYYVGPLARGNSRFAWMTRKSEETITPWNFEEVVDKGASAQSFIERMTNFDKNLPNEKVLPKHSLLYEYFTVYNELTKVKYVTEGMRKPAFLSGEQKKAIVDLLFKTNRKVTVKQLKEDYFKKIECFDSVEISGVEDRFNASLGTYHDLLKIIKDKDFLDNEENEDILEDIVLTLTLFEDREMIEERLKTYAHLFDDKVMKQLKRRRYTGWGRLSRKLINGIRDKQSGKTILDFLKSDGFANRNFMQLIHDDSLTFKEDIQKAQVSGQGDSLHEHIANLAGSPAIKKGILQTVKVVDELVKVMGRHKPENIVIEMARENQTTQKGQKNSRERMKRIEEGIKELGSQILKEHPVENTQLQNEKLYLYYLQNGRDMYVDQELDINRLSDYDVDHIVPQSFLKDDSIDNKVLTRSDKARGKSDNVPSEEVVKKMKNYWRQLLNAKLITQRKFDNLTKAERGGLSELDKAGFIKRQLVETRQITKHVAQILDSRMNTKYDENDKLIREVKVITLKSKLVSDFRKDFQFYKVREINNYHHAHDAYLNAVVGTALIKKYPKLESEFVYGDYKVYDVRKMIAKSEQEIGKATAKYFFYSNIMNFFKTEITLANGEIRKRPLIETNGETGEIVWDKGRDFATVRKVLSMPQVNIVKKTEVQTGGFSKESILPKRNSDKLIARKKDWDPKKYGGFDSPTVAYSVLVVAKVEKGKSKKLKSVKELLGITIMERSSFEKNPIDFLEAKGYKEVKKDLIIKLPKYSLFELENGRKRMLASAGELQKGNELALPSKYVNFLYLASHYEKLKGSPEDNEQKQLFVEQHKHYLDEIIEQISEFSKRVILADANLDKVLSAYNKHRDKPIREQAENIIHLFTLTNLGAPAAFKYFDTTIDRKRYTSTKEVLDATLIHQSITGLYETRIDLSQLGGDGGGGGGSGGGGSGGGGSGGGGSGGGGSGGLLGRDLLTKLKAQIQFSTEGPQVTWEDRPAMCLVLNLEEEYRLHEKPVPPSIDPSWLQLFPMVWAEKAGMGLANQVPPVVVELKSDASPVAVRQYPMSKEAREGIRPHIQRFLDLGILVPCQSPWNTPLLPVKKPGTNDYRPVQDLREVNKRVQDIHPTVPNPYNLLSSLPPSHTWYSVLDLKDAFFCLKLHPNSQPLFAFEWRDPEKGNTGQLTWTRLPQGFKNSPTLFNEALHRDLASFRALNPQVVMLQYVDDLLVAAPTYRDCKEGTRRLLQELSKLGYRVSAKKAQLCREEVTYLGYLLKGGKRWLTPARKATVMKIPTPTTPRQVREFLGKAGFCRLFIPGFASLAAPLYPLTRPKVPFTWTEAHQEAFGRIKEALLSAPALALPDLTKPFALYVDEKEGVARGVLTQTLGPWRRPVAYLSKKLDPVASGWPTCLKAIAAVALLLKDADKLTLGQNVLVIAPHNLESIVRQPPDRWMTNARMTHYQSLLLNERVSFAPPAILNPATLLPVESDDTPIHICSEILAEETGTRPDLRDQPLPGVPAWYTDGSSFIMDGRRQAGAAIVDNKRTVWASNLPEGTSAQKAELIALTQALRLAEGKSINIYTDSRYAFATAHVHGAIYKQRGWLTSAGKDIKNKEEILALLEAIHLPKRVAIIHCPGHQRGTDPVATGNRKADEAAKQAAQSTRILTETTKNAGKRTADGSEFEKRTADGSEFESPKKKAKVE

SEQ ID NO: 6177 - protein, 2232 aa, synthetic construct
MPAAKRVKLDGGDKKYSIGLDIGTNSVGWAVITDEYKVPSKKFKVLGNTDRHSIKKNLIGALLFDSGETAEATRLKRTARRRYTRRKNRICYLQEIFSNEMAKVDDSFFHRLEESFLVEEDKKHERHPIFGNIVDEVAYHEKYPTIYHLRKKLVDSTDKADLRLIYLALAHMIKFRGHFLIEGDLNPDNSDVDKLFIQLVQTYNQLFEENPINASGVDAKAILSARLSKSRRLENLIAQLPGEKKNGLFGNLIALSLGLTPNFKSNFDLAEDAKLQLSKDTYDDDLDNLLAQIGDQYADLFLAAKNLSDAILLSDILRVNTEITKAPLSASMIKRYDEHHQDLTLLKALVRQQLPEKYKEIFFDQSKNGYAGYIDGGASQEEFYKFIKPILEKMDGTEELLVKLNREDLLRKQRTFDNGSIPHQIHLGELHAILRRQEDFYPFLKDNREKIEKILTFRIPYYVGPLARGNSRFAWMTRKSEETITPWNFEEVVDKGASAQSFIERMTNFDKNLPNEKVLPKHSLLYEYFTVYNELTKVKYVTEGMRKPAFLSGEQKKAIVDLLFKTNRKVTVKQLKEDYFKKIECFDSVEISGVEDRFNASLGTYHDLLKIIKDKDFLDNEENEDILEDIVLTLTLFEDREMIEERLKTYAHLFDDKVMKQLKRRRYTGWGRLSRKLINGIRDKQSGKTILDFLKSDGFANRNFMQLIHDDSLTFKEDIQKAQVSGQGDSLHEHIANLAGSPAIKKGILQTVKVVDELVKVMGRHKPENIVIEMARENQTTQKGQKNSRERMKRIEEGIKELGSQILKEHPVENTQLQNEKLYLYYLQNGRDMYVDQELDINRLSDYDVDHIVPQSFLKDDSIDNKVLTRSDKARGKSDNVPSEEVVKKMKNYWRQLLNAKLITQRKFDNLTKAERGGLSELDKAGFIKRQLVETRQITKHVAQILDSRMNTKYDENDKLIREVKVITLKSKLVSDFRKDFQFYKVREINNYHHAHDAYLNAVVGTALIKKYPKLESEFVYGDYKVYDVRKMIAKSEQEIGKATAKYFFYSNIMNFFKTEITLANGEIRKRPLIETNGETGEIVWDKGRDFATVRKVLSMPQVNIVKKTEVQTGGFSKESILPKRNSDKLIARKKDWDPKKYGGFDSPTVAYSVLVVAKVEKGKSKKLKSVKELLGITIMERSSFEKNPIDFLEAKGYKEVKKDLIIKLPKYSLFELENGRKRMLASAGELQKGNELALPSKYVNFLYLASHYEKLKGSPEDNEQKQLFVEQHKHYLDEIIEQISEFSKRVILADANLDKVLSAYNKHRDKPIREQAENIIHLFTLTNLGAPAAFKYFDTTIDRKRYTSTKEVLDATLIHQSITGLYETRIDLSQLGGDGGGGGGSGGGGSGGGGSGGGGSGGGGSGGTLGDQGSRGSDPLPEPRVTLTVEGIPTEFLVNTGAEHSVLTKPMGKMGSKRTVVAGATGSKVYPWTTKRLLKIGQKQVTHSFLVIPECPAPLLGRDLLTKLKAQIQFSTEGPQVTWEDRPAMCLVLNLEEEYRLHEKPVPPSIDPSWLQLFPMVWAEKAGMGLANQVPPVVVELKSDASPVAVRQYPMSKEAREGIRPHIQRFLDLGILVPCQSPWNTPLLPVKKPGTNDYRPVQDLREVNKRVQDIHPTVPNPYNLLSSLPPSHTWYSVLDLKDAFFCLKLHPNSQPLFAFEWRDPEKGNTGQLTWTRLPQGFKNSPTLFNEALHRDLASFRALNPQVVMLQYVDDLLVAAPTYRDCKEGTRRLLQELSKLGYRVSAKKAQLCREEVTYLGYLLKGGKRWLTPARKATVMKIPTPTTPRQVREFLGTAGFCRLWIPGFASLAAPLYPLTRPKVPFTWTEAHQEAFGRIKEALLSAPALALPDLTKPFALYVDEKEGVARGVLTQTLGPWRRPVAYLSKKLDPVASGWPTCLKAIAAVALLLKDADKLTLGQNVLVIAPHNLESIVRQPPDRWMTNARMTHYQSLLLNERVSFAPPAILNPATLLPVESDDTPIHICSEILAEETGTRPDLRDQPLPGVPAWYTDGSSFIMDGRRQAGAAIVDNKRTVWASNLPEGTSAQKAELIALTQALRLAEGKSINIYTDSRYAFATAHVHGAIYKQRGWLTSAGKDIKNKEEILALLEAIHLPKRVAIIHCPGHQRGTDPVATGNRKADEAAKQAAQSTRILTETTKNAGKRTADGSEFEKRTADGSEFESPKKKAKVE

SEQ ID NO: 6178 - protein, 2110 aa, synthetic construct
MPAAKRVKLDGGDKKYSIGLDIGTNSVGWAVITDEYKVPSKKFKVLGNTDRHSIKKNLIGALLFDSGETAEATRLKRTARRRYTRRKNRICYLQEIFSNEMAKVDDSFFHRLEESFLVEEDKKHERHPIFGNIVDEVAYHEKYPTIYHLRKKLVDSTDKADLRLIYLALAHMIKFRGHFLIEGDLNPDNSDVDKLFIQLVQTYNQLFEENPINASGVDAKAILSARLSKSRRLENLIAQLPGEKKNGLFGNLIALSLGLTPNFKSNFDLAEDAKLQLSKDTYDDDLDNLLAQIGDQYADLFLAAKNLSDAILLSDILRVNTEITKAPLSASMIKRYDEHHQDLTLLKALVRQQLPEKYKEIFFDQSKNGYAGYIDGGASQEEFYKFIKPILEKMDGTEELLVKLNREDLLRKQRTFDNGSIPHQIHLGELHAILRRQEDFYPFLKDNREKIEKILTFRIPYYVGPLARGNSRFAWMTRKSEETITPWNFEEVVDKGASAQSFIERMTNFDKNLPNEKVLPKHSLLYEYFTVYNELTKVKYVTEGMRKPAFLSGEQKKAIVDLLFKTNRKVTVKQLKEDYFKKIECFDSVEISGVEDRFNASLGTYHDLLKIIKDKDFLDNEENEDILEDIVLTLTLFEDREMIEERLKTYAHLFDDKVMKQLKRRRYTGWGRLSRKLINGIRDKQSGKTILDFLKSDGFANRNFMQLIHDDSLTFKEDIQKAQVSGQGDSLHEHIANLAGSPAIKKGILQTVKVVDELVKVMGRHKPENIVIEMARENQTTQKGQKNSRERMKRIEEGIKELGSQILKEHPVENTQLQNEKLYLYYLQNGRDMYVDQELDINRLSDYDVDHIVPQSFLKDDSIDNKVLTRSDKARGKSDNVPSEEVVKKMKNYWRQLLNAKLITQRKFDNLTKAERGGLSELDKAGFIKRQLVETRQITKHVAQILDSRMNTKYDENDKLIREVKVITLKSKLVSDFRKDFQFYKVREINNYHHAHDAYLNAVVGTALIKKYPKLESEFVYGDYKVYDVRKMIAKSEQEIGKATAKYFFYSNIMNFFKTEITLANGEIRKRPLIETNGETGEIVWDKGRDFATVRKVLSMPQVNIVKKTEVQTGGFSKESILPKRNSDKLIARKKDWDPKKYGGFDSPTVAYSVLVVAKVEKGKSKKLKSVKELLGITIMERSSFEKNPIDFLEAKGYKEVKKDLIIKLPKYSLFELENGRKRMLASAGELQKGNELALPSKYVNFLYLASHYEKLKGSPEDNEQKQLFVEQHKHYLDEIIEQISEFSKRVILADANLDKVLSAYNKHRDKPIREQAENIIHLFTLTNLGAPAAFKYFDTTIDRKRYTSTKEVLDATLIHQSITGLYETRIDLSQLGGDGGGGGGSGGGGSGGGGSGGGGSGGGGSGGTLNLEDEYRLYETSAEPEVSPGSTWLSDFPQAWAETGGMGLAVRQAPLIIPLKATSTPVSIKQYPMSQEAKLGIKPHIQRLLDQGILVPCQSPWNTPLLPVKKPGTNDYRPVQDLREVNKRVEDIHPTVPNPYNLLSGLPPSHRWYTVLDLKDAFFCLRLHPTSQPLFAFEWRDPGMGISGQLTWTRLPQGFKNSPTLFNEALHRDLADFRIQHPDLILLQYVDDILLAATSELDCQQGTRALLLTLGNLGYRASAKKAQLCQKQVKYLGYLLKEGQRWLTEARKETVMGQPTPKTPRQLREFLGKAGFCRLFIPGFAEMAAPLYPLTKPGTLFNWGPDQQKAYQEIKQALLTAPALGLPDLTKPFELFVDEKQGYAKGVLTQKLGPWRRPVAYLSKKLDPVAAGWPPCLRMVAAIAVLRKDAGKLTMGQPLVILAPHAVEALVKQPPDRWLSNARMTHYQAMLLDTDRVQFGPVVALNPATLLPLPEEGAPHDCLEILAETHGTRPDLTDQPIPDADHTWYTDGSSFLQEGQRKAGAAVTTETEVIWARALPAGTSAQRAELIALTQALKMAEGKRLNVYTDSRYAFATAHIHGEIYRRRGWLTSEGREIKNKSEILALLKALFLPKRLSIIHCLGHQKGDSAEARGNRLADQAAREAAIKTPPDTSTLLAGKRTADGSEFEKRTADGSEFESPKKKAKVE

SEQ ID NO: 6179 - protein, 2110 aa, synthetic construct
MPAAKRVKLDGGDKKYSIGLDIGTNSVGWAVITDEYKVPSKKFKVLGNTDRHSIKKNLIGALLFDSGETAEATRLKRTARRRYTRRKNRICYLQEIFSNEMAKVDDSFFHRLEESFLVEEDKKHERHPIFGNIVDEVAYHEKYPTIYHLRKKLVDSTDKADLRLIYLALAHMIKFRGHFLIEGDLNPDNSDVDKLFIQLVQTYNQLFEENPINASGVDAKAILSARLSKSRRLENLIAQLPGEKKNGLFGNLIALSLGLTPNFKSNFDLAEDAKLQLSKDTYDDDLDNLLAQIGDQYADLFLAAKNLSDAILLSDILRVNTEITKAPLSASMIKRYDEHHQDLTLLKALVRQQLPEKYKEIFFDQSKNGYAGYIDGGASQEEFYKFIKPILEKMDGTEELLVKLNREDLLRKQRTFDNGSIPHQIHLGELHAILRRQEDFYPFLKDNREKIEKILTFRIPYYVGPLARGNSRFAWMTRKSEETITPWNFEEVVDKGASAQSFIERMTNFDKNLPNEKVLPKHSLLYEYFTVYNELTKVKYVTEGMRKPAFLSGEQKKAIVDLLFKTNRKVTVKQLKEDYFKKIECFDSVEISGVEDRFNASLGTYHDLLKIIKDKDFLDNEENEDILEDIVLTLTLFEDREMIEERLKTYAHLFDDKVMKQLKRRRYTGWGRLSRKLINGIRDKQSGKTILDFLKSDGFANRNFMQLIHDDSLTFKEDIQKAQVSGQGDSLHEHIANLAGSPAIKKGILQTVKVVDELVKVMGRHKPENIVIEMARENQTTQKGQKNSRERMKRIEEGIKELGSQILKEHPVENTQLQNEKLYLYYLQNGRDMYVDQELDINRLSDYDVDHIVPQSFLKDDSIDNKVLTRSDKARGKSDNVPSEEVVKKMKNYWRQLLNAKLITQRKFDNLTKAERGGLSELDKAGFIKRQLVETRQITKHVAQILDSRMNTKYDENDKLIREVKVITLKSKLVSDFRKDFQFYKVREINNYHHAHDAYLNAVVGTALIKKYPKLESEFVYGDYKVYDVRKMIAKSEQEIGKATAKYFFYSNIMNFFKTEITLANGEIRKRPLIETNGETGEIVWDKGRDFATVRKVLSMPQVNIVKKTEVQTGGFSKESILPKRNSDKLIARKKDWDPKKYGGFDSPTVAYSVLVVAKVEKGKSKKLKSVKELLGITIMERSSFEKNPIDFLEAKGYKEVKKDLIIKLPKYSLFELENGRKRMLASAGELQKGNELALPSKYVNFLYLASHYEKLKGSPEDNEQKQLFVEQHKHYLDEIIEQISEFSKRVILADANLDKVLSAYNKHRDKPIREQAENIIHLFTLTNLGAPAAFKYFDTTIDRKRYTSTKEVLDATLIHQSITGLYETRIDLSQLGGDGGGGGGSGGGGSGGGGSGGGGSGGGGSGGTLNIEDEYRLHETSKGPDVPLGSTWLSDFPQAWAETGGMGLAFRQAPLIISLKATSTPVSIKQYPMSQEARLGIKPHIQRLLDQGILVPCQSPWNTPLLPVKKPGTNDYRPVQDLREVNKRVEDIHPTVPNPYNLLSGLPPSHQWYTVLDLKDAFFCLRLHPTSQSLFAFEWKDPEMGISGQLTWTRLPQGFKNSPTLFNEALHRDLADFRIQHPDLILLQYVDDLLLAATSELDCQQGTRALLQTLGDLGYRASAKKAQICQKQVKYLGYLLKEGQRWLTEARKETVMGQPTPKTPRQLREFLGTAGLCRLWIPGFAEMAAPLYPLTKPGTLFKWGPDQQKAYQEIKQALLTAPALGLPDLTKPFELFVDEKQGYAKGVLTQKLGPWRRPVAYLSKKLDPVAAGWPPCLRMVAAIAVLTKDVGKLTMGQPLVILAPHAVEALVKQPPDRWLSNARMTHYQALLLDTDRVQFGPIVALNPATLLPLPEEGLQHDCLDILAEAHGTRPDLTDQPLPDADHTWYTDGSSFLQEGQRRAGAAVTTETEVIWAKALPAGTSAQRAELIALTQALKMAAGKKLNVYTDSRYAFATAHIHGEIYRRRGWLTSEGKEIKNKDEILALLKALFLPKRLSIIHCPGHQKGNHAEARGNRMADQAAREVATRETPETSTLLAGKRTADGSEFEKRTADGSEFESPKKKAKVE

SEQ ID NO: 6180 - protein, 2110 aa, synthetic construct
MPAAKRVKLDGGDKKYSIGLDIGTNSVGWAVITDEYKVPSKKFKVLGNTDRHSIKKNLIGALLFDSGETAEATRLKRTARRRYTRRKNRICYLQEIFSNEMAKVDDSFFHRLEESFLVEEDKKHERHPIFGNIVDEVAYHEKYPTIYHLRKKLVDSTDKADLRLIYLALAHMIKFRGHFLIEGDLNPDNSDVDKLFIQLVQTYNQLFEENPINASGVDAKAILSARLSKSRRLENLIAQLPGEKKNGLFGNLIALSLGLTPNFKSNFDLAEDAKLQLSKDTYDDDLDNLLAQIGDQYADLFLAAKNLSDAILLSDILRVNTEITKAPLSASMIKRYDEHHQDLTLLKALVRQQLPEKYKEIFFDQSKNGYAGYIDGGASQEEFYKFIKPILEKMDGTEELLVKLNREDLLRKQRTFDNGSIPHQIHLGELHAILRRQEDFYPFLKDNREKIEKILTFRIPYYVGPLARGNSRFAWMTRKSEETITPWNFEEVVDKGASAQSFIERMTNFDKNLPNEKVLPKHSLLYEYFTVYNELTKVKYVTEGMRKPAFLSGEQKKAIVDLLFKTNRKVTVKQLKEDYFKKIECFDSVEISGVEDRFNASLGTYHDLLKIIKDKDFLDNEENEDILEDIVLTLTLFEDREMIEERLKTYAHLFDDKVMKQLKRRRYTGWGRLSRKLINGIRDKQSGKTILDFLKSDGFANRNFMQLIHDDSLTFKEDIQKAQVSGQGDSLHEHIANLAGSPAIKKGILQTVKVVDELVKVMGRHKPENIVIEMARENQTTQKGQKNSRERMKRIEEGIKELGSQILKEHPVENTQLQNEKLYLYYLQNGRDMYVDQELDINRLSDYDVDHIVPQSFLKDDSIDNKVLTRSDKARGKSDNVPSEEVVKKMKNYWRQLLNAKLITQRKFDNLTKAERGGLSELDKAGFIKRQLVETRQITKHVAQILDSRMNTKYDENDKLIREVKVITLKSKLVSDFRKDFQFYKVREINNYHHAHDAYLNAVVGTALIKKYPKLESEFVYGDYKVYDVRKMIAKSEQEIGKATAKYFFYSNIMNFFKTEITLANGEIRKRPLIETNGETGEIVWDKGRDFATVRKVLSMPQVNIVKKTEVQTGGFSKESILPKRNSDKLIARKKDWDPKKYGGFDSPTVAYSVLVVAKVEKGKSKKLKSVKELLGITIMERSSFEKNPIDFLEAKGYKEVKKDLIIKLPKYSLFELENGRKRMLASAGELQKGNELALPSKYVNFLYLASHYEKLKGSPEDNEQKQLFVEQHKHYLDEIIEQISEFSKRVILADANLDKVLSAYNKHRDKPIREQAENIIHLFTLTNLGAPAAFKYFDTTIDRKRYTSTKEVLDATLIHQSITGLYETRIDLSQLGGDGGGGGGSGGGGSGGGGSGGGGSGGGGSGGTLNIEDEHRLHETSKEPDVSLGSTWLSDFPQAWAETGGMGLAVRQAPLIIPLKATSTPVSIKQYPMSQEARLGIKPHIQRLLDQGILVPCQSPWNTPLLPVKKPGTNDYRPVQDLREVNKRVEDIHPTVPNPYNLLSGLPPSHQWYTVLDLKDAFFCLRLHPTSQPLFAFEWRDPEMGISGQLTWTRLPQGFKNSPTLFNEALHRDLADFRIQHPDLILLQYVDDLLLAATSELDCQQGTRALLQTLGNLGYRASAKKAQICQKQVKYLGYLLKEGQRWLTEARKETVMGQPTPKTPRQLREFLGTAGFCRLWIPGFAEMAAPLYPLTKPGTLFNWGPDQQKAYQEIKQALLTAPALGLPDLTKPFELFVDEKQGYAKGVLTQKLGPWRRPVAYLSKKLDPVAAGWPPCLRMVAAIAVLTKDAGKLTMGQPLVILAPHAVEALVKQPPDRWLSNARMTHYQALLLDTDRVQFGPVVALNPATLLPLPEEGLQHNCLDILAEAHGTRPDLTDQPLPDADHTWYTDGSSLLQEGQRKAGAAVTTETEVIWAKALPAGTSAQRAELIALTQALKMAEGKKLNVYTDSRYAFATAHIHGEIYRRRGWLTSEGKEIKNKDEILALLKALFLPKRLSIIHCPGHQKGHSAEARGNRMADQAARKAAITETPDTSTLLAGKRTADGSEFEKRTADGSEFESPKKKAKVE

SEQ ID NO: 6181 - protein, 2110 aa, synthetic construct; identical to SEQ ID NO: 4504

SEQ ID NO: 6182 - protein, 2110 aa, synthetic construct; identical to SEQ ID NO: 6180

SEQ ID NO: 6183 - protein, 2110 aa, synthetic construct; identical to SEQ ID NO: 4504

SEQ ID NO: 6184 - protein, 2130 aa, synthetic construct
MPAAKRVKLDGGDKKYSIGLDIGTNSVGWAVITDEYKVPSKKFKVLGNTDRHSIKKNLIGALLFDSGETAEATRLKRTARRRYTRRKNRICYLQEIFSNEMAKVDDSFFHRLEESFLVEEDKKHERHPIFGNIVDEVAYHEKYPTIYHLRKKLVDSTDKADLRLIYLALAHMIKFRGHFLIEGDLNPDNSDVDKLFIQLVQTYNQLFEENPINASGVDAKAILSARLSKSRRLENLIAQLPGEKKNGLFGNLIALSLGLTPNFKSNFDLAEDAKLQLSKDTYDDDLDNLLAQIGDQYADLFLAAKNLSDAILLSDILRVNTEITKAPLSASMIKRYDEHHQDLTLLKALVRQQLPEKYKEIFFDQSKNGYAGYIDGGASQEEFYKFIKPILEKMDGTEELLVKLNREDLLRKQRTFDNGSIPHQIHLGELHAILRRQEDFYPFLKDNREKIEKILTFRIPYYVGPLARGNSRFAWMTRKSEETITPWNFEEVVDKGASAQSFIERMTNFDKNLPNEKVLPKHSLLYEYFTVYNELTKVKYVTEGMRKPAFLSGEQKKAIVDLLFKTNRKVTVKQLKEDYFKKIECFDSVEISGVEDRFNASLGTYHDLLKIIKDKDFLDNEENEDILEDIVLTLTLFEDREMIEERLKTYAHLFDDKVMKQLKRRRYTGWGRLSRKLINGIRDKQSGKTILDFLKSDGFANRNFMQLIHDDSLTFKEDIQKAQVSGQGDSLHEHIANLAGSPAIKKGILQTVKVVDELVKVMGRHKPENIVIEMARENQTTQKGQKNSRERMKRIEEGIKELGSQILKEHPVENTQLQNEKLYLYYLQNGRDMYVDQELDINRLSDYDVDHIVPQSFLKDDSIDNKVLTRSDKARGKSDNVPSEEVVKKMKNYWRQLLNAKLITQRKFDNLTKAERGGLSELDKAGFIKRQLVETRQITKHVAQILDSRMNTKYDENDKLIREVKVITLKSKLVSDFRKDFQFYKVREINNYHHAHDAYLNAVVGTALIKKYPKLESEFVYGDYKVYDVRKMIAKSEQEIGKATAKYFFYSNIMNFFKTEITLANGEIRKRPLIETNGETGEIVWDKGRDFATVRKVLSMPQVNIVKKTEVQTGGFSKESILPKRNSDKLIARKKDWDPKKYGGFDSPTVAYSVLVVAKVEKGKSKKLKSVKELLGITIMERSSFEKNPIDFLEAKGYKEVKKDLIIKLPKYSLFELENGRKRMLASAGELQKGNELALPSKYVNFLYLASHYEKLKGSPEDNEQKQLFVEQHKHYLDEIIEQISEFSKRVILADANLDKVLSAYNKHRDKPIREQAENIIHLFTLTNLGAPAAFKYFDTTIDRKRYTSTKEVLDATLIHQSITGLYETRIDLSQLGGDGGGGGGSGGGGSGGGGSGGGGSGGGGSGGVQEISDSRPMLHIYLNGRRFLGLLDTGADKTCIAGRDWPANWPIHQTESSLQGLGMACGVARSSQPLRWQHEDKSGIIHPFVIPTLPFTLWGRDIMKDIKVRLMTDSPDDSQDLMIGAIESNLFADQISWKSDQPVWLNQWPLKQEKLQALQQLVTEQLQLGHLEESNSPWNTPVFVIKKKSGKWRLLQDLRAVNATMHDMGALQPGLPSPVAVPKGWEIIIIDLQDCFFNIKLHPEDCKRFAFSVPSPNFKRPYQRFQWKVLPQGMKNSPTLCQKFVDKAILTVRDKYQDSYIVHYMDDILLAHPSRSIVDEILTSMIQALNKHGLVVSTEKIQKYDNLKYLGTHIQGDSVSYQKLQIRTDKLRTLNDFQKLLGNINWIRPFLKLTTGELKPLFEILNGDSNPISTRKLTPEACKALQLMNERLSTARVKRLDLSQPWSLCILKTEYTPTACLWQDGVVEWIHLPHISPKVITPYDIFCTQLIIKGRHRSKELFSKDPDYIVVPYTKVQFDLLLQEKEDWPISLLGFLGEVHFHLPKDPLLTFTLQTAIIFPHMTSTTPLEKGIVIFTDGSANGRSVTYIQGREPIIKENTQNTAQQAEIVAVITAFEEVSQPFNLYTDSKYVTGLFPEIETATLSPRTKIYTELKHLQRLIHKRQEKFYIGHIRGHTGLPGPLAQGNAYADSLTRILTAAGKRTADGSEFEKRTADGSEFESPKKKAKVE

SEQ ID NO: 6185 - protein, 2130 aa, synthetic construct
MPAAKRVKLDGGDKKYSIGLDIGTNSVGWAVITDEYKVPSKKFKVLGNTDRHSIKKNLIGALLFDSGETAEATRLKRTARRRYTRRKNRICYLQEIFSNEMAKVDDSFFHRLEESFLVEEDKKHERHPIFGNIVDEVAYHEKYPTIYHLRKKLVDSTDKADLRLIYLALAHMIKFRGHFLIEGDLNPDNSDVDKLFIQLVQTYNQLFEENPINASGVDAKAILSARLSKSRRLENLIAQLPGEKKNGLFGNLIALSLGLTPNFKSNFDLAEDAKLQLSKDTYDDDLDNLLAQIGDQYADLFLAAKNLSDAILLSDILRVNTEITKAPLSASMIKRYDEHHQDLTLLKALVRQQLPEKYKEIFFDQSKNGYAGYIDGGASQEEFYKFIKPILEKMDGTEELLVKLNREDLLRKQRTFDNGSIPHQIHLGELHAILRRQEDFYPFLKDNREKIEKILTFRIPYYVGPLARGNSRFAWMTRKSEETITPWNFEEVVDKGASAQSFIERMTNFDKNLPNEKVLPKHSLLYEYFTVYNELTKVKYVTEGMRKPAFLSGEQKKAIVDLLFKTNRKVTVKQLKEDYFKKIECFDSVEISGVEDRFNASLGTYHDLLKIIKDKDFLDNEENEDILEDIVLTLTLFEDREMIEERLKTYAHLFDDKVMKQLKRRRYTGWGRLSRKLINGIRDKQSGKTILDFLKSDGFANRNFMQLIHDDSLTFKEDIQKAQVSGQGDSLHEHIANLAGSPAIKKGILQTVKVVDELVKVMGRHKPENIVIEMARENQTTQKGQKNSRERMKRIEEGIKELGSQILKEHPVENTQLQNEKLYLYYLQNGRDMYVDQELDINRLSDYDVDHIVPQSFLKDDSIDNKVLTRSDKARGKSDNVPSEEVVKKMKNYWRQLLNAKLITQRKFDNLTKAERGGLSELDKAGFIKRQLVETRQITKHVAQILDSRMNTKYDENDKLIREVKVITLKSKLVSDFRKDFQFYKVREINNYHHAHDAYLNAVVGTALIKKYPKLESEFVYGDYKVYDVRKMIAKSEQEIGKATAKYFFYSNIMNFFKTEITLANGEIRKRPLIETNGETGEIVWDKGRDFATVRKVLSMPQVNIVKKTEVQTGGFSKESILPKRNSDKLIARKKDWDPKKYGGFDSPTVAYSVLVVAKVEKGKSKKLKSVKELLGITIMERSSFEKNPIDFLEAKGYKEVKKDLIIKLPKYSLFELENGRKRMLASAGELQKGNELALPSKYVNFLYLASHYEKLKGSPEDNEQKQLFVEQHKHYLDEIIEQISEFSKRVILADANLDKVLSAYNKHRDKPIREQAENIIHLFTLTNLGAPAAFKYFDTTIDRKRYTSTKEVLDATLIHQSITGLYETRIDLSQLGGDGGGGGGSGGGGSGGGGSGGGGSGGGGSGGWVQEISDSRPMLHIYLNGRRFLGLLNTGADKTCIAGRDWPANWPIHQTESSLQGLGMACGVARSSQPLRWQHEDKSGIIHPFVIPTLPFTLWGRDIMKDIKVRLMTDSPDDSQDLMIGAIESNLFADQISWKSDQPVWLNQWPLKQEKLQALQQLVTEQLQLGHLEESNSPWNTPVFVIKKKSGKWRLLQDLRAVNATMHDMGALQPGLPSPVAVPKGWEIIIIDLQDCFFNIKLHPEDCKRFAFSVPSPNFKRPYQRFQWKVLPQGMKNSPTLCQKFVDKAILTVRDKYQDSYIVHYMDDILLAHPSRSIVDEILTSMIQALNKHGLVVSTEKIQKYDNLKYLGTHIQGDSVSYQKLQIRTDKLRTLNDFQKLLGNINWIRPFLKLTTGELKPLFEILNGDSNPISTRKLTPEACKALQLMNERLSTARVKRLDLSQPWSLCILKTEYTPTACLWQDGVVEWIHLPHISPKVITPYDIFCTQLIIKGRHRSKELFSKDPDYIVVPYTKVQFDLLLQEKEDWPISLLGFLGEVHFHLPKDPLLTFTLQTAIIFPHMTSTTPLEKGIVIFTDGSANGRSVTYIQGREPIIKENTQNTAQQAEIVAVITAFEEVSQPFNLYTDSKYVTGLFPEIETATLSPRTKIYTELKHLQRLIHKRQEKFYIGHIRGHTGLPGPLAQGNAYADSLTRILTAGKRTADGSEFEKRTADGSEFESPKKKAKVE

SEQ ID NO: 6186 - protein, 2130 aa, synthetic construct; identical to SEQ ID NO: 6185

SEQ ID NO: 6187 - protein, 2038 aa, synthetic construct
MPAAKRVKLDGGDKKYSIGLDIGTNSVGWAVITDEYKVPSKKFKVLGNTDRHSIKKNLIGALLFDSGETAEATRLKRTARRRYTRRKNRICYLQEIFSNEMAKVDDSFFHRLEESFLVEEDKKHERHPIFGNIVDEVAYHEKYPTIYHLRKKLVDSTDKADLRLIYLALAHMIKFRGHFLIEGDLNPDNSDVDKLFIQLVQTYNQLFEENPINASGVDAKAILSARLSKSRRLENLIAQLPGEKKNGLFGNLIALSLGLTPNFKSNFDLAEDAKLQLSKDTYDDDLDNLLAQIGDQYADLFLAAKNLSDAILLSDILRVNTEITKAPLSASMIKRYDEHHQDLTLLKALVRQQLPEKYKEIFFDQSKNGYAGYIDGGASQEEFYKFIKPILEKMDGTEELLVKLNREDLLRKQRTFDNGSIPHQIHLGELHAILRRQEDFYPFLKDNREKIEKILTFRIPYYVGPLARGNSRFAWMTRKSEETITPWNFEEVVDKGASAQSFIERMTNFDKNLPNEKVLPKHSLLYEYFTVYNELTKVKYVTEGMRKPAFLSGEQKKAIVDLLFKTNRKVTVKQLKEDYFKKIECFDSVEISGVEDRFNASLGTYHDLLKIIKDKDFLDNEENEDILEDIVLTLTLFEDREMIEERLKTYAHLFDDKVMKQLKRRRYTGWGRLSRKLINGIRDKQSGKTILDFLKSDGFANRNFMQLIHDDSLTFKEDIQKAQVSGQGDSLHEHIANLAGSPAIKKGILQTVKVVDELVKVMGRHKPENIVIEMARENQTTQKGQKNSRERMKRIEEGIKELGSQILKEHPVENTQLQNEKLYLYYLQNGRDMYVDQELDINRLSDYDVDHIVPQSFLKDDSIDNKVLTRSDKARGKSDNVPSEEVVKKMKNYWRQLLNAKLITQRKFDNLTKAERGGLSELDKAGFIKRQLVETRQITKHVAQILDSRMNTKYDENDKLIREVKVITLKSKLVSDFRKDFQFYKVREINNYHHAHDAYLNAVVGTALIKKYPKLESEFVYGDYKVYDVRKMIAKSEQEIGKATAKYFFYSNIMNFFKTEITLANGEIRKRPLIETNGETGEIVWDKGRDFATVRKVLSMPQVNIVKKTEVQTGGFSKESILPKRNSDKLIARKKDWDPKKYGGFDSPTVAYSVLVVAKVEKGKSKKLKSVKELLGITIMERSSFEKNPIDFLEAKGYKEVKKDLIIKLPKYSLFELENGRKRMLASAGELQKGNELALPSKYVNFLYLASHYEKLKGSPEDNEQKQLFVEQHKHYLDEIIEQISEFSKRVILADANLDKVLSAYNKHRDKPIREQAENIIHLFTLTNLGAPAAFKYFDTTIDRKRYTSTKEVLDATLIHQSITGLYETRIDLSQLGGDGGGGGGSGGGGSGGGGSGGGGSGGGGSGGGRDIMKDIKVRLMTDSPDDSQDLMIGAIESNLFADQISWKSDQPVWLNQWPLKQEKLQALQQLVTEQLQLGHLEESNSPWNTPVFVIKKKSGKWRLLQDLRAVNATMHDMGALQPGLPSPVAVPKGWEIIIIDLQDCFFNIKLHPEDCKRFAFSVPSPNFKRPYQRFQWKVLPQGMKNSPTLCQKFVDKAILTVRDKYQDSYIVHYMDDILLAHPSRSIVDEILTSMIQALNKHGLVVSTEKIQKYDNLKYLGTHIQGDSVSYQKLQIRTDKLRTLNDFQKLLGNINWIRPFLKLTTGELKPLFEILNGDSNPISTRKLTPEACKALQLMNERLSTARVKRLDLSQPWSLCILKTEYTPTACLWQDGVVEWIHLPHISPKVITPYDIFCTQLIIKGRHRSKELFSKDPDYIVVPYTKVQFDLLLQEKEDWPISLLGFLGEVHFHLPKDPLLTFTLQTAIIFPHMTSTTPLEKGIVIFTDGSANGRSVTYIQGREPIIKENTQNTAQQAEIVAVITAFEEVSQPFNLYTDSKYVTGLFPEIETATLSPRTKIYTELKHLQRLIHKRQEKFYIGHIRGHTGLPGPLAQGNAYADSLTRILTAGKRTADGSEFEKRTADGSEFESPKKKAKVE

SEQ ID NO: 6188 - protein, 2102 aa, synthetic construct
MPAAKRVKLDGGDKKYSIGLDIGTNSVGWAVITDEYKVPSKKFKVLGNTDRHSIKKNLIGALLFDSGETAEATRLKRTARRRYTRRKNRICYLQEIFSNEMAKVDDSFFHRLEESFLVEEDKKHERHPIFGNIVDEVAYHEKYPTIYHLRKKLVDSTDKADLRLIYLALAHMIKFRGHFLIEGDLNPDNSDVDKLFIQLVQTYNQLFEENPINASGVDAKAILSARLSKSRRLENLIAQLPGEKKNGLFGNLIALSLGLTPNFKSNFDLAEDAKLQLSKDTYDDDLDNLLAQIGDQYADLFLAAKNLSDAILLSDILRVNTEITKAPLSASMIKRYDEHHQDLTLLKALVRQQLPEKYKEIFFDQSKNGYAGYIDGGASQEEFYKFIKPILEKMDGTEELLVKLNREDLLRKQRTFDNGSIPHQIHLGELHAILRRQEDFYPFLKDNREKIEKILTFRIPYYVGPLARGNSRFAWMTRKSEETITPWNFEEVVDKGASAQSFIERMTNFDKNLPNEKVLPKHSLLYEYFTVYNELTKVKYVTEGMRKPAFLSGEQKKAIVDLLFKTNRKVTVKQLKEDYFKKIECFDSVEISGVEDRFNASLGTYHDLLKIIKDKDFLDNEENEDILEDIVLTLTLFEDREMIEERLKTYAHLFDDKVMKQLKRRRYTGWGRLSRKLINGIRDKQSGKTILDFLKSDGFANRNFMQLIHDDSLTFKEDIQKAQVSGQGDSLHEHIANLAGSPAIKKGILQTVKVVDELVKVMGRHKPENIVIEMARENQTTQKGQKNSRERMKRIEEGIKELGSQILKEHPVENTQLQNEKLYLYYLQNGRDMYVDQELDINRLSDYDVDHIVPQSFLKDDSIDNKVLTRSDKARGKSDNVPSEEVVKKMKNYWRQLLNAKLITQRKFDNLTKAERGGLSELDKAGFIKRQLVETRQITKHVAQILDSRMNTKYDENDKLIREVKVITLKSKLVSDFRKDFQFYKVREINNYHHAHDAYLNAVVGTALIKKYPKLESEFVYGDYKVYDVRKMIAKSEQEIGKATAKYFFYSNIMNFFKTEITLANGEIRKRPLIETNGETGEIVWDKGRDFATVRKVLSMPQVNIVKKTEVQTGGFSKESILPKRNSDKLIARKKDWDPKKYGGFDSPTVAYSVLVVAKVEKGKSKKLKSVKELLGITIMERSSFEKNPIDFLEAKGYKEVKKDLIIKLPKYSLFELENGRKRMLASAGELQKGNELALPSKYVNFLYLASHYEKLKGSPEDNEQKQLFVEQHKHYLDEIIEQISEFSKRVILADANLDKVLSAYNKHRDKPIREQAENIIHLFTLTNLGAPAAFKYFDTTIDRKRYTSTKEVLDATLIHQSITGLYETRIDLSQLGGDGGGGGGSGGGGSGGGGSGGGGSGGGGSGGLDDEYRLYSPLVKPDQNIQFWLEQFPQAWAETAGMGLAKQVPPQVIQLKASATPVSVRQYPLSKEAQEGIRPHVQRLIQQGILVPVQSPWNTPLLPVRKPGTNDYRPVQDLREVNKRVQDIHPTVPNPYNLLCALPPQRSWYTVLDLKDAFFCLRLHPTSQPLFAFEWRDPGTGRTGQLTWTRLPQGFKNSPTIFNEALHRDLANFRIQHPQVTLLQYVDDLLLAGATKQDCLEGTKALLLELSDLGYRASAKKAQICRREVTYLGYSLRDGQRWLTEARKKTVVQIPAPTTAKQVREFLGKAGFCRLFIPGFATLAAPLYPLTKPKGEFSWAPEHQKAFDAIKKALLSAPALALPDVTKPFTLYVDERKGVARGVLTQTLGPWRRPVAYLSKKLDPVASGWPVCLKAIAAVAILVKDADKLTLGQNITVIAPHALENIVRQPPDRWMTNARMTHYQSLLLTERVTFAPPAALNPATLLPEETDEPVTHDCHQLLIEETGVRKDLTDIPLTGEVLTWFTDGSSYVVEGKRMAGAAVVDGTRTIWASSLPEGTSAQKAELMALTQALRLAEGKSINIYTDSRYAFATAHVHGAIYKQRGWLTSAGREIKNKEEILSLLEALHLPKRLAIIHCPGHQKAKDPISRGNQMADRVAKQAAQGVNLLPAGKRTADGSEFEKRTADGSEFESPKKKAKVE

SEQ ID NO: 6189 - protein, 2104 aa, synthetic construct
MPAAKRVKLDGGDKKYSIGLDIGTNSVGWAVITDEYKVPSKKFKVLGNTDRHSIKKNLIGALLFDSGETAEATRLKRTARRRYTRRKNRICYLQEIFSNEMAKVDDSFFHRLEESFLVEEDKKHERHPIFGNIVDEVAYHEKYPTIYHLRKKLVDSTDKADLRLIYLALAHMIKFRGHFLIEGDLNPDNSDVDKLFIQLVQTYNQLFEENPINASGVDAKAILSARLSKSRRLENLIAQLPGEKKNGLFGNLIALSLGLTPNFKSNFDLAEDAKLQLSKDTYDDDLDNLLAQIGDQYADLFLAAKNLSDAILLSDILRVNTEITKAPLSASMIKRYDEHHQDLTLLKALVRQQLPEKYKEIFFDQSKNGYAGYIDGGASQEEFYKFIKPILEKMDGTEELLVKLNREDLLRKQRTFDNGSIPHQIHLGELHAILRRQEDFYPFLKDNREKIEKILTFRIPYYVGPLARGNSRFAWMTRKSEETITPWNFEEVVDKGASAQSFIERMTNFDKNLPNEKVLPKHSLLYEYFTVYNELTKVKYVTEGMRKPAFLSGEQKKAIVDLLFKTNRKVTVKQLKEDYFKKIECFDSVEISGVEDRFNASLGTYHDLLKIIKDKDFLDNEENEDILEDIVLTLTLFEDREMIEERLKTYAHLFDDKVMKQLKRRRYTGWGRLSRKLINGIRDKQSGKTILDFLKSDGFANRNFMQLIHDDSLTFKEDIQKAQVSGQGDSLHEHIANLAGSPAIKKGILQTVKVVDELVKVMGRHKPENIVIEMARENQTTQKGQKNSRERMKRIEEGIKELGSQILKEHPVENTQLQNEKLYLYYLQNGRDMYVDQELDINRLSDYDVDHIVPQSFLKDDSIDNKVLTRSDKARGKSDNVPSEEVVKKMKNYWRQLLNAKLITQRKFDNLTKAERGGLSELDKAGFIKRQLVETRQITKHVAQILDSRMNTKYDENDKLIREVKVITLKSKLVSDFRKDFQFYKVREINNYHHAHDAYLNAVVGTALIKKYPKLESEFVYGDYKVYDVRKMIAKSEQEIGKATAKYFFYSNIMNFFKTEITLANGEIRKRPLIETNGETGEIVWDKGRDFATVRKVLSMPQVNIVKKTEVQTGGFSKESILPKRNSDKLIARKKDWDPKKYGGFDSPTVAYSVLVVAKVEKGKSKKLKSVKELLGITIMERSSFEKNPIDFLEAKGYKEVKKDLIIKLPKYSLFELENGRKRMLASAGELQKGNELALPSKYVNFLYLASHYEKLKGSPEDNEQKQLFVEQHKHYLDEIIEQISEFSKRVILADANLDKVLSAYNKHRDKPIREQAENIIHLFTLTNLGAPAAFKYFDTTIDRKRYTSTKEVLDATLIHQSITGLYETRIDLSQLGGDGGGGGGSGGGGSGGGGSGGGGSGGGGSGGTLQLDDEYRLYSPLVKPDQNIQFWLEQFPQAWAETAGMGLAKQVPPQVIQLKASATPVSVRQYPLSKEAQEGIRPHVQRLIQQGILVPVQSPWNTPLLPVRKPGTNDYRPVQDLREVNKRVQDIHPTVPNPYNLLCALPPQRSWYTVLDLKDAFFCLRLHPTSQPLFAFEWRDPGTGRTGQLTWTRLPQGFKNSPTIFDEALHRDLANFRIQHPQVTLLQYVDDLLLAGATKQDCLEGTKALLLELSDLGYRASAKKAQICRREVTYLGYSLRDGQRWLTEARKKTVVQIPAPTTAKQVREFLGTAGFCRLWIPGFATLAAPLYPLTKEKGEFSWAPEHQKAFDAIKKALLSAPALALPDVTKPFTLYVDERKGVARGVLTQTLGPWRRPVAYLSKKLDPVASGWPVCLKAIAAVAILVKDADKLTLGQNITVIAPHALENIVRQPPDRWMTNARMTHYQSLLLTERVTFAPPAALNPATLLPEETDEPVTHDCHQLLIEETGVRKDLTDIPLTGEVLTWFTDGSSYVVEGKRMAGAAVVDGTRTIWASSLPEGTSAQKAELMALTQALRLAEGKSINIYTDSRYAFATAHVHGAIYKQRGLLTSAGREIKNKEEILSLLEALHLPKRLAIIHCPGHQKAKDPISRGNQMADRVAKQAAQGVNLLAGKRTADGSEFEKRTADGSEFESPKKKAKVE

SEQ ID NO: 6190 - protein, 2104 aa, synthetic construct
MPAAKRVKLDGGDKKYSIGLDIGTNSVGWAVITDEYKVPSKKFKVLGNTDRHSIKKNLIGALLFDSGETAEATRLKRTARRRYTRRKNRICYLQEIFSNEMAKVDDSFFHRLEESFLVEEDKKHERHPIFGNIVDEVAYHEKYPTIYHLRKKLVDSTDKADLRLIYLALAHMIKFRGHFLIEGDLNPDNSDVDKLFIQLVQTYNQLFEENPINASGVDAKAILSARLSKSRRLENLIAQLPGEKKNGLFGNLIALSLGLTPNFKSNFDLAEDAKLQLSKDTYDDDLDNLLAQIGDQYADLFLAAKNLSDAILLSDILRVNTEITKAPLSASMIKRYDEHHQDLTLLKALVRQQLPEKYKEIFFDQSKNGYAGYIDGGASQEEFYKFIKPILEKMDGTEELLVKLNREDLLRKQRTFDNGSIPHQIHLGELHAILRRQEDFYPFLKDNREKIEKILTFRIPYYVGPLARGNSRFAWMTRKSEETITPWNFEEVVDKGASAQSFIERMTNFDKNLPNEKVLPKHSLLYEYFTVYNELTKVKYVTEGMRKPAFLSGEQKKAIVDLLFKTNRKVTVKQLKEDYFKKIECFDSVEISGVEDRFNASLGTYHDLLKIIKDKDFLDNEENEDILEDIVLTLTLFEDREMIEERLKTYAHLFDDKVMKQLKRRRYTGWGRLSRKLINGIRDKQSGKTILDFLKSDGFANRNFMQLIHDDSLTFKEDIQKAQVSGQGDSLHEHIANLAGSPAIKKGILQTVKVVDELVKVMGRHKPENIVIEMARENQTTQKGQKNSRERMKRIEEGIKELGSQILKEHPVENTQLQNEKLYLYYLQNGRDMYVDQELDINRLSDYDVDHIVPQSFLKDDSIDNKVLTRSDKARGKSDNVPSEEVVKKMKNYWRQLLNAKLITQRKFDNLTKAERGGLSELDKAGFIKRQLVETRQITKHVAQILDSRMNTKYDENDKLIREVKVITLKSKLVSDFRKDFQFYKVREINNYHHAHDAYLNAVVGTALIKKYPKLESEFVYGDYKVYDVRKMIAKSEQEIGKATAKYFFYSNIMNFFKTEITLANGEIRKRPLIETNGETGEIVWDKGRDFATVRKVLSMPQVNIVKKTEVQTGGFSKESILPKRNSDKLIARKKDWDPKKYGGFDSPTVAYSVLVVAKVEKGKSKKLKSVKELLGITIMERSSFEKNPIDFLEAKGYKEVKKDLIIKLPKYSLFELENGRKRMLASAGELQKGNELALPSKYVNFLYLASHYEKLKGSPEDNEQKQLFVEQHKHYLDEIIEQISEFSKRVILADANLDKVLSAYNKHRDKPIREQAENIIHLFTLTNLGAPAAFKYFDTTIDRKRYTSTKEVLDATLIHQSITGLYETRIDLSQLGGDGGGGGGSGGGGSGGGGSGGGGSGGGGSGGTLQLDDEYRLYSPLVKPDQNIQFWLEQFPQAWAETAGMGLAKQVPPQVIQLKASATPVSVRQYPLSKEAQEGIRPHVQRLIQQGILVPVQSPWNTPLLPVRKPGTNDYRPVQDLREVNKRVQDIHPTVPNPYNLLCALPPQRSWYTVLDLKDAFFCLRLHPTSQPLFAFEWRDPGTGRTGQLTWTRLPQGFKNSPTIFNEALHRDLANFRIQHPQVTLLQYVDDLLLAGATKQDCLEGTKALLLELSDLGYRASAKKAQICRREVTYLGYSLRDGQRWLTEARKKTVVQIPAPTTAKQVREFLGTAGFCRLWIPGFATLAAPLYPLTKPKGEFSWAPEHQKAFDAIKKALLSAPALALPDVTKPFTLYVDERKGVARGVLTQTLGPWRRPVAYLSKKLDPVASGWPVCLKAIAAVAILVKDADKLTLGQNITVIAPHALENIVRQPPDRWMTNARMTHYQSLLLTERVTFAPPAALNPATLLPEETDEPVTHDCHQLLIEETGVRKDLTDIPLTGEVLTWFTDGSSYVVEGKRMAGAAVVDGTRTIWASSLPEGTSAQKAELMALTQALRLAEGKSINIYTDSRYAFATAHVHGAIYKQRGWLTSAGREIKNKEEILSLLEALHLPKRLAIIHCPGHQKAKDPISRGNQMADRVAKQAAQGVNLLAGKRTADGSEFEKRTADGSEFESPKKKAKVE

SEQ ID NO: 6191 - protein, 2190 aa, synthetic construct
MPAAKRVKLDGGDKKYSIGLDIGTNSVGWAVITDEYKVPSKKFKVLGNTDRHSIKKNLIGALLFDSGETAEATRLKRTARRRYTRRKNRICYLQEIFSNEMAKVDDSFFHRLEESFLVEEDKKHERHPIFGNIVDEVAYHEKYPTIYHLRKKLVDSTDKADLRLIYLALAHMIKFRGHFLIEGDLNPDNSDVDKLFIQLVQTYNQLFEENPINASGVDAKAILSARLSKSRRLENLIAQLPGEKKNGLFGNLIALSLGLTPNFKSNFDLAEDAKLQLSKDTYDDDLDNLLAQIGDQYADLFLAAKNLSDAILLSDILRVNTEITKAPLSASMIKRYDEHHQDLTLLKALVRQQLPEKYKEIFFDQSKNGYAGYIDGGASQEEFYKFIKPILEKMDGTEELLVKLNREDLLRKQRTFDNGSIPHQIHLGELHAILRRQEDFYPFLKDNREKIEKILTFRIPYYVGPLARGNSRFAWMTRKSEETITPWNFEEVVDKGASAQSFIERMTNFDKNLPNEKVLPKHSLLYEYFTVYNELTKVKYVTEGMRKPAFLSGEQKKAIVDLLFKTNRKVTVKQLKEDYFKKIECFDSVEISGVEDRFNASLGTYHDLLKIIKDKDFLDNEENEDILEDIVLTLTLFEDREMIEERLKTYAHLFDDKVMKQLKRRRYTGWGRLSRKLINGIRDKQSGKTILDFLKSDGFANRNFMQLIHDDSLTFKEDIQKAQVSGQGDSLHEHIANLAGSPAIKKGILQTVKVVDELVKVMGRHKPENIVIEMARENQTTQKGQKNSRERMKRIEEGIKELGSQILKEHPVENTQLQNEKLYLYYLQNGRDMYVDQELDINRLSDYDVDHIVPQSFLKDDSIDNKVLTRSDKARGKSDNVPSEEVVKKMKNYWRQLLNAKLITQRKFDNLTKAERGGLSELDKAGFIKRQLVETRQITKHVAQILDSRMNTKYDENDKLIREVKVITLKSKLVSDFRKDFQFYKVREINNYHHAHDAYLNAVVGTALIKKYPKLESEFVYGDYKVYDVRKMIAKSEQEIGKATAKYFFYSNIMNFFKTEITLANGEIRKRPLIETNGETGEIVWDKGRDFATVRKVLSMPQVNIVKKTEVQTGGFSKESILPKRNSDKLIARKKDWDPKKYGGFDSPTVAYSVLVVAKVEKGKSKKLKSVKELLGITIMERSSFEKNPIDFLEAKGYKEVKKDLIIKLPKYSLFELENGRKRMLASAGELQKGNELALPSKYVNFLYLASHYEKLKGSPEDNEQKQLFVEQHKHYLDEIIEQISEFSKRVILADANLDKVLSAYNKHRDKPIREQAENIIHLFTLTNLGAPAAFKYFDTTIDRKRYTSTKEVLDATLIHQSITGLYETRIDLSQLGGDGGGGGGSGGGGSGGGGSGGGGSGGGGSGGMDPLQLLQPLEAEIKGTKLKAHWNSGATITCVPEAFLEDERPIQTMLIKTIHGEKQQDVYYLTFKVQGRKVEAEVLASPYDYILLNPSDVPWLMKKPLQLTVLVPLHEYQERLLQQTALPKEQKELLQKLFLKYDALWQHWENQVGHRRIKPHNIATGTLAPRPQKQYPINPKAKPSIQIVIDDLLKQGVLIQQNSTMNTPVYPVPKPDGKWRMVLDYREVNKTIPLIAAQNQHSAGILSSIYRGKYKTTLDLTNGFWAHPITPESYWLTAFTWQGKQYCWTRLPQGFLNSPALFTADVVDLLKEIPNVQAYVDDIYISHDDPQEHLEQLEKIFSILLNAGYVVSLKKSEIAQREVEFLGFNITKEGRGLTDTFKQKLLNITPPKDLKQLQSILGLLNFARNFIPNYSELVKPLYTIVANANGKFISWTEDNSNQLQHIISVLNQADNLEERNPETRLIIKVNSSPSAGYIRYYNEGSKRPIMYVNYIFSKAEAKFTQTEKLLTTMHKGLIKAMDLAMGQEILVYSPIVSMTKIQRTPLPERKALPVRWITWMTYLEDPRIQFHYDKSLPELQQIPNVTEDVIAKTKHPSEFAMVFYTDGSAIKHPDVNKSHSAGMGIAQVQFIPEYKIVHQWSIPLGDHTAQLAEIAAVEFACKKALKISGPVLIVTDSFYVAESANKELPYWKSNGFLNNKKKPLRHVSKWKSIAECLQLKPDIIIMHEKGHQQPMTTLHTEGNNLADKLATQGSYVVHAGKRTADGSEFEKRTADGSEFESPKKKAKVE

SEQ ID NO: 6192 - protein, 2101 aa, synthetic construct
MPAAKRVKLDGGDKKYSIGLDIGTNSVGWAVITDEYKVPSKKFKVLGNTDRHSIKKNLIGALLFDSGETAEATRLKRTARRRYTRRKNRICYLQEIFSNEMAKVDDSFFHRLEESFLVEEDKKHERHPIFGNIVDEVAYHEKYPTIYHLRKKLVDSTDKADLRLIYLALAHMIKFRGHFLIEGDLNPDNSDVDKLFIQLVQTYNQLFEENPINASGVDAKAILSARLSKSRRLENLIAQLPGEKKNGLFGNLIALSLGLTPNFKSNFDLAEDAKLQLSKDTYDDDLDNLLAQIGDQYADLFLAAKNLSDAILLSDILRVNTEITKAPLSASMIKRYDEHHQDLTLLKALVRQQLPEKYKEIFFDQSKNGYAGYIDGGASQEEFYKFIKPILEKMDGTEELLVKLNREDLLRKQRTFDNGSIPHQIHLGELHAILRRQEDFYPFLKDNREKIEKILTFRIPYYVGPLARGNSRFAWMTRKSEETITPWNFEEVVDKGASAQSFIERMTNFDKNLPNEKVLPKHSLLYEYFTVYNELTKVKYVTEGMRKPAFLSGEQKKAIVDLLFKTNRKVTVKQLKEDYFKKIECFDSVEISGVEDRFNASLGTYHDLLKIIKDKDFLDNEENEDILEDIVLTLTLFEDREMIEERLKTYAHLFDDKVMKQLKRRRYTGWGRLSRKLINGIRDKQSGKTILDFLKSDGFANRNFMQLIHDDSLTFKEDIQKAQVSGQGDSLHEHIANLAGSPAIKKGILQTVKVVDELVKVMGRHKPENIVIEMARENQTTQKGQKNSRERMKRIEEGIKELGSQILKEHPVENTQLQNEKLYLYYLQNGRDMYVDQELDINRLSDYDVDHIVPQSFLKDDSIDNKVLTRSDKARGKSDNVPSEEVVKKMKNYWRQLLNAKLITQRKFDNLTKAERGGLSELDKAGFIKRQLVETRQITKHVAQILDSRMNTKYDENDKLIREVKVITLKSKLVSDFRKDFQFYKVREINNYHHAHDAYLNAVVGTALIKKYPKLESEFVYGDYKVYDVRKMIAKSEQEIGKATAKYFFYSNIMNFFKTEITLANGEIRKRPLIETNGETGEIVWDKGRDFATVRKVLSMPQVNIVKKTEVQTGGFSKESILPKRNSDKLIARKKDWDPKKYGGFDSPTVAYSVLVVAKVEKGKSKKLKSVKELLGITIMERSSFEKNPIDFLEAKGYKEVKKDLIIKLPKYSLFELENGRKRMLASAGELQKGNELALPSKYVNFLYLASHYEKLKGSPEDNEQKQLFVEQHKHYLDEIIEQISEFSKRVILADANLDKVLSAYNKHRDKPIREQAENIIHLFTLTNLGAPAAFKYFDTTIDRKRYTSTKEVLDATLIHQSITGLYETRIDLSQLGGDGGGGGGSGGGGSGGGGSGGGGSGGGGSGGVPWLMKKPLQLTVLVPLHEYQERLLQQTALPKEQKELLQKLFLKYDALWQHWENQVGHRRIKPHNIATGTLAPRPQKQYPINPKAKPSIQIVIDDLLKQGVLIQQNSTMNTPVYPVPKPDGKWRMVLDYREVNKTIPLIAAQNQHSAGILSSIYRGKYKTTLDLTNGFWAHPITPESYWLTAFTWQGKQYCWTRLPQGFLNSPALFNADVVDLLKEIPNVQAYVDDIYISHDDPQEHLEQLEKIFSILLNAGYVVSLKKSEIAQREVEFLGFNITKEGRGLTDTFKQKLLNITPPKDLKQLQSILGKLNFARNFIPNYSELVKPLYTIVAPANGKFISWTEDNSNQLQHIISVLNQADNLEERNPETRLIIKVNSSPSAGYIRYYNEGSKRPIMYVNYIFSKAEAKFTQTEKLLTTMHKGLIKAMDLAMGQEILVYSPIVSMTKIQRTPLPERKALPVRWITWMTYLEDPRIQFHYDKSLPELQQIPNVTEDVIAKTKHPSEFAMVFYTDGSAIKHPDVNKSHSAGMGIAQVQFIPEYKIVHQWSIPLGDHTAQLAEIAAVEFACKKALKISGPVLIVTDSFYVAESANKELPYWKSNGFLNNKKKPLRHVSKWKSIAECLQLKPDIIIMHEKGHQQPMTTLHTEGNNLADKLATQGSYVVHAGKRTADGSEFEKRTADGSEFESPKKKAKVE

SEQ ID NO: 6193 - protein, 2190 aa, synthetic construct
MPAAKRVKLDGGDKKYSIGLDIGTNSVGWAVITDEYKVPSKKFKVLGNTDRHSIKKNLIGALLFDSGETAEATRLKRTARRRYTRRKNRICYLQEIFSNEMAKVDDSFFHRLEESFLVEEDKKHERHPIFGNIVDEVAYHEKYPTIYHLRKKLVDSTDKADLRLIYLALAHMIKFRGHFLIEGDLNPDNSDVDKLFIQLVQTYNQLFEENPINASGVDAKAILSARLSKSRRLENLIAQLPGEKKNGLFGNLIALSLGLTPNFKSNFDLAEDAKLQLSKDTYDDDLDNLLAQIGDQYADLFLAAKNLSDAILLSDILRVNTEITKAPLSASMIKRYDEHHQDLTLLKALVRQQLPEKYKEIFFDQSKNGYAGYIDGGASQEEFYKFIKPILEKMDGTEELLVKLNREDLLRKQRTFDNGSIPHQIHLGELHAILRRQEDFYPFLKDNREKIEKILTFRIPYYVGPLARGNSRFAWMTRKSEETITPWNFEEVVDKGASAQSFIERMTNFDKNLPNEKVLPKHSLLYEYFTVYNELTKVKYVTEGMRKPAFLSGEQKKAIVDLLFKTNRKVTVKQLKEDYFKKIECFDSVEISGVEDRFNASLGTYHDLLKIIKDKDFLDNEENEDILEDIVLTLTLFEDREMIEERLKTYAHLFDDKVMKQLKRRRYTGWGRLSRKLINGIRDKQSGKTILDFLKSDGFANRNFMQLIHDDSLTFKEDIQKAQVSGQGDSLHEHIANLAGSPAIKKGILQTVKVVDELVKVMGRHKPENIVIEMARENQTTQKGQKNSRERMKRIEEGIKELGSQILKEHPVENTQLQNEKLYLYYLQNGRDMYVDQELDINRLSDYDVDHIVPQSFLKDDSIDNKVLTRSDKARGKSDNVPSEEVVKKMKNYWRQLLNAKLITQRKFDNLTKAERGGLSELDKAGFIKRQLVETRQITKHVAQILDSRMNTKYDENDKLIREVKVITLKSKLVSDFRKDFQFYKVREINNYHHAHDAYLNAVVGTALIKKYPKLESEFVYGDYKVYDVRKMIAKSEQEIGKATAKYFFYSNIMNFFKTEITLANGEIRKRPLIETNGETGEIVWDKGRDFATVRKVLSMPQVNIVKKTEVQTGGFSKESILPKRNSDKLIARKKDWDPKKYGGFDSPTVAYSVLVVAKVEKGKSKKLKSVKELLGITIMERSSFEKNPIDFLEAKGYKEVKKDLIIKLPKYSLFELENGRKRMLASAGELQKGNELALPSKYVNFLYLASHYEKLKGSPEDNEQKQLFVEQHKHYLDEIIEQISEFSKRVILADANLDKVLSAYNKHRDKPIREQAENIIHLFTLTNLGAPAAFKYFDTTIDRKRYTSTKEVLDATLIHQSITGLYETRIDLSQLGGDGGGGGGSGGGGSGGGGSGGGGSGGGGSGGMDPLQLLQPLEAEIKGTKLKAHWNSGATITCVPEAFLEDERPIQTMLIKTIHGEKQQDVYYLTFKVQGRKVEAEVLASPYDYILLNPSDVPWLMKKPLQLTVLVPLHEYQERLLQQTALPKEQKELLQKLFLKYDALWQHWENQVGHRRIKPHNIATGTLAPRPQKQYPINPKAKPSIQIVIDDLLKQGVLIQQNSTMNTPVYPVPKPDGKWRMVLDYREVNKTIPLIAAQNQHSAGILSSIYRGKYKTTLDLTNGFWAHPITPESYWLTAFTWQGKQYCWTRLPQGFLNSPALFNADVVDLLKEIPNVQAYVDDIYISHDDPQEHLEQLEKIFSILLNAGYVVSLKKSEIAQREVEFLGFNITKEGRGLTDTFKQKLLNITPPKDLKQLQSILGLLNFARNFIPNYSELVKPLYTIVAPANGKFISWTEDNSNQLQHIISVLNQADNLEERNPETRLIIKVNSSPSAGYIRYYNEGSKRPIMYVNYIFSKAEAKFTQTEKLLTTMHKGLIKAMDLAMGQEILVYSPIVSMTKIQRTPLPERKALPVRWITWMTYLEDPRIQFHYDKSLPELQQIPNVTEDVIAKTKHPSEFAMVFYTDGSAIKHPDVNKSHSAGMGIAQVQFIPEYKIVHQWSIPLGDHTAQLAEIAAVEFACKKALKISGPVLIVTDSFYVAESANKELPYWKSNGFLNNKKKPLRHVSKWKSIAECLQLKPDIIIMHEKGHQQPMTTLHTEGNNLADKLATQGSYVVHAGKRTADGSEFEKRTADGSEFESPKKKAKVE

SEQ ID NO: 6194 - protein, 2190 aa, synthetic construct
MPAAKRVKLDGGDKKYSIGLDIGTNSVGWAVITDEYKVPSKKFKVLGNTDRHSIKKNLIGALLFDSGETAEATRLKRTARRRYTRRKNRICYLQEIFSNEMAKVDDSFFHRLEESFLVEEDKKHERHPIFGNIVDEVAYHEKYPTIYHLRKKLVDSTDKADLRLIYLALAHMIKFRGHFLIEGDLNPDNSDVDKLFIQLVQTYNQLFEENPINASGVDAKAILSARLSKSRRLENLIAQLPGEKKNGLFGNLIALSLGLTPNFKSNFDLAEDAKLQLSKDTYDDDLDNLLAQIGDQYADLFLAAKNLSDAILLSDILRVNTEITKAPLSASMIKRYDEHHQDLTLLKALVRQQLPEKYKEIFFDQSKNGYAGYIDGGASQEEFYKFIKPILEKMDGTEELLVKLNREDLLRKQRTFDNGSIPHQIHLGELHAILRRQEDFYPFLKDNREKIEKILTFRIPYYVGPLARGNSRFAWMTRKSEETITPWNFEEVVDKGASAQSFIERMTNFDKNLPNEKVLPKHSLLYEYFTVYNELTKVKYVTEGMRKPAFLSGEQKKAIVDLLFKTNRKVTVKQLKEDYFKKIECFDSVEISGVEDRFNASLGTYHDLLKIIKDKDFLDNEENEDILEDIVLTLTLFEDREMIEERLKTYAHLFDDKVMKQLKRRRYTGWGRLSRKLINGIRDKQSGKTILDFLKSDGFANRNFMQLIHDDSLTFKEDIQKAQVSGQGDSLHEHIANLAGSPAIKKGILQTVKVVDELVKVMGRHKPENIVIEMARENQTTQKGQKNSRERMKRIEEGIKELGSQILKEHPVENTQLQNEKLYLYYLQNGRDMYVDQELDINRLSDYDVDHIVPQSFLKDDSIDNKVLTRSDKARGKSDNVPSEEVVKKMKNYWRQLLNAKLITQRKFDNLTKAERGGLSELDKAGFIKRQLVETRQITKHVAQILDSRMNTKYDENDKLIREVKVITLKSKLVSDFRKDFQFYKVREINNYHHAHDAYLNAVVGTALIKKYPKLESEFVYGDYKVYDVRKMIAKSEQEIGKATAKYFFYSNIMNFFKTEITLANGEIRKRPLIETNGETGEIVWDKGRDFATVRKVLSMPQVNIVKKTEVQTGGFSKESILPKRNSDKLIARKKDWDPKKYGGFDSPTVAYSVLVVAKVEKGKSKKLKSVKELLGITIMERSSFEKNPIDFLEAKGYKEVKKDLIIKLPKYSLFELENGRKRMLASAGELQKGNELALPSKYVNFLYLASHYEKLKGSPEDNEQKQLFVEQHKHYLDEIIEQISEFSKRVILADANLDKVLSAYNKHRDKPIREQAENIIHLFTLTNLGAPAAFKYFDTTIDRKRYTSTKEVLDATLIHQSITGLYETRIDLSQLGGDGGGGGGSGGGGSGGGGSGGGGSGGGGSGGMDPLQLLQPLEAEIKGTKLKAHWNSGATITCVPEAFLEDERPIQTMLIKTIHGEKQQDVYYLTFKVQGRKVEAEVLASPYDYILLNPSDVPWLMKKPLQLTVLVPLHEYQERLLQQTALPKEQKELLQKLFLKYDALWQHWENQVGHRRIKPHNIATGTLAPRPQKQYPINPKAKPSIQIVIDDLLKQGVLIQQNSTMNTPVYPVPKPDGKWRMVLDYREVNKTIPLIAAQNQHSAGILSSIYRGKYKTTLDLTNGFWAHPITPESYWLTAFTWQGKQYCWTRLPQGFLNSPALFNADVVDLLKEIPNVQAYVDDIYISHDDPQEHLEQLEKIFSILLNAGYVVSLKKSEIAQREVEFLGFNITKEGRGLTDTFKQKLLNITPPKDLKQLQSILGKLNFARNFIPNYSELVKPLYTIVAPANGKFISWTEDNSNQLQHIISVLNQADNLEERNPETRLIIKVNSSPSAGYIRYYNEGSKRPIMYVNYIFSKAEAKFTQTEKLLTTMHKGLIKAMDLAMGQEILVYSPIVSMTKIQRTPLPERKALPVRWITWMTYLEDPRIQFHYDKSLPELQQIPNVTEDVIAKTKHPSEFAMVFYTDGSAIKHPDVNKSHSAGMGIAQVQFIPEYKIVHQWSIPLGDHTAQLAEIAAVEFACKKALKISGPVLIVTDSFYVAESANKELPYWKSNGFLNNKKKPLRHVSKWKSIAECLQLKPDIIIMHEKGHQQPMTTLHTEGNNLADKLATQGSYVVHAGKRTADGSEFEKRTADGSEFESPKKKAKVE

SEQ ID NO: 6195 - protein, 2101 aa, synthetic construct
MPAAKRVKLDGGDKKYSIGLDIGTNSVGWAVITDEYKVPSKKFKVLGNTDRHSIKKNLIGALLFDSGETAEATRLKRTARRRYTRRKNRICYLQEIFSNEMAKVDDSFFHRLEESFLVEEDKKHERHPIFGNIVDEVAYHEKYPTIYHLRKKLVDSTDKADLRLIYLALAHMIKFRGHFLIEGDLNPDNSDVDKLFIQLVQTYNQLFEENPINASGVDAKAILSARLSKSRRLENLIAQLPGEKKNGLFGNLIALSLGLTPNFKSNFDLAEDAKLQLSKDTYDDDLDNLLAQIGDQYADLFLAAKNLSDAILLSDILRVNTEITKAPLSASMIKRYDEHHQDLTLLKALVRQQLPEKYKEIFFDQSKNGYAGYIDGGASQEEFYKFIKPILEKMDGTEELLVKLNREDLLRKQRTFDNGSIPHQIHLGELHAILRRQEDFYPFLKDNREKIEKILTFRIPYYVGPLARGNSRFAWMTRKSEETITPWNFEEVVDKGASAQSFIERMTNFDKNLPNEKVLPKHSLLYEYFTVYNELTKVKYVTEGMRKPAFLSGEQKKAIVDLLFKTNRKVTVKQLKEDYFKKIECFDSVEISGVEDRFNASLGTYHDLLKIIKDKDFLDNEENEDILEDIVLTLTLFEDREMIEERLKTYAHLFDDKVMKQLKRRRYTGWGRLSRKLINGIRDKQSGKTILDFLKSDGFANRNFMQLIHDDSLTFKEDIQKAQVSGQGDSLHEHIANLAGSPAIKKGILQTVKVVDELVKVMGRHKPENIVIEMARENQTTQKGQKNSRERMKRIEEGIKELGSQILKEHPVENTQLQNEKLYLYYLQNGRDMYVDQELDINRLSDYDVDHIVPQSFLKDDSIDNKVLTRSDKARGKSDNVPSEEVVKKMKNYWRQLLNAKLITQRKFDNLTKAERGGLSELDKAGFIKRQLVETRQITKHVAQILDSRMNTKYDENDKLIREVKVITLKSKLVSDFRKDFQFYKVREINNYHHAHDAYLNAVVGTALIKKYPKLESEFVYGDYKVYDVRKMIAKSEQEIGKATAKYFFYSNIMNFFKTEITLANGEIRKRPLIETNGETGEIVWDKGRDFATVRKVLSMPQVNIVKKTEVQTGGFSKESILPKRNSDKLIARKKDWDPKKYGGFDSPTVAYSVLVVAKVEKGKSKKLKSVKELLGITIMERSSFEKNPIDFLEAKGYKEVKKDLIIKLPKYSLFELENGRKRMLASAGELQKGNELALPSKYVNFLYLASHYEKLKGSPEDNEQKQLFVEQHKHYLDEIIEQISEFSKRVILADANLDKVLSAYNKHRDKPIREQAENIIHLFTLTNLGAPAAFKYFDTTIDRKRYTSTKEVLDATLIHQSITGLYETRIDLSQLGGDGGGGGGSGGGGSGGGGSGGGGSGGGGSGGIPWLMKKPLQLTTLVPLQEYEERLLKQTMLTGSYKEKLQSLFLKYDALWQHWENQVGHRRIKPHHIATGTVNPRPQKQYPINPKAKASIQTVINDLLKQGVLIQQNSIMNTPVYPVPKPDGKWRMVLDYREVNKTIPLIAAQNQHSAGILSSIFRGKYKTTLDLSNGFWAHSITPESYWLTAFTWLGQQYCWTRLPQGFLNSPALFNADVVDLLKEVPNVQVYVDDIYISHDDPREHLEQLEKVFSLLLNAGYVVSLKKSEIAQHEVEFLGFNITKEGRGLTETFKQKLLNITPPRDLKQLQSILGKLNFARNFIPNFSELVKPLYNIIATAPGKYITWTTDNSQQLQNIISMLNSAENLEERNPEVRLIMKVNTSPSAGYIRFYNEFAKRPIMYLNYVYTKAEVKFTNTEKLLTTIHKGLIKALDLGMGQEILVYSPIVSMTKIQKTPLPERKALPIRWITWMSYLEDPRIQFHYDKTLPELQQVPTVTDDIIAKIKHPSEFSMVFYTDGSAIKHPNVNKSHNAGMGIAQVQFKPEFTVINTWSIPLGDHTAQLAEVAAVEFACKKALKIDGPVLIVTDSFYVAESVNKELPYWQSNGFFNNKKKPLKHVSKWKSIADCIQLKPDIIIIHEKGHQPTASTFHTEGNNLADKLATQGSYVVNAGKRTADGSEFEKRTADGSEFESPKKKAKVE

SEQ ID NO: 6196 - protein, 2190 aa, synthetic construct
MPAAKRVKLDGGDKKYSIGLDIGTNSVGWAVITDEYKVPSKKFKVLGNTDRHSIKKNLIGALLFDSGETAEATRLKRTARRRYTRRKNRICYLQEIFSNEMAKVDDSFFHRLEESFLVEEDKKHERHPIFGNIVDEVAYHEKYPTIYHLRKKLVDSTDKADLRLIYLALAHMIKFRGHFLIEGDLNPDNSDVDKLFIQLVQTYNQLFEENPINASGVDAKAILSARLSKSRRLENLIAQLPGEKKNGLFGNLIALSLGLTPNFKSNFDLAEDAKLQLSKDTYDDDLDNLLAQIGDQYADLFLAAKNLSDAILLSDILRVNTEITKAPLSASMIKRYDEHHQDLTLLKALVRQQLPEKYKEIFFDQSKNGYAGYIDGGASQEEFYKFIKPILEKMDGTEELLVKLNREDLLRKQRTFDNGSIPHQIHLGELHAILRRQEDFYPFLKDNREKIEKILTFRIPYYVGPLARGNSRFAWMTRKSEETITPWNFEEVVDKGASAQSFIERMTNFDKNLPNEKVLPKHSLLYEYFTVYNELTKVKYVTEGMRKPAFLSGEQKKAIVDLLFKTNRKVTVKQLKEDYFKKIECFDSVEISGVEDRFNASLGTYHDLLKIIKDKDFLDNEENEDILEDIVLTLTLFEDREMIEERLKTYAHLFDDKVMKQLKRRRYTGWGRLSRKLINGIRDKQSGKTILDFLKSDGFANRNFMQLIHDDSLTFKEDIQKAQVSGQGDSLHEHIANLAGSPAIKKGILQTVKVVDELVKVMGRHKPENIVIEMARENQTTQKGQKNSRERMKRIEEGIKELGSQILKEHPVENTQLQNEKLYLYYLQNGRDMYVDQELDINRLSDYDVDHIVPQSFLKDDSIDNKVLTRSDKARGKSDNVPSEEVVKKMKNYWRQLLNAKLITQRKFDNLTKAERGGLSELDKAGFIKRQLVETRQITKHVAQILDSRMNTKYDENDKLIREVKVITLKSKLVSDFRKDFQFYKVREINNYHHAHDAYLNAVVGTALIKKYPKLESEFVYGDYKVYDVRKMIAKSEQEIGKATAKYFFYSNIMNFFKTEITLANGEIRKRPLIETNGETGEIVWDKGRDFATVRKVLSMPQVNIVKKTEVQTGGFSKESILPKRNSDKLIARKKDWDPKKYGGFDSPTVAYSVLVVAKVEKGKSKKLKSVKELLGITIMERSSFEKNPIDFLEAKGYKEVKKDLIIKLPKYSLFELENGRKRMLASAGELQKGNELALPSKYVNFLYLASHYEKLKGSPEDNEQKQLFVEQHKHYLDEIIEQISEFSKRVILADANLDKVLSAYNKHRDKPIREQAENIIHLFTLTNLGAPAAFKYFDTTIDRKRYTSTKEVLDATLIHQSITGLYETRIDLSQLGGDGGGGGGSGGGGSGGGGSGGGGSGGGGSGGMDPLQLLQPLEAEIKGTKLKAHWNSGATITCVPQAFLEEEVPIKNIWIKTIHGEKEQPVYYLTFKIQGRKVEAEVISSPYDYILVSPSDIPWLMKKPLQLTTLVPLQEYEERLLKQTMLTGSYKEKLQSLFLKYDALWQHWENQVGHRRIKPHHIATGTVNPRPQKQYPINPKAKASIQTVINDLLKQGVLIQQNSIMNTPVYPVPKPDGKWRMVLDYREVNKTIPLIAAQNQHSAGILSSIFRGKYKTTLDLSNGFWAHSITPESYWLTAFTWLGQQYCWTRLPQGFLNSPALFNADVVDLLKEVPNVQVYVDDIYISHDDPREHLEQLEKVFSLLLNAGYVVSLKKSEIAQHEVEFLGFNITKEGRGLTETFKQKLLNITPPRDLKQLQSILGLLNFARNFIPNFSELVKPLYNIIATAPGKYITWTTDNSQQLQNIISMLNSAENLEERNPEVRLIMKVNTSPSAGYIRFYNEFAKRPIMYLNYVYTKAEVKFTNTEKLLTTIHKGLIKALDLGMGQEILVYSPIVSMTKIQKTPLPERKALPIRWITWMSYLEDPRIQFHYDKTLPELQQVPTVTDDIIAKIKHPSEFSMVFYTDGSAIKHPNVNKSHNAGMGIAQVQFKPEFTVINTWSIPLGDHTAQLAEVAAVEFACKKALKIDGPVLIVTDSFYVAESVNKELPYWQSNGFFNNKKKPLKHVSKWKSIADCIQLKPDIIIIHEKGHQPTASTFHTEGNNLADKLATQGSYVVNAGKRTADGSEFEKRTADGSEFESPKKKAKVE

SEQ ID NO: 6197 - protein, 2190 aa, synthetic construct
MPAAKRVKLDGGDKKYSIGLDIGTNSVGWAVITDEYKVPSKKFKVLGNTDRHSIKKNLIGALLFDSGETAEATRLKRTARRRYTRRKNRICYLQEIFSNEMAKVDDSFFHRLEESFLVEEDKKHERHPIFGNIVDEVAYHEKYPTIYHLRKKLVDSTDKADLRLIYLALAHMIKFRGHFLIEGDLNPDNSDVDKLFIQLVQTYNQLFEENPINASGVDAKAILSARLSKSRRLENLIAQLPGEKKNGLFGNLIALSLGLTPNFKSNFDLAEDAKLQLSKDTYDDDLDNLLAQIGDQYADLFLAAKNLSDAILLSDILRVNTEITKAPLSASMIKRYDEHHQDLTLLKALVRQQLPEKYKEIFFDQSKNGYAGYIDGGASQEEFYKFIKPILEKMDGTEELLVKLNREDLLRKQRTFDNGSIPHQIHLGELHAILRRQEDFYPFLKDNREKIEKILTFRIPYYVGPLARGNSRFAWMTRKSEETITPWNFEEVVDKGASAQSFIERMTNFDKNLPNEKVLPKHSLLYEYFTVYNELTKVKYVTEGMRKPAFLSGEQKKAIVDLLFKTNRKVTVKQLKEDYFKKIECFDSVEISGVEDRFNASLGTYHDLLKIIKDKDFLDNEENEDILEDIVLTLTLFEDREMIEERLKTYAHLFDDKVMKQLKRRRYTGWGRLSRKLINGIRDKQSGKTILDFLKSDGFANRNFMQLIHDDSLTFKEDIQKAQVSGQGDSLHEHIANLAGSPAIKKGILQTVKVVDELVKVMGRHKPENIVIEMARENQTTQKGQKNSRERMKRIEEGIKELGSQILKEHPVENTQLQNEKLYLYYLQNGRDMYVDQELDINRLSDYDVDHIVPQSFLKDDSIDNKVLTRSDKARGKSDNVPSEEVVKKMKNYWRQLLNAKLITQRKFDNLTKAERGGLSELDKAGFIKRQLVETRQITKHVAQILDSRMNTKYDENDKLIREVKVITLKSKLVSDFRKDFQFYKVREINNYHHAHDAYLNAVVGTALIKKYPKLESEFVYGDYKVYDVRKMIAKSEQEIGKATAKYFFYSNIMNFFKTEITLANGEIRKRPLIETNGETGEIVWDKGRDFATVRKVLSMPQVNIVKKTEVQTGGFSKESILPKRNSDKLIARKKDWDPKKYGGFDSPTVAYSVLVVAKVEKGKSKKLKSVKELLGITIMERSSFEKNPIDFLEAKGYKEVKKDLIIKLPKYSLFELENGRKRMLASAGELQKGNELALPSKYVNFLYLASHYEKLKGSPEDNEQKQLFVEQHKHYLDEIIEQISEFSKRVILADANLDKVLSAYNKHRDKPIREQAENIIHLFTLTNLGAPAAFKYFDTTIDRKRYTSTKEVLDATLIHQSITGLYETRIDLSQLGGDGGGGGGSGGGGSGGGGSGGGGSGGGGSGGMDPLQLLQPLEAEIKGTKLKAHWNSGATITCVPQAFLEEEVPIKNIWIKTIHGEKEQPVYYLTFKIQGRKVEAEVISSPYDYILVSPSDIPWLMKKPLQLTTLVPLQEYEERLLKQTMLTGSYKEKLQSLFLKYDALWQHWENQVGHRRIKPHHIATGTVNPRPQKQYPINPKAKASIQTVINDLLKQGVLIQQNSIMNTPVYPVPKPDGKWRMVLDYREVNKTIPLIAAQNQHSAGILSSIFRGKYKTTLDLSNGFWAHSITPESYWLTAFTWLGQQYCWTRLPQGFLNSPALFNADVVDLLKEVPNVQVYVDDIYISHDDPREHLEQLEKVFSLLLNAGYVVSLKKSEIAQHEVEFLGFNITKEGRGLTETFKQKLLNITPPRDLKQLQSILGKLNFARNFIPNFSELVKPLYNIIATAPGKYITWTTDNSQQLQNIISMLNSAENLEERNPEVRLIMKVNTSPSAGYIRFYNEFAKRPIMYLNYVYTKAEVKFTNTEKLLTTIHKGLIKALDLGMGQEILVYSPIVSMTKIQKTPLPERKALPIRWITWMSYLEDPRIQFHYDKTLPELQQVPTVTDDIIAKIKHPSEFSMVFYTDGSAIKHPNVNKSHNAGMGIAQVQFKPEFTVINTWSIPLGDHTAQLAEVAAVEFACKKALKIDGPVLIVTDSFYVAESVNKELPYWQSNGFFNNKKKPLKHVSKWKSIADCIQLKPDIIIIHEKGHQPTASTFHTEGNNLADKLATQGSYVVNAGKRTADGSEFEKRTADGSEFESPKKKAKVE

SEQ ID NO: 6198 - protein, 2108 aa, synthetic construct
MPAAKRVKLDGGDKKYSIGLDIGTNSVGWAVITDEYKVPSKKFKVLGNTDRHSIKKNLIGALLFDSGETAEATRLKRTARRRYTRRKNRICYLQEIFSNEMAKVDDSFFHRLEESFLVEEDKKHERHPIFGNIVDEVAYHEKYPTIYHLRKKLVDSTDKADLRLIYLALAHMIKFRGHFLIEGDLNPDNSDVDKLFIQLVQTYNQLFEENPINASGVDAKAILSARLSKSRRLENLIAQLPGEKKNGLFGNLIALSLGLTPNFKSNFDLAEDAKLQLSKDTYDDDLDNLLAQIGDQYADLFLAAKNLSDAILLSDILRVNTEITKAPLSASMIKRYDEHHQDLTLLKALVRQQLPEKYKEIFFDQSKNGYAGYIDGGASQEEFYKFIKPILEKMDGTEELLVKLNREDLLRKQRTFDNGSIPHQIHLGELHAILRRQEDFYPFLKDNREKIEKILTFRIPYYVGPLARGNSRFAWMTRKSEETITPWNFEEVVDKGASAQSFIERMTNFDKNLPNEKVLPKHSLLYEYFTVYNELTKVKYVTEGMRKPAFLSGEQKKAIVDLLFKTNRKVTVKQLKEDYFKKIECFDSVEISGVEDRFNASLGTYHDLLKIIKDKDFLDNEENEDILEDIVLTLTLFEDREMIEERLKTYAHLFDDKVMKQLKRRRYTGWGRLSRKLINGIRDKQSGKTILDFLKSDGFANRNFMQLIHDDSLTFKEDIQKAQVSGQGDSLHEHIANLAGSPAIKKGILQTVKVVDELVKVMGRHKPENIVIEMARENQTTQKGQKNSRERMKRIEEGIKELGSQILKEHPVENTQLQNEKLYLYYLQNGRDMYVDQELDINRLSDYDVDHIVPQSFLKDDSIDNKVLTRSDKARGKSDNVPSEEVVKKMKNYWRQLLNAKLITQRKFDNLTKAERGGLSELDKAGFIKRQLVETRQITKHVAQILDSRMNTKYDENDKLIREVKVITLKSKLVSDFRKDFQFYKVREINNYHHAHDAYLNAVVGTALIKKYPKLESEFVYGDYKVYDVRKMIAKSEQEIGKATAKYFFYSNIMNFFKTEITLANGEIRKRPLIETNGETGEIVWDKGRDFATVRKVLSMPQVNIVKKTEVQTGGFSKESILPKRNSDKLIARKKDWDPKKYGGFDSPTVAYSVLVVAKVEKGKSKKLKSVKELLGITIMERSSFEKNPIDFLEAKGYKEVKKDLIIKLPKYSLFELENGRKRMLASAGELQKGNELALPSKYVNFLYLASHYEKLKGSPEDNEQKQLFVEQHKHYLDEIIEQISEFSKRVILADANLDKVLSAYNKHRDKPIREQAENIIHLFTLTNLGAPAAFKYFDTTIDRKRYTSTKEVLDATLIHQSITGLYETRIDLSQLGGDGGGGGGSGGGGSGGGGSGGGGSGGGGSGGVLNLEEEYRLHEKPVPSSIDPSWLQLFPTVWAERAGMGLANQVPPVVVELRSGASPVAVRQYPMSKEAREGIRPHIQRFLDLGVLVPCQSPWNTPLLPVKKPGTNDYRPVQDLREINKRVQDIHPTVPNPYNLLSSLPPSHTWYSVLDLKDAFFCLKLHPNSQPLFAFEWRDPEKGNTGQLTWTRLPQGFKNSPTLFNEALHRDLAPFRALNPQVVLLQYVDDLLVAAPTYRDCKEGTQKLLQELSKLGYRVSAKKAQLCQKEVTYLGYLLKEGKRWLTPARKATVMKIPPPTTPRQVREFLGTAGFCRLWIPGFASLAAPLYPLTKPSIPFIWTEEHQKAFDRIKEALLSAPALALPDLTKPFTLYVDERAGVARGVLTQTLGPWRRPVAYLSKKLDPVASGWPTCLKAVAAVALLLKDADKLTLGQNVTVIASHSLESIVRQPPDRWMTNARMTHYQSLLLNERVSFAPPAVLNPATLLPVESEATPVHRCSEILAEETGTRRDLKDQPLPGVPAWYTDGSSFIAEGKRRAGAAIVDGKRTVWASSLPEGTSAQKAELVALTQALRLAEGKDINIYTDSRYAFATAHIHGAIYKQRGWLTSAGKDIKNKEEILALLEAIHLPKRVAIIHCPGHQKGNDPVATGNRRADEAAKQAALSTRVLAETTKPAGKRTADGSEFEKRTADGSEFESPKKKAKVE

SEQ ID NO: 6199 - protein, 2110 aa, synthetic construct
MPAAKRVKLDGGDKKYSIGLDIGTNSVGWAVITDEYKVPSKKFKVLGNTDRHSIKKNLIGALLFDSGETAEATRLKRTARRRYTRRKNRICYLQEIFSNEMAKVDDSFFHRLEESFLVEEDKKHERHPIFGNIVDEVAYHEKYPTIYHLRKKLVDSTDKADLRLIYLALAHMIKFRGHFLIEGDLNPDNSDVDKLFIQLVQTYNQLFEENPINASGVDAKAILSARLSKSRRLENLIAQLPGEKKNGLFGNLIALSLGLTPNFKSNFDLAEDAKLQLSKDTYDDDLDNLLAQIGDQYADLFLAAKNLSDAILLSDILRVNTEITKAPLSASMIKRYDEHHQDLTLLKALVRQQLPEKYKEIFFDQSKNGYAGYIDGGASQEEFYKFIKPILEKMDGTEELLVKLNREDLLRKQRTFDNGSIPHQIHLGELHAILRRQEDFYPFLKDNREKIEKILTFRIPYYVGPLARGNSRFAWMTRKSEETITPWNFEEVVDKGASAQSFIERMTNFDKNLPNEKVLPKHSLLYEYFTVYNELTKVKYVTEGMRKPAFLSGEQKKAIVDLLFKTNRKVTVKQLKEDYFKKIECFDSVEISGVEDRFNASLGTYHDLLKIIKDKDFLDNEENEDILEDIVLTLTLFEDREMIEERLKTYAHLFDDKVMKQLKRRRYTGWGRLSRKLINGIRDKQSGKTILDFLKSDGFANRNFMQLIHDDSLTFKEDIQKAQVSGQGDSLHEHIANLAGSPAIKKGILQTVKVVDELVKVMGRHKPENIVIEMARENQTTQKGQKNSRERMKRIEEGIKELGSQILKEHPVENTQLQNEKLYLYYLQNGRDMYVDQELDINRLSDYDVDHIVPQSFLKDDSIDNKVLTRSDKARGKSDNVPSEEVVKKMKNYWRQLLNAKLITQRKFDNLTKAERGGLSELDKAGFIKRQLVETRQITKHVAQILDSRMNTKYDENDKLIREVKVITLKSKLVSDFRKDFQFYKVREINNYHHAHDAYLNAVVGTALIKKYPKLESEFVYGDYKVYDVRKMIAKSEQEIGKATAKYFFYSNIMNFFKTEITLANGEIRKRPLIETNGETGEIVWDKGRDFATVRKVLSMPQVNIVKKTEVQTGGFSKESILPKRNSDKLIARKKDWDPKKYGGFDSPTVAYSVLVVAKVEKGKSKKLKSVKELLGITIMERSSFEKNPIDFLEAKGYKEVKKDLIIKLPKYSLFELENGRKRMLASAGELQKGNELALPSKYVNFLYLASHYEKLKGSPEDNEQKQLFVEQHKHYLDEIIEQISEFSKRVILADANLDKVLSAYNKHRDKPIREQAENIIHLFTLTNLGAPAAFKYFDTTIDRKRYTSTKEVLDATLIHQSITGLYETRIDLSQLGGDGGGGGGSGGGGSGGGGSGGGGSGGGGSGGTLNIEDEYRLHETSKEPDVPLGSTWLSDFPQAWAETGGMGLAVRQAPLIIPLKATSTPVSIKQYPMSQEARLGIKPHIQRLLDQGILVPCQSPWNTPLLPVKKPGTNDYRPVQDLREVNKRVEDIHPTVPNPYNLLSGLPPSHQWYTVLDLKDAFFCLRLHPTSQPLFAFEWRDPEMGISGQLTWTRLPQGFKNSPTLFNEALHRDLADFRIQHPDLILLQYVDDLLLAATSEQDCQRGTRALLQTLGNLGYRASAKKAQICQKQVKYLGYLLKEGQRWLTEARKETVMGQPTPKTPRQLREFLGTAGFCRLWIPGFAEMAAPLYPLTKPGTLFNWGPDQQKAYQEIKQALLTAPALGLPDLTKPFELFVDEKQGYAKGVLTQKLGPWRRPVAYLSKKLDPVAAGWPPCLRMVAAIAVLTKDAGKLTMGQPLVILAPHAVEALVKQPPDRWLSNARMTHYQAMLLDTDRVQFGPVVALNPATLLPLPEKEAPHDCLEILAETHGTRPDLTDQPIPDADYTWYTDGSSFLQEGQRRAGAAVTTETEVIWARALPAGTSAQRAELIALTQALKMAEGKKLNVYTDSRYAFATAHVHGEIYRRRGWLTSEGREIKNKNEILALLKALFLPKRLSIIHCPGHQKGNSAEARGNRMADQAAREAAMKAVLETSTLLAGKRTADGSEFEKRTADGSEFESPKKKAKVE

SEQ ID NO: 6200 - protein, 2117 aa, synthetic construct
MPAAKRVKLDGGDKKYSIGLDIGTNSVGWAVITDEYKVPSKKFKVLGNTDRHSIKKNLIGALLFDSGETAEATRLKRTARRRYTRRKNRICYLQEIFSNEMAKVDDSFFHRLEESFLVEEDKKHERHPIFGNIVDEVAYHEKYPTIYHLRKKLVDSTDKADLRLIYLALAHMIKFRGHFLIEGDLNPDNSDVDKLFIQLVQTYNQLFEENPINASGVDAKAILSARLSKSRRLENLIAQLPGEKKNGLFGNLIALSLGLTPNFKSNFDLAEDAKLQLSKDTYDDDLDNLLAQIGDQYADLFLAAKNLSDAILLSDILRVNTEITKAPLSASMIKRYDEHHQDLTLLKALVRQQLPEKYKEIFFDQSKNGYAGYIDGGASQEEFYKFIKPILEKMDGTEELLVKLNREDLLRKQRTFDNGSIPHQIHLGELHAILRRQEDFYPFLKDNREKIEKILTFRIPYYVGPLARGNSRFAWMTRKSEETITPWNFEEVVDKGASAQSFIERMTNFDKNLPNEKVLPKHSLLYEYFTVYNELTKVKYVTEGMRKPAFLSGEQKKAIVDLLFKTNRKVTVKQLKEDYFKKIECFDSVEISGVEDRFNASLGTYHDLLKIIKDKDFLDNEENEDILEDIVLTLTLFEDREMIEERLKTYAHLFDDKVMKQLKRRRYTGWGRLSRKLINGIRDKQSGKTILDFLKSDGFANRNFMQLIHDDSLTFKEDIQKAQVSGQGDSLHEHIANLAGSPAIKKGILQTVKVVDELVKVMGRHKPENIVIEMARENQTTQKGQKNSRERMKRIEEGIKELGSQILKEHPVENTQLQNEKLYLYYLQNGRDMYVDQELDINRLSDYDVDHIVPQSFLKDDSIDNKVLTRSDKARGKSDNVPSEEVVKKMKNYWRQLLNAKLITQRKFDNLTKAERGGLSELDKAGFIKRQLVETRQITKHVAQILDSRMNTKYDENDKLIREVKVITLKSKLVSDFRKDFQFYKVREINNYHHAHDAYLNAVVGTALIKKYPKLESEFVYGDYKVYDVRKMIAKSEQEIGKATAKYFFYSNIMNFFKTEITLANGEIRKRPLIETNGETGEIVWDKGRDFATVRKVLSMPQVNIVKKTEVQTGGFSKESILPKRNSDKLIARKKDWDPKKYGGFDSPTVAYSVLVVAKVEKGKSKKLKSVKELLGITIMERSSFEKNPIDFLEAKGYKEVKKDLIIKLPKYSLFELENGRKRMLASAGELQKGNELALPSKYVNFLYLASHYEKLKGSPEDNEQKQLFVEQHKHYLDEIIEQISEFSKRVILADANLDKVLSAYNKHRDKPIREQAENIIHLFTLTNLGAPAAFKYFDTTIDRKRYTSTKEVLDATLIHQSITGLYETRIDLSQLGGDGGGGGGSGGGGSGGGGSGGGGSGGGGSGGGGSGGTAPLEEEYRLFLEAPIQNVTLLEQWKREIPKVWAEINPPGLASTQAPIHVQLLSTALPVRVRQYPITLEAKRSLRETIRKFRAAGILRPVHSPWNTPLLPVRKSGTSEYRMVQDLREVNKRVETIHPTVPNPYTLLSLLPPDRIWYSVLDLKDAFFCIPLAPESQLIFAFEWADAEEGESGQLTWTRLPQGFKNSPTLFDEALNRDLQGFRLDHPSVSLLQYVDDLLIAADTQAACLSATRDLLMTLAELGYRVSGKKAQLCQEEVTYLGFKIHKGSRSLSNSRTQAILQIPVPKTKRQVREFLGTIGYCRLWIPGFAELAQPLYAATRGGNDPLVWGEKEEEAFQSLKLALTQPPALALPSLDKPFQLFVEETSGAAKGVLTQALGPWKRPVAYLSKRLDPVAAGWPRCLRAIAAAALLTREASKLTFGQDIEITSSHNLESLLRSPPDKWLTNARITQYQVLLLDPPRVRFKQTAALNPATLLPETDDTLPIHHCLDTLDSLTSTRPDLTDQPLAQAEATLFTDGSSYIRDGKRYAGAAVVTLDSVIWAEPLPIGTSAQKAELIALTKALEWSKDKSVNIYTDSRYAFATLHVHGMIYRERGLLTAGGKAIKNAPEILALLTAVWLPKRVAVMHCKGHQKDDAPTSTGNRRADEVAREVAIRPLSTQATISAGKRTADGSEFEKRTADGSEFESPKKKAKVE

SEQ ID NO: 6201 - protein, 2117 aa, synthetic construct
MPAAKRVKLDGGDKKYSIGLDIGTNSVGWAVITDEYKVPSKKFKVLGNTDRHSIKKNLIGALLFDSGETAEATRLKRTARRRYTRRKNRICYLQEIFSNEMAKVDDSFFHRLEESFLVEEDKKHERHPIFGNIVDEVAYHEKYPTIYHLRKKLVDSTDKADLRLIYLALAHMIKFRGHFLIEGDLNPDNSDVDKLFIQLVQTYNQLFEENPINASGVDAKAILSARLSKSRRLENLIAQLPGEKKNGLFGNLIALSLGLTPNFKSNFDLAEDAKLQLSKDTYDDDLDNLLAQIGDQYADLFLAAKNLSDAILLSDILRVNTEITKAPLSASMIKRYDEHHQDLTLLKALVRQQLPEKYKEIFFDQSKNGYAGYIDGGASQEEFYKFIKPILEKMDGTEELLVKLNREDLLRKQRTFDNGSIPHQIHLGELHAILRRQEDFYPFLKDNREKIEKILTFRIPYYVGPLARGNSRFAWMTRKSEETITPWNFEEVVDKGASAQSFIERMTNFDKNLPNEKVLPKHSLLYEYFTVYNELTKVKYVTEGMRKPAFLSGEQKKAIVDLLFKTNRKVTVKQLKEDYFKKIECFDSVEISGVEDRFNASLGTYHDLLKIIKDKDFLDNEENEDILEDIVLTLTLFEDREMIEERLKTYAHLFDDKVMKQLKRRRYTGWGRLSRKLINGIRDKQSGKTILDFLKSDGFANRNFMQLIHDDSLTFKEDIQKAQVSGQGDSLHEHIANLAGSPAIKKGILQTVKVVDELVKVMGRHKPENIVIEMARENQTTQKGQKNSRERMKRIEEGIKELGSQILKEHPVENTQLQNEKLYLYYLQNGRDMYVDQELDINRLSDYDVDHIVPQSFLKDDSIDNKVLTRSDKARGKSDNVPSEEVVKKMKNYWRQLLNAKLITQRKFDNLTKAERGGLSELDKAGFIKRQLVETRQITKHVAQILDSRMNTKYDENDKLIREVKVITLKSKLVSDFRKDFQFYKVREINNYHHAHDAYLNAVVGTALIKKYPKLESEFVYGDYKVYDVRKMIAKSEQEIGKATAKYFFYSNIMNFFKTEITLANGEIRKRPLIETNGETGEIVWDKGRDFATVRKVLSMPQVNIVKKTEVQTGGFSKESILPKRNSDKLIARKKDWDPKKYGGFDSPTVAYSVLVVAKVEKGKSKKLKSVKELLGITIMERSSFEKNPIDFLEAKGYKEVKKDLIIKLPKYSLFELENGRKRMLASAGELQKGNELALPSKYVNFLYLASHYEKLKGSPEDNEQKQLFVEQHKHYLDEIIEQISEFSKRVILADANLDKVLSAYNKHRDKPIREQAENIIHLFTLTNLGAPAAFKYFDTTIDRKRYTSTKEVLDATLIHQSITGLYETRIDLSQLGGDGGGGGGSGGGGSGGGGSGGGGSGGGGSGGGGSGGTAPLEEEYRLFLEAPIQNVTLLEQWKREIPKVWAEINPPGLASTQAPIHVQLLSTALPVRVRQYPITLEAKRSLRETIRKFRAAGILRPVHSPWNTPLLPVRKSGTSEYRMVQDLREVNKRVETIHPTVPNPYTLLSLLPPDRIWYSVLDLKDAFFCIPLAPESQLIFAFEWADAEEGESGQLTWTRLPQGFKNSPTLFNEALNRDLQGFRLDHPSVSLLQYVDDLLIAADTQAACLSATRDLLMTLAELGYRVSGKKAQLCQEEVTYLGFKIHKGSRSLSNSRTQAILQIPVPKTKRQVREFLGTIGYCRLWIPGFAELAQPLYAATRPGNDPLVWGEKEEEAFQSLKLALTQPPALALPSLDKPFQLFVEETSGAAKGVLTQALGPWKRPVAYLSKRLDPVAAGWPRCLRAIAAAALLTREASKLTFGQDIEITSSHNLESLLRSPPDKWLTNARITQYQVLLLDPPRVRFKQTAALNPATLLPETDDTLPIHHCLDTLDSLTSTRPDLTDQPLAQAEATLFTDGSSYIRDGKRYAGAAVVTLDSVIWAEPLPIGTSAQKAELIALTKALEWSKDKSVNIYTDSRYAFATLHVHGMIYRERGWLTAGGKAIKNAPEILALLTAVWLPKRVAVMHCKGHQKDDAPTSTGNRRADEVAREVAIRPLSTQATISAGKRTADGSEFEKRTADGSEFESPKKKAKVE

SEQ ID NO: 6202 - protein, 2121 aa, synthetic construct
MPAAKRVKLDGGDKKYSIGLDIGTNSVGWAVITDEYKVPSKKFKVLGNTDRHSIKKNLIGALLFDSGETAEATRLKRTARRRYTRRKNRICYLQEIFSNEMAKVDDSFFHRLEESFLVEEDKKHERHPIFGNIVDEVAYHEKYPTIYHLRKKLVDSTDKADLRLIYLALAHMIKFRGHFLIEGDLNPDNSDVDKLFIQLVQTYNQLFEENPINASGVDAKAILSARLSKSRRLENLIAQLPGEKKNGLFGNLIALSLGLTPNFKSNFDLAEDAKLQLSKDTYDDDLDNLLAQIGDQYADLFLAAKNLSDAILLSDILRVNTEITKAPLSASMIKRYDEHHQDLTLLKALVRQQLPEKYKEIFFDQSKNGYAGYIDGGASQEEFYKFIKPILEKMDGTEELLVKLNREDLLRKQRTFDNGSIPHQIHLGELHAILRRQEDFYPFLKDNREKIEKILTFRIPYYVGPLARGNSRFAWMTRKSEETITPWNFEEVVDKGASAQSFIERMTNFDKNLPNEKVLPKHSLLYEYFTVYNELTKVKYVTEGMRKPAFLSGEQKKAIVDLLFKTNRKVTVKQLKEDYFKKIECFDSVEISGVEDRFNASLGTYHDLLKIIKDKDFLDNEENEDILEDIVLTLTLFEDREMIEERLKTYAHLFDDKVMKQLKRRRYTGWGRLSRKLINGIRDKQSGKTILDFLKSDGFANRNFMQLIHDDSLTFKEDIQKAQVSGQGDSLHEHIANLAGSPAIKKGILQTVKVVDELVKVMGRHKPENIVIEMARENQTTQKGQKNSRERMKRIEEGIKELGSQILKEHPVENTQLQNEKLYLYYLQNGRDMYVDQELDINRLSDYDVDHIVPQSFLKDDSIDNKVLTRSDKARGKSDNVPSEEVVKKMKNYWRQLLNAKLITQRKFDNLTKAERGGLSELDKAGFIKRQLVETRQITKHVAQILDSRMNTKYDENDKLIREVKVITLKSKLVSDFRKDFQFYKVREINNYHHAHDAYLNAVVGTALIKKYPKLESEFVYGDYKVYDVRKMIAKSEQEIGKATAKYFFYSNIMNFFKTEITLANGEIRKRPLIETNGETGEIVWDKGRDFATVRKVLSMPQVNIVKKTEVQTGGFSKESILPKRNSDKLIARKKDWDPKKYGGFDSPTVAYSVLVVAKVEKGKSKKLKSVKELLGITIMERSSFEKNPIDFLEAKGYKEVKKDLIIKLPKYSLFELENGRKRMLASAGELQKGNELALPSKYVNFLYLASHYEKLKGSPEDNEQKQLFVEQHKHYLDEIIEQISEFSKRVILADANLDKVLSAYNKHRDKPIREQAENIIHLFTLTNLGAPAAFKYFDTTIDRKRYTSTKEVLDATLIHQSITGLYETRIDLSQLGGDGGGGGGSGGGGSGGGGSGGGGSGGGGSGGGGSGGTVSLQDEHRLFDIPVTTSLPDVWLQDFPQAWAETGGLGRAKCQAPIIIDLKPTAVPVSIKQYPMSLEAHMGIRQHIIKFLELGVLRPCRSPWNTPLLPVKKPGTQDYRPVQDLREINKRTVDIHPTVPNPYNLLSTLKPDYSWYTVLDLKDAFFCLPLAPQSQELFAFEWKDPERGISGQLTWTRLPQGFKNSPTLFDEALHRDLTDFRTQHPEVTLLQYVDDLLLAAPTKKACTQGTRHLLQELGEKGYRASAKKAQICQTKVTYLGYILSEGKRWLTPGRIETVARIPPPRNPREVREFLGTAGFCRLWIPGFAELAAPLYALTKESTPFTWQTEHQLAFEALKKALLSAPALGLPDTSKPFTLFLDERQGIAKGVLTQKLGPWKRPVAYLSKKLDPVAAGWPPCLRIMAATAMLVKDSAKLTLGQPLTVITPHTLEAIVRQPPDRWITNARLTHYQALLLDTDRVQFGPPVTLNPATLLPVPENQPSPHDCRQVLAETHGTREDLKDQELPDADHTWYTDGSSYLDSGTRRAGAAVVDGHNTIWAQSLPPGTSAQKAELIALTKALELSKGKKANIYTDSRYAFATAHTHGSIYERRGLLTSEGKEIKNKAEIIALLKALFLPQEVAIIHCPGHQKGQDPVAVGNRQADRVARQAAMAEVLTLATEPDNTSHITAGKRTADGSEFEKRTADGSEFESPKKKAKVE

SEQ ID NO: 6203 - protein, 2121 aa, synthetic construct
MPAAKRVKLDGGDKKYSIGLDIGTNSVGWAVITDEYKVPSKKFKVLGNTDRHSIKKNLIGALLFDSGETAEATRLKRTARRRYTRRKNRICYLQEIFSNEMAKVDDSFFHRLEESFLVEEDKKHERHPIFGNIVDEVAYHEKYPTIYHLRKKLVDSTDKADLRLIYLALAHMIKFRGHFLIEGDLNPDNSDVDKLFIQLVQTYNQLFEENPINASGVDAKAILSARLSKSRRLENLIAQLPGEKKNGLFGNLIALSLGLTPNFKSNFDLAEDAKLQLSKDTYDDDLDNLLAQIGDQYADLFLAAKNLSDAILLSDILRVNTEITKAPLSASMIKRYDEHHQDLTLLKALVRQQLPEKYKEIFFDQSKNGYAGYIDGGASQEEFYKFIKPILEKMDGTEELLVKLNREDLLRKQRTFDNGSIPHQIHLGELHAILRRQEDFYPFLKDNREKIEKILTFRIPYYVGPLARGNSRFAWMTRKSEETITPWNFEEVVDKGASAQSFIERMTNFDKNLPNEKVLPKHSLLYEYFTVYNELTKVKYVTEGMRKPAFLSGEQKKAIVDLLFKTNRKVTVKQLKEDYFKKIECFDSVEISGVEDRFNASLGTYHDLLKIIKDKDFLDNEENEDILEDIVLTLTLFEDREMIEERLKTYAHLFDDKVMKQLKRRRYTGWGRLSRKLINGIRDKQSGKTILDFLKSDGFANRNFMQLIHDDSLTFKEDIQKAQVSGQGDSLHEHIANLAGSPAIKKGILQTVKVVDELVKVMGRHKPENIVIEMARENQTTQKGQKNSRERMKRIEEGIKELGSQILKEHPVENTQLQNEKLYLYYLQNGRDMYVDQELDINRLSDYDVDHIVPQSFLKDDSIDNKVLTRSDKARGKSDNVPSEEVVKKMKNYWRQLLNAKLITQRKFDNLTKAERGGLSELDKAGFIKRQLVETRQITKHVAQILDSRMNTKYDENDKLIREVKVITLKSKLVSDFRKDFQFYKVREINNYHHAHDAYLNAVVGTALIKKYPKLESEFVYGDYKVYDVRKMIAKSEQEIGKATAKYFFYSNIMNFFKTEITLANGEIRKRPLIETNGETGEIVWDKGRDFATVRKVLSMPQVNIVKKTEVQTGGFSKESILPKRNSDKLIARKKDWDPKKYGGFDSPTVAYSVLVVAKVEKGKSKKLKSVKELLGITIMERSSFEKNPIDFLEAKGYKEVKKDLIIKLPKYSLFELENGRKRMLASAGELQKGNELALPSKYVNFLYLASHYEKLKGSPEDNEQKQLFVEQHKHYLDEIIEQISEFSKRVILADANLDKVLSAYNKHRDKPIREQAENIIHLFTLTNLGAPAAFKYFDTTIDRKRYTSTKEVLDATLIHQSITGLYETRIDLSQLGGDGGGGGGSGGGGSGGGGSGGGGSGGGGSGGGGSGGTVSLQDEHRLFDIPVTTSLPDVWLQDFPQAWAETGGLGRAKCQAPIIIDLKPTAVPVSIKQYPMSLEAHMGIRQHIIKFLELGVLRPCRSPWNTPLLPVKKPGTQDYRPVQDLREINKRTVDIHPTVPNPYNLLSTLKPDYSWYTVLDLKDAFFCLPLAPQSQELFAFEWKDPERGISGQLTWTRLPQGFKNSPTLFNEALHRDLTDFRTQHPEVTLLQYVDDLLLAAPTKKACTQGTRHLLQELGEKGYRASAKKAQICQTKVTYLGYILSEGKRWLTPGRIETVARIPPPRNPREVREFLGTAGFCRLWIPGFAELAAPLYALTKPSTPFTWQTEHQLAFEALKKALLSAPALGLPDTSKPFTLFLDERQGIAKGVLTQKLGPWKRPVAYLSKKLDPVAAGWPPCLRIMAATAMLVKDSAKLTLGQPLTVITPHTLEAIVRQPPDRWITNARLTHYQALLLDTDRVQFGPPVTLNPATLLPVPENQPSPHDCRQVLAETHGTREDLKDQELPDADHTWYTDGSSYLDSGTRRAGAAVVDGHNTIWAQSLPPGTSAQKAELIALTKALELSKGKKANIYTDSRYAFATAHTHGSIYERRGWLTSEGKEIKNKAEIIALLKALFLPQEVAIIHCPGHQKGQDPVAVGNRQADRVARQAAMAEVLTLATEPDNTSHITAGKRTADGSEFEKRTADGSEFESPKKKAKVE

SEQ ID NO: 6204 - protein, 2106 aa, synthetic construct
MPAAKRVKLDGGDKKYSIGLDIGTNSVGWAVITDEYKVPSKKFKVLGNTDRHSIKKNLIGALLFDSGETAEATRLKRTARRRYTRRKNRICYLQEIFSNEMAKVDDSFFHRLEESFLVEEDKKHERHPIFGNIVDEVAYHEKYPTIYHLRKKLVDSTDKADLRLIYLALAHMIKFRGHFLIEGDLNPDNSDVDKLFIQLVQTYNQLFEENPINASGVDAKAILSARLSKSRRLENLIAQLPGEKKNGLFGNLIALSLGLTPNFKSNFDLAEDAKLQLSKDTYDDDLDNLLAQIGDQYADLFLAAKNLSDAILLSDILRVNTEITKAPLSASMIKRYDEHHQDLTLLKALVRQQLPEKYKEIFFDQSKNGYAGYIDGGASQEEFYKFIKPILEKMDGTEELLVKLNREDLLRKQRTFDNGSIPHQIHLGELHAILRRQEDFYPFLKDNREKIEKILTFRIPYYVGPLARGNSRFAWMTRKSEETITPWNFEEVVDKGASAQSFIERMTNFDKNLPNEKVLPKHSLLYEYFTVYNELTKVKYVTEGMRKPAFLSGEQKKAIVDLLFKTNRKVTVKQLKEDYFKKIECFDSVEISGVEDRFNASLGTYHDLLKIIKDKDFLDNEENEDILEDIVLTLTLFEDREMIEERLKTYAHLFDDKVMKQLKRRRYTGWGRLSRKLINGIRDKQSGKTILDFLKSDGFANRNFMQLIHDDSLTFKEDIQKAQVSGQGDSLHEHIANLAGSPAIKKGILQTVKVVDELVKVMGRHKPENIVIEMARENQTTQKGQKNSRERMKRIEEGIKELGSQILKEHPVENTQLQNEKLYLYYLQNGRDMYVDQELDINRLSDYDVDHIVPQSFLKDDSIDNKVLTRSDKARGKSDNVPSEEVVKKMKNYWRQLLNAKLITQRKFDNLTKAERGGLSELDKAGFIKRQLVETRQITKHVAQILDSRMNTKYDENDKLIREVKVITLKSKLVSDFRKDFQFYKVREINNYHHAHDAYLNAVVGTALIKKYPKLESEFVYGDYKVYDVRKMIAKSEQEIGKATAKYFFYSNIMNFFKTEITLANGEIRKRPLIETNGETGEIVWDKGRDFATVRKVLSMPQVNIVKKTEVQTGGFSKESILPKRNSDKLIARKKDWDPKKYGGFDSPTVAYSVLVVAKVEKGKSKKLKSVKELLGITIMERSSFEKNPIDFLEAKGYKEVKKDLIIKLPKYSLFELENGRKRMLASAGELQKGNELALPSKYVNFLYLASHYEKLKGSPEDNEQKQLFVEQHKHYLDEIIEQISEFSKRVILADANLDKVLSAYNKHRDKPIREQAENIIHLFTLTNLGAPAAFKYFDTTIDRKRYTSTKEVLDATLIHQSITGLYETRIDLSQLGGDGGGGGGSGGGGSGGGGSGGGGSGGGGSGGGGSGGVPWILKKPLELTIKLDLEEQQGTLLNNSILSKKGKEELKQLFEKYSALWQSWENQVGHRRIRPHKIATGTVKPTPQKQYHINPKAKPDIQIVINDLLKQGVLIQKESTMNTPVYPVPKPNGRWRMVLDYRAVNKVTPLIAVQNQHSYGILGSLFKGRYKTTIDLSNGFWAHPIVPEDYWITAFTWQGKQYCWTVLPQGFLNSPGLFNGDVVDLLQGIPNVEVYVDDVYISHDSEKEHLEYLDILFNRLKEAGYIISLKKSNIANSIVDFLGFQITNEGRGLTDTFKEKLENITAPTTLKQLQSILGLLNFARNFIPDFTELIAPLYALIPKSPKNYVPWQIEHSTTLETLITKLNGAEYLQGRKGDKTLIMKVNASYTTGYIRYYNEGEKKPISYVSIVFSKTELKFTELEKLLTTVHKGLLKALDLSMGQNIHVYSPIVSMQNIQKTPQTAKKALASRWLSWLSYLEDPRIRFFYDPQMPALKDLPAVDTGKDNKKHPSNFQHIFYTDGSAITSPTKEGHLNAGMGIVYFINKDGNLQKQQEWSISLGNHTAQFAEIAAFEFALKKCLPLGGNILVVTDSNYVAKAYNEELDVWASNGFVNNRKKPLKHISKWKSVADLKRLRPDVVVTHEPGHQKLDSSPHAYGNNLADQLATQASFKVHAGKRTADGSEFEKRTADGSEFESPKKKAKVE

SEQ ID NO: 6205 - protein, 2114 aa, synthetic construct
MPAAKRVKLDGGDKKYSIGLDIGTNSVGWAVITDEYKVPSKKFKVLGNTDRHSIKKNLIGALLFDSGETAEATRLKRTARRRYTRRKNRICYLQEIFSNEMAKVDDSFFHRLEESFLVEEDKKHERHPIFGNIVDEVAYHEKYPTIYHLRKKLVDSTDKADLRLIYLALAHMIKFRGHFLIEGDLNPDNSDVDKLFIQLVQTYNQLFEENPINASGVDAKAILSARLSKSRRLENLIAQLPGEKKNGLFGNLIALSLGLTPNFKSNFDLAEDAKLQLSKDTYDDDLDNLLAQIGDQYADLFLAAKNLSDAILLSDILRVNTEITKAPLSASMIKRYDEHHQDLTLLKALVRQQLPEKYKEIFFDQSKNGYAGYIDGGASQEEFYKFIKPILEKMDGTEELLVKLNREDLLRKQRTFDNGSIPHQIHLGELHAILRRQEDFYPFLKDNREKIEKILTFRIPYYVGPLARGNSRFAWMTRKSEETITPWNFEEVVDKGASAQSFIERMTNFDKNLPNEKVLPKHSLLYEYFTVYNELTKVKYVTEGMRKPAFLSGEQKKAIVDLLFKTNRKVTVKQLKEDYFKKIECFDSVEISGVEDRFNASLGTYHDLLKIIKDKDFLDNEENEDILEDIVLTLTLFEDREMIEERLKTYAHLFDDKVMKQLKRRRYTGWGRLSRKLINGIRDKQSGKTILDFLKSDGFANRNFMQLIHDDSLTFKEDIQKAQVSGQGDSLHEHIANLAGSPAIKKGILQTVKVVDELVKVMGRHKPENIVIEMARENQTTQKGQKNSRERMKRIEEGIKELGSQILKEHPVENTQLQNEKLYLYYLQNGRDMYVDQELDINRLSDYDVDHIVPQSFLKDDSIDNKVLTRSDKARGKSDNVPSEEVVKKMKNYWRQLLNAKLITQRKFDNLTKAERGGLSELDKAGFIKRQLVETRQITKHVAQILDSRMNTKYDENDKLIREVKVITLKSKLVSDFRKDFQFYKVREINNYHHAHDAYLNAVVGTALIKKYPKLESEFVYGDYKVYDVRKMIAKSEQEIGKATAKYFFYSNIMNFFKTEITLANGEIRKRPLIETNGETGEIVWDKGRDFATVRKVLSMPQVNIVKKTEVQTGGFSKESILPKRNSDKLIARKKDWDPKKYGGFDSPTVAYSVLVVAKVEKGKSKKLKSVKELLGITIMERSSFEKNPIDFLEAKGYKEVKKDLIIKLPKYSLFELENGRKRMLASAGELQKGNELALPSKYVNFLYLASHYEKLKGSPEDNEQKQLFVEQHKHYLDEIIEQISEFSKRVILADANLDKVLSAYNKHRDKPIREQAENIIHLFTLTNLGAPAAFKYFDTTIDRKRYTSTKEVLDATLIHQSITGLYETRIDLSQLGGDGGGGGGSGGGGSGGGGSGGGGSGGGGSGGGGSGGTLQLEEEYRLFEPESTQKQEMDIWLKNFPQAWAETGGMGTAHCQAPVLIQLKATATPISIRQYPMPHEAYQGIKPHIRRMLDQGILKPCQSPWNTPLLPVKKPGTEDYRPVQDLREVNKRVEDIHPTVPNPYNLLSTLPPSHPWYTVLDLKDAFFCLRLHSESQLLFAFEWRDPEIGLSGQLTWTRLPQGFKNSPTLFNEALHSDLADFRVRYPALVLLQYVDDLLLAAATRTECLEGTKALLETLGNKGYRASAKKAQICLQEVTYLGYSLKDGQRWLTKARKEAILSIPVPKNSRQVREFLGTAGYCRLWIPGFAELAAPLYPLTRPGTLFQWGTEQQLAFEDIKKALLSSPALGLPDITKPFELFIDENSGFAKGVLVQKLGPWKRPVAYLSKKLDTVASGWPPCLRMVAAIAILVKDAGKLTLGQPLTILTSHPVEALVRQPPNKWLSNARMTHYQAMLLDAERVHFGPTVSLNPATLLPLPSGGNHHDCLQILAETHGTRPDLTDQPLPDADLTWYTDGSSFIRNGEREAGAAVTTESEVIWAAPLPPGTSAQRAELIALTQALKMAEGKKLTVYTDSRYAFATTHVHGEIYRRRGWLTSEGKEIKNKNEILALLEALFLPKRLSIIHCPGHQKGDSPQAKGNRLADDTAKKAATETHSSLTVLPAGKRTADGSEFEKRTADGSEFESPKKKAKVE

SEQ ID NO: 6206 - protein, 2106 aa, synthetic construct
MPAAKRVKLDGGDKKYSIGLDIGTNSVGWAVITDEYKVPSKKFKVLGNTDRHSIKKNLIGALLFDSGETAEATRLKRTARRRYTRRKNRICYLQEIFSNEMAKVDDSFFHRLEESFLVEEDKKHERHPIFGNIVDEVAYHEKYPTIYHLRKKLVDSTDKADLRLIYLALAHMIKFRGHFLIEGDLNPDNSDVDKLFIQLVQTYNQLFEENPINASGVDAKAILSARLSKSRRLENLIAQLPGEKKNGLFGNLIALSLGLTPNFKSNFDLAEDAKLQLSKDTYDDDLDNLLAQIGDQYADLFLAAKNLSDAILLSDILRVNTEITKAPLSASMIKRYDEHHQDLTLLKALVRQQLPEKYKEIFFDQSKNGYAGYIDGGASQEEFYKFIKPILEKMDGTEELLVKLNREDLLRKQRTFDNGSIPHQIHLGELHAILRRQEDFYPFLKDNREKIEKILTFRIPYYVGPLARGNSRFAWMTRKSEETITPWNFEEVVDKGASAQSFIERMTNFDKNLPNEKVLPKHSLLYEYFTVYNELTKVKYVTEGMRKPAFLSGEQKKAIVDLLFKTNRKVTVKQLKEDYFKKIECFDSVEISGVEDRFNASLGTYHDLLKIIKDKDFLDNEENEDILEDIVLTLTLFEDREMIEERLKTYAHLFDDKVMKQLKRRRYTGWGRLSRKLINGIRDKQSGKTILDFLKSDGFANRNFMQLIHDDSLTFKEDIQKAQVSGQGDSLHEHIANLAGSPAIKKGILQTVKVVDELVKVMGRHKPENIVIEMARENQTTQKGQKNSRERMKRIEEGIKELGSQILKEHPVENTQLQNEKLYLYYLQNGRDMYVDQELDINRLSDYDVDHIVPQSFLKDDSIDNKVLTRSDKARGKSDNVPSEEVVKKMKNYWRQLLNAKLITQRKFDNLTKAERGGLSELDKAGFIKRQLVETRQITKHVAQILDSRMNTKYDENDKLIREVKVITLKSKLVSDFRKDFQFYKVREINNYHHAHDAYLNAVVGTALIKKYPKLESEFVYGDYKVYDVRKMIAKSEQEIGKATAKYFFYSNIMNFFKTEITLANGEIRKRPLIETNGETGEIVWDKGRDFATVRKVLSMPQVNIVKKTEVQTGGFSKESILPKRNSDKLIARKKDWDPKKYGGFDSPTVAYSVLVVAKVEKGKSKKLKSVKELLGITIMERSSFEKNPIDFLEAKGYKEVKKDLIIKLPKYSLFELENGRKRMLASAGELQKGNELALPSKYVNFLYLASHYEKLKGSPEDNEQKQLFVEQHKHYLDEIIEQISEFSKRVILADANLDKVLSAYNKHRDKPIREQAENIIHLFTLTNLGAPAAFKYFDTTIDRKRYTSTKEVLDATLIHQSITGLYETRIDLSQLGGDGGGGGGSGGGGSGGGGSGGGGSGGGGSGGGGSGGVPWLTQQPLQLTILVPLQEYQEKILSKTALPEDQKQQLKTLFVKYDNLWQHWENQVGHRKIRPHNIATGDYPPRPQKQYPINPKAKPSIQIVIDDLLKQGVLTPQNSTMNTPVYPVPKPDGRWRMVLDYREVNKTIPLTAAQNQHSAGILATIVRQKYKTTLDLANGFWAHPITPESYWLTAFTWQGKQYCWTRLPQGFLNSPALFNADVVDLLKEIPNVQVYVDDIYLSHDDPKEHVQQLEKVFQILLQAGYVVSLKKSEIGQKTVEFLGFNITKEGRGLTDTFKTKLLNITPPKDLKQLQSILGLLNFARNFIPNFAELVQPLYNLIAPAKGKYIEWSEENTKQLNMVIEALNTASNLEERLPEQRLVIKVNTSPSAGYVRYYNETGKKPIMYLNYVFSKAELKFSMLEKLLTTMHKALIKAMDLAMGQEILVYSPIVSMTKIQKTPLPERKALPIRWITWMTYLEDPRIQFHYDKTLPELKHIPDVYTSSQSPVKHPSQYEGVFYTDGSAIKSPDPTKSNNAGMGIVHATYKPEYQVLNQWSIPLGNHTAQMAEIAAVEFACKKALKIPGPVLVITDSFYVAESANKELPYWKSNGFVNNKKKPLKHISKWKSIAECLSMKPDITIQHEKGISLQIPVFILKGNALADKLATQGSYVVNAGKRTADGSEFEKRTADGSEFESPKKKAKVE

SEQ ID NO: 6207 - protein, 2106 aa, synthetic construct
MPAAKRVKLDGGDKKYSIGLDIGTNSVGWAVITDEYKVPSKKFKVLGNTDRHSIKKNLIGALLFDSGETAEATRLKRTARRRYTRRKNRICYLQEIFSNEMAKVDDSFFHRLEESFLVEEDKKHERHPIFGNIVDEVAYHEKYPTIYHLRKKLVDSTDKADLRLIYLALAHMIKFRGHFLIEGDLNPDNSDVDKLFIQLVQTYNQLFEENPINASGVDAKAILSARLSKSRRLENLIAQLPGEKKNGLFGNLIALSLGLTPNFKSNFDLAEDAKLQLSKDTYDDDLDNLLAQIGDQYADLFLAAKNLSDAILLSDILRVNTEITKAPLSASMIKRYDEHHQDLTLLKALVRQQLPEKYKEIFFDQSKNGYAGYIDGGASQEEFYKFIKPILEKMDGTEELLVKLNREDLLRKQRTFDNGSIPHQIHLGELHAILRRQEDFYPFLKDNREKIEKILTFRIPYYVGPLARGNSRFAWMTRKSEETITPWNFEEVVDKGASAQSFIERMTNFDKNLPNEKVLPKHSLLYEYFTVYNELTKVKYVTEGMRKPAFLSGEQKKAIVDLLFKTNRKVTVKQLKEDYFKKIECFDSVEISGVEDRFNASLGTYHDLLKIIKDKDFLDNEENEDILEDIVLTLTLFEDREMIEERLKTYAHLFDDKVMKQLKRRRYTGWGRLSRKLINGIRDKQSGKTILDFLKSDGFANRNFMQLIHDDSLTFKEDIQKAQVSGQGDSLHEHIANLAGSPAIKKGILQTVKVVDELVKVMGRHKPENIVIEMARENQTTQKGQKNSRERMKRIEEGIKELGSQILKEHPVENTQLQNEKLYLYYLQNGRDMYVDQELDINRLSDYDVDHIVPQSFLKDDSIDNKVLTRSDKARGKSDNVPSEEVVKKMKNYWRQLLNAKLITQRKFDNLTKAERGGLSELDKAGFIKRQLVETRQITKHVAQILDSRMNTKYDENDKLIREVKVITLKSKLVSDFRKDFQFYKVREINNYHHAHDAYLNAVVGTALIKKYPKLESEFVYGDYKVYDVRKMIAKSEQEIGKATAKYFFYSNIMNFFKTEITLANGEIRKRPLIETNGETGEIVWDKGRDFATVRKVLSMPQVNIVKKTEVQTGGFSKESILPKRNSDKLIARKKDWDPKKYGGFDSPTVAYSVLVVAKVEKGKSKKLKSVKELLGITIMERSSFEKNPIDFLEAKGYKEVKKDLIIKLPKYSLFELENGRKRMLASAGELQKGNELALPSKYVNFLYLASHYEKLKGSPEDNEQKQLFVEQHKHYLDEIIEQISEFSKRVILADANLDKVLSAYNKHRDKPIREQAENIIHLFTLTNLGAPAAFKYFDTTIDRKRYTSTKEVLDATLIHQSITGLYETRIDLSQLGGDGGGGGGSGGGGSGGGGSGGGGSGGGGSGGGGSGGVPWLTQQPLQLTILVPLQEYQEKILSKTALPEDQKQQLKTLFVKYDNLWQHWENQVGHRKIRPHNIATGDYPPRPQKQYPINPKAKPSIQIVIDDLLKQGVLTPQNSTMNTPVYPVPKPDGRWRMVLDYREVNKTIPLTAAQNQHSAGILATIVRQKYKTTLDLANGFWAHPITPESYWLTAFTWQGKQYCWTRLPQGFLNSPALFNADVVDLLKEIPNVQVYVDDIYLSHDDPKEHVQQLEKVFQILLQAGYVVSLKKSEIGQKTVEFLGFNITKEGRGLTDTFKTKLLNITPPKDLKQLQSILGKLNFARNFIPNFAELVQPLYNLIAPAKGKYIEWSEENTKQLNMVIEALNTASNLEERLPEQRLVIKVNTSPSAGYVRYYNETGKKPIMYLNYVFSKAELKFSMLEKLLTTMHKALIKAMDLAMGQEILVYSPIVSMTKIQKTPLPERKALPIRWITWMTYLEDPRIQFHYDKTLPELKHIPDVYTSSQSPVKHPSQYEGVFYTDGSAIKSPDPTKSNNAGMGIVHATYKPEYQVLNQWSIPLGNHTAQMAEIAAVEFACKKALKIPGPVLVITDSFYVAESANKELPYWKSNGFVNNKKKPLKHISKWKSIAECLSMKPDITIQHEKGISLQIPVFILKGNALADKLATQGSYVVNAGKRTADGSEFEKRTADGSEFESPKKKAKVE

SEQ ID NO: 6208 - protein, 2195 aa, synthetic construct
MPAAKRVKLDGGDKKYSIGLDIGTNSVGWAVITDEYKVPSKKFKVLGNTDRHSIKKNLIGALLFDSGETAEATRLKRTARRRYTRRKNRICYLQEIFSNEMAKVDDSFFHRLEESFLVEEDKKHERHPIFGNIVDEVAYHEKYPTIYHLRKKLVDSTDKADLRLIYLALAHMIKFRGHFLIEGDLNPDNSDVDKLFIQLVQTYNQLFEENPINASGVDAKAILSARLSKSRRLENLIAQLPGEKKNGLFGNLIALSLGLTPNFKSNFDLAEDAKLQLSKDTYDDDLDNLLAQIGDQYADLFLAAKNLSDAILLSDILRVNTEITKAPLSASMIKRYDEHHQDLTLLKALVRQQLPEKYKEIFFDQSKNGYAGYIDGGASQEEFYKFIKPILEKMDGTEELLVKLNREDLLRKQRTFDNGSIPHQIHLGELHAILRRQEDFYPFLKDNREKIEKILTFRIPYYVGPLARGNSRFAWMTRKSEETITPWNFEEVVDKGASAQSFIERMTNFDKNLPNEKVLPKHSLLYEYFTVYNELTKVKYVTEGMRKPAFLSGEQKKAIVDLLFKTNRKVTVKQLKEDYFKKIECFDSVEISGVEDRFNASLGTYHDLLKIIKDKDFLDNEENEDILEDIVLTLTLFEDREMIEERLKTYAHLFDDKVMKQLKRRRYTGWGRLSRKLINGIRDKQSGKTILDFLKSDGFANRNFMQLIHDDSLTFKEDIQKAQVSGQGDSLHEHIANLAGSPAIKKGILQTVKVVDELVKVMGRHKPENIVIEMARENQTTQKGQKNSRERMKRIEEGIKELGSQILKEHPVENTQLQNEKLYLYYLQNGRDMYVDQELDINRLSDYDVDHIVPQSFLKDDSIDNKVLTRSDKARGKSDNVPSEEVVKKMKNYWRQLLNAKLITQRKFDNLTKAERGGLSELDKAGFIKRQLVETRQITKHVAQILDSRMNTKYDENDKLIREVKVITLKSKLVSDFRKDFQFYKVREINNYHHAHDAYLNAVVGTALIKKYPKLESEFVYGDYKVYDVRKMIAKSEQEIGKATAKYFFYSNIMNFFKTEITLANGEIRKRPLIETNGETGEIVWDKGRDFATVRKVLSMPQVNIVKKTEVQTGGFSKESILPKRNSDKLIARKKDWDPKKYGGFDSPTVAYSVLVVAKVEKGKSKKLKSVKELLGITIMERSSFEKNPIDFLEAKGYKEVKKDLIIKLPKYSLFELENGRKRMLASAGELQKGNELALPSKYVNFLYLASHYEKLKGSPEDNEQKQLFVEQHKHYLDEIIEQISEFSKRVILADANLDKVLSAYNKHRDKPIREQAENIIHLFTLTNLGAPAAFKYFDTTIDRKRYTSTKEVLDATLIHQSITGLYETRIDLSQLGGDGGGGGGSGGGGSGGGGSGGGGSGGGGSGGGGSGGMNPLQLLQPLPAEIKGTKLLAHWNSGATITCIPESFLEDEQPIKKTLIKTIHGEKQQNVYYVTFKVKGRKVEAEVIASPYEYILLSPTDVPWLTQQPLQLTILVPLQEYQEKILSKTALPEDQKQQLKTLFVKYDNLWQHWENQVGHRKIRPHNIATGDYPPRPQKQYPINPKAKPSIQIVIDDLLKQGVLTPQNSTMNTPVYPVPKPDGRWRMVLDYREVNKTIPLTAAQNQHSAGILATIVRQKYKTTLDLANGFWAHPITPESYWLTAFTWQGKQYCWTRLPQGFLNSPALFNADVVDLLKEIPNVQVYVDDIYLSHDDPKEHVQQLEKVFQILLQAGYVVSLKKSEIGQKTVEFLGFNITKEGRGLTDTFKTKLLNITPPKDLKQLQSILGLLNFARNFIPNFAELVQPLYNLIAPAKGKYIEWSEENTKQLNMVIEALNTASNLEERLPEQRLVIKVNTSPSAGYVRYYNETGKKPIMYLNYVFSKAELKFSMLEKLLTTMHKALIKAMDLAMGQEILVYSPIVSMTKIQKTPLPERKALPIRWITWMTYLEDPRIQFHYDKTLPELKHIPDVYTSSQSPVKHPSQYEGVFYTDGSAIKSPDPTKSNNAGMGIVHATYKPEYQVLNQWSIPLGNHTAQMAEIAAVEFACKKALKIPGPVLVITDSFYVAESANKELPYWKSNGFVNNKKKPLKHISKWKSIAECLSMKPDITIQHEKGISLQIPVFILKGNALADKLATQGSYVVNAGKRTADGSEFEKRTADGSEFESPKKKAKVE

SEQ ID NO: 6209 - protein, 2195 aa, synthetic construct
MPAAKRVKLDGGDKKYSIGLDIGTNSVGWAVITDEYKVPSKKFKVLGNTDRHSIKKNLIGALLFDSGETAEATRLKRTARRRYTRRKNRICYLQEIFSNEMAKVDDSFFHRLEESFLVEEDKKHERHPIFGNIVDEVAYHEKYPTIYHLRKKLVDSTDKADLRLIYLALAHMIKFRGHFLIEGDLNPDNSDVDKLFIQLVQTYNQLFEENPINASGVDAKAILSARLSKSRRLENLIAQLPGEKKNGLFGNLIALSLGLTPNFKSNFDLAEDAKLQLSKDTYDDDLDNLLAQIGDQYADLFLAAKNLSDAILLSDILRVNTEITKAPLSASMIKRYDEHHQDLTLLKALVRQQLPEKYKEIFFDQSKNGYAGYIDGGASQEEFYKFIKPILEKMDGTEELLVKLNREDLLRKQRTFDNGSIPHQIHLGELHAILRRQEDFYPFLKDNREKIEKILTFRIPYYVGPLARGNSRFAWMTRKSEETITPWNFEEVVDKGASAQSFIERMTNFDKNLPNEKVLPKHSLLYEYFTVYNELTKVKYVTEGMRKPAFLSGEQKKAIVDLLFKTNRKVTVKQLKEDYFKKIECFDSVEISGVEDRFNASLGTYHDLLKIIKDKDFLDNEENEDILEDIVLTLTLFEDREMIEERLKTYAHLFDDKVMKQLKRRRYTGWGRLSRKLINGIRDKQSGKTILDFLKSDGFANRNFMQLIHDDSLTFKEDIQKAQVSGQGDSLHEHIANLAGSPAIKKGILQTVKVVDELVKVMGRHKPENIVIEMARENQTTQKGQKNSRERMKRIEEGIKELGSQILKEHPVENTQLQNEKLYLYYLQNGRDMYVDQELDINRLSDYDVDHIVPQSFLKDDSIDNKVLTRSDKARGKSDNVPSEEVVKKMKNYWRQLLNAKLITQRKFDNLTKAERGGLSELDKAGFIKRQLVETRQITKHVAQILDSRMNTKYDENDKLIREVKVITLKSKLVSDFRKDFQFYKVREINNYHHAHDAYLNAVVGTALIKKYPKLESEFVYGDYKVYDVRKMIAKSEQEIGKATAKYFFYSNIMNFFKTEITLANGEIRKRPLIETNGETGEIVWDKGRDFATVRKVLSMPQVNIVKKTEVQTGGFSKESILPKRNSDKLIARKKDWDPKKYGGFDSPTVAYSVLVVAKVEKGKSKKLKSVKELLGITIMERSSFEKNPIDFLEAKGYKEVKKDLIIKLPKYSLFELENGRKRMLASAGELQKGNELALPSKYVNFLYLASHYEKLKGSPEDNEQKQLFVEQHKHYLDEIIEQISEFSKRVILADANLDKVLSAYNKHRDKPIREQAENIIHLFTLTNLGAPAAFKYFDTTIDRKRYTSTKEVLDATLIHQSITGLYETRIDLSQLGGDGGGGGGSGGGGSGGGGSGGGGSGGGGSGGGGSGGMNPLQLLQPLPAEIKGTKLLAHWNSGATITCIPESFLEDEQPIKKTLIKTIHGEKQQNVYYVTFKVKGRKVEAEVIASPYEYILLSPTDVPWLTQQPLQLTILVPLQEYQEKILSKTALPEDQKQQLKTLFVKYDNLWQHWENQVGHRKIRPHNIATGDYPPRPQKQYPINPKAKPSIQIVIDDLLKQGVLTPQNSTMNTPVYPVPKPDGRWRMVLDYREVNKTIPLTAAQNQHSAGILATIVRQKYKTTLDLANGFWAHPITPESYWLTAFTWQGKQYCWTRLPQGFLNSPALFNADVVDLLKEIPNVQVYVDDIYLSHDDPKEHVQQLEKVFQILLQAGYVVSLKKSEIGQKTVEFLGFNITKEGRGLTDTFKTKLLNITPPKDLKQLQSILGKLNFARNFIPNFAELVQPLYNLIAPAKGKYIEWSEENTKQLNMVIEALNTASNLEERLPEQRLVIKVNTSPSAGYVRYYNETGKKPIMYLNYVFSKAELKFSMLEKLLTTMHKALIKAMDLAMGQEILVYSPIVSMTKIQKTPLPERKALPIRWITWMTYLEDPRIQFHYDKTLPELKHIPDVYTSSQSPVKHPSQYEGVFYTDGSAIKSPDPTKSNNAGMGIVHATYKPEYQVLNQWSIPLGNHTAQMAEIAAVEFACKKALKIPGPVLVITDSFYVAESANKELPYWKSNGFVNNKKKPLKHISKWKSIAECLSMKPDITIQHEKGISLQIPVFILKGNALADKLATQGSYVVNAGKRTADGSEFEKRTADGSEFESPKKKAKVE

SEQ ID NO: 6210 - protein, 2113 aa, synthetic construct
MPAAKRVKLDGGDKKYSIGLDIGTNSVGWAVITDEYKVPSKKFKVLGNTDRHSIKKNLIGALLFDSGETAEATRLKRTARRRYTRRKNRICYLQEIFSNEMAKVDDSFFHRLEESFLVEEDKKHERHPIFGNIVDEVAYHEKYPTIYHLRKKLVDSTDKADLRLIYLALAHMIKFRGHFLIEGDLNPDNSDVDKLFIQLVQTYNQLFEENPINASGVDAKAILSARLSKSRRLENLIAQLPGEKKNGLFGNLIALSLGLTPNFKSNFDLAEDAKLQLSKDTYDDDLDNLLAQIGDQYADLFLAAKNLSDAILLSDILRVNTEITKAPLSASMIKRYDEHHQDLTLLKALVRQQLPEKYKEIFFDQSKNGYAGYIDGGASQEEFYKFIKPILEKMDGTEELLVKLNREDLLRKQRTFDNGSIPHQIHLGELHAILRRQEDFYPFLKDNREKIEKILTFRIPYYVGPLARGNSRFAWMTRKSEETITPWNFEEVVDKGASAQSFIERMTNFDKNLPNEKVLPKHSLLYEYFTVYNELTKVKYVTEGMRKPAFLSGEQKKAIVDLLFKTNRKVTVKQLKEDYFKKIECFDSVEISGVEDRFNASLGTYHDLLKIIKDKDFLDNEENEDILEDIVLTLTLFEDREMIEERLKTYAHLFDDKVMKQLKRRRYTGWGRLSRKLINGIRDKQSGKTILDFLKSDGFANRNFMQLIHDDSLTFKEDIQKAQVSGQGDSLHEHIANLAGSPAIKKGILQTVKVVDELVKVMGRHKPENIVIEMARENQTTQKGQKNSRERMKRIEEGIKELGSQILKEHPVENTQLQNEKLYLYYLQNGRDMYVDQELDINRLSDYDVDHIVPQSFLKDDSIDNKVLTRSDKARGKSDNVPSEEVVKKMKNYWRQLLNAKLITQRKFDNLTKAERGGLSELDKAGFIKRQLVETRQITKHVAQILDSRMNTKYDENDKLIREVKVITLKSKLVSDFRKDFQFYKVREINNYHHAHDAYLNAVVGTALIKKYPKLESEFVYGDYKVYDVRKMIAKSEQEIGKATAKYFFYSNIMNFFKTEITLANGEIRKRPLIETNGETGEIVWDKGRDFATVRKVLSMPQVNIVKKTEVQTGGFSKESILPKRNSDKLIARKKDWDPKKYGGFDSPTVAYSVLVVAKVEKGKSKKLKSVKELLGITIMERSSFEKNPIDFLEAKGYKEVKKDLIIKLPKYSLFELENGRKRMLASAGELQKGNELALPSKYVNFLYLASHYEKLKGSPEDNEQKQLFVEQHKHYLDEIIEQISEFSKRVILADANLDKVLSAYNKHRDKPIREQAENIIHLFTLTNLGAPAAFKYFDTTIDRKRYTSTKEVLDATLIHQSITGLYETRIDLSQLGGDGGGGGGSGGGGSGGGGSGGGGSGGGGSGGGGSGGVLNLEEEYRLHEKPVPSSIDPSWLQLFPTVWAERAGMGLANQVPPVVVELRSGASPVAVRQYPMSKEAREGIRPHIQKFLDLGVLVPCRSPWNTPLLPVKKPGTNDYRPVQDLREINKRVQDIHPTVPNPYNLLSSLPPSYTWYSVLDLKDAFFCLRLHPNSQPLFAFEWKDPEKGNTGQLTWTRLPQGFKNSPTLFDEALHRDLAPFRALNPQVVLLQYVDDLLVAAPTYEDCKKGTQKLLQELSKLGYRVSAKKAQLCQREVTYLGYLLKEGKRWLTPARKATVMKIPVPTTPRQVREFLGTAGFCRLWIPGFASLAAPLYPLTKESIPFIWTEEHQQAFDHIKKALLSAPALALPDLTKPFTLYIDERAGVARGVLTQTLGPWRRPVAYLSKKLDPVASGWPTCLKAVAAVALLLKDADKLTLGQNVTVIASHSLESIVRQPPDRWMTNARMTHYQSLLLNERVSFAPPAVLNPATLLPVESEATPVHRCSEILAEETGTRRDLEDQPLPGVPTWYTDGSSFITEGKRRAGAPIVDGKRTVWASSLPEGTSAQKAELVALTQALRLAEGKNINIYTDSRYAFATAHIHGAIYKQRGLLTSAGKDIKNKEEILALLEAIHLPRRVAIIHCPGHQRGSNPVATGNRRADEAAKQAALSTRVLAGTTKPAGKRTADGSEFEKRTADGSEFESPKKKAKVE

SEQ ID NO: 6211 - protein, 2113 aa, synthetic construct
MPAAKRVKLDGGDKKYSIGLDIGTNSVGWAVITDEYKVPSKKFKVLGNTDRHSIKKNLIGALLFDSGETAEATRLKRTARRRYTRRKNRICYLQEIFSNEMAKVDDSFFHRLEESFLVEEDKKHERHPIFGNIVDEVAYHEKYPTIYHLRKKLVDSTDKADLRLIYLALAHMIKFRGHFLIEGDLNPDNSDVDKLFIQLVQTYNQLFEENPINASGVDAKAILSARLSKSRRLENLIAQLPGEKKNGLFGNLIALSLGLTPNFKSNFDLAEDAKLQLSKDTYDDDLDNLLAQIGDQYADLFLAAKNLSDAILLSDILRVNTEITKAPLSASMIKRYDEHHQDLTLLKALVRQQLPEKYKEIFFDQSKNGYAGYIDGGASQEEFYKFIKPILEKMDGTEELLVKLNREDLLRKQRTFDNGSIPHQIHLGELHAILRRQEDFYPFLKDNREKIEKILTFRIPYYVGPLARGNSRFAWMTRKSEETITPWNFEEVVDKGASAQSFIERMTNFDKNLPNEKVLPKHSLLYEYFTVYNELTKVKYVTEGMRKPAFLSGEQKKAIVDLLFKTNRKVTVKQLKEDYFKKIECFDSVEISGVEDRFNASLGTYHDLLKIIKDKDFLDNEENEDILEDIVLTLTLFEDREMIEERLKTYAHLFDDKVMKQLKRRRYTGWGRLSRKLINGIRDKQSGKTILDFLKSDGFANRNFMQLIHDDSLTFKEDIQKAQVSGQGDSLHEHIANLAGSPAIKKGILQTVKVVDELVKVMGRHKPENIVIEMARENQTTQKGQKNSRERMKRIEEGIKELGSQILKEHPVENTQLQNEKLYLYYLQNGRDMYVDQELDINRLSDYDVDHIVPQSFLKDDSIDNKVLTRSDKARGKSDNVPSEEVVKKMKNYWRQLLNAKLITQRKFDNLTKAERGGLSELDKAGFIKRQLVETRQITKHVAQILDSRMNTKYDENDKLIREVKVITLKSKLVSDFRKDFQFYKVREINNYHHAHDAYLNAVVGTALIKKYPKLESEFVYGDYKVYDVRKMIAKSEQEIGKATAKYFFYSNIMNFFKTEITLANGEIRKRPLIETNGETGEIVWDKGRDFATVRKVLSMPQVNIVKKTEVQTGGFSKESILPKRNSDKLIARKKDWDPKKYGGFDSPTVAYSVLVVAKVEKGKSKKLKSVKELLGITIMERSSFEKNPIDFLEAKGYKEVKKDLIIKLPKYSLFELENGRKRMLASAGELQKGNELALPSKYVNFLYLASHYEKLKGSPEDNEQKQLFVEQHKHYLDEIIEQISEFSKRVILADANLDKVLSAYNKHRDKPIREQAENIIHLFTLTNLGAPAAFKYFDTTIDRKRYTSTKEVLDATLIHQSITGLYETRIDLSQLGGDGGGGGGSGGGGSGGGGSGGGGSGGGGSGGGGSGGVLNLEEEYRLHEKPVPSSIDPSWLQLFPTVWAERAGMGLANQVPPVVVELRSGASPVAVRQYPMSKEAREGIRPHIQKFLDLGVLVPCRSPWNTPLLPVKKPGTNDYRPVQDLREINKRVQDIHPTVPNPYNLLSSLPPSYTWYSVLDLKDAFFCLRLHPNSQPLFAFEWKDPEKGNTGQLTWTRLPQGFKNSPTLFNEALHRDLAPFRALNPQVVLLQYVDDLLVAAPTYEDCKKGTQKLLQELSKLGYRVSAKKAQLCQREVTYLGYLLKEGKRWLTPARKATVMKIPVPTTPRQVREFLGKAGFCRLFIPGFASLAAPLYPLTKPSIPFIWTEEHQQAFDHIKKALLSAPALALPDLTKPFTLYIDERAGVARGVLTQTLGPWRRPVAYLSKKLDPVASGWPTCLKAVAAVALLLKDADKLTLGQNVTVIASHSLESIVRQPPDRWMTNARMTHYQSLLLNERVSFAPPAVLNPATLLPVESEATPVHRCSEILAEETGTRRDLEDQPLPGVPTWYTDGSSFITEGKRRAGAPIVDGKRTVWASSLPEGTSAQKAELVALTQALRLAEGKNINIYTDSRYAFATAHIHGAIYKQRGWLTSAGKDIKNKEEILALLEAIHLPRRVAIIHCPGHQRGSNPVATGNRRADEAAKQAALSTRVLAGTTKPAGKRTADGSEFEKRTADGSEFESPKKKAKVE

SEQ ID NO: 6212 - protein, 2146 aa, synthetic construct
MPAAKRVKLDGGDKKYSIGLDIGTNSVGWAVITDEYKVPSKKFKVLGNTDRHSIKKNLIGALLFDSGETAEATRLKRTARRRYTRRKNRICYLQEIFSNEMAKVDDSFFHRLEESFLVEEDKKHERHPIFGNIVDEVAYHEKYPTIYHLRKKLVDSTDKADLRLIYLALAHMIKFRGHFLIEGDLNPDNSDVDKLFIQLVQTYNQLFEENPINASGVDAKAILSARLSKSRRLENLIAQLPGEKKNGLFGNLIALSLGLTPNFKSNFDLAEDAKLQLSKDTYDDDLDNLLAQIGDQYADLFLAAKNLSDAILLSDILRVNTEITKAPLSASMIKRYDEHHQDLTLLKALVRQQLPEKYKEIFFDQSKNGYAGYIDGGASQEEFYKFIKPILEKMDGTEELLVKLNREDLLRKQRTFDNGSIPHQIHLGELHAILRRQEDFYPFLKDNREKIEKILTFRIPYYVGPLARGNSRFAWMTRKSEETITPWNFEEVVDKGASAQSFIERMTNFDKNLPNEKVLPKHSLLYEYFTVYNELTKVKYVTEGMRKPAFLSGEQKKAIVDLLFKTNRKVTVKQLKEDYFKKIECFDSVEISGVEDRFNASLGTYHDLLKIIKDKDFLDNEENEDILEDIVLTLTLFEDREMIEERLKTYAHLFDDKVMKQLKRRRYTGWGRLSRKLINGIRDKQSGKTILDFLKSDGFANRNFMQLIHDDSLTFKEDIQKAQVSGQGDSLHEHIANLAGSPAIKKGILQTVKVVDELVKVMGRHKPENIVIEMARENQTTQKGQKNSRERMKRIEEGIKELGSQILKEHPVENTQLQNEKLYLYYLQNGRDMYVDQELDINRLSDYDVDHIVPQSFLKDDSIDNKVLTRSDKARGKSDNVPSEEVVKKMKNYWRQLLNAKLITQRKFDNLTKAERGGLSELDKAGFIKRQLVETRQITKHVAQILDSRMNTKYDENDKLIREVKVITLKSKLVSDFRKDFQFYKVREINNYHHAHDAYLNAVVGTALIKKYPKLESEFVYGDYKVYDVRKMIAKSEQEIGKATAKYFFYSNIMNFFKTEITLANGEIRKRPLIETNGETGEIVWDKGRDFATVRKVLSMPQVNIVKKTEVQTGGFSKESILPKRNSDKLIARKKDWDPKKYGGFDSPTVAYSVLVVAKVEKGKSKKLKSVKELLGITIMERSSFEKNPIDFLEAKGYKEVKKDLIIKLPKYSLFELENGRKRMLASAGELQKGNELALPSKYVNFLYLASHYEKLKGSPEDNEQKQLFVEQHKHYLDEIIEQISEFSKRVILADANLDKVLSAYNKHRDKPIREQAENIIHLFTLTNLGAPAAFKYFDTTIDRKRYTSTKEVLDATLIHQSITGLYETRIDLSQLGGDGGGGGGSGGGGSGGGGSGGGGSGGGGSGGGGSGGLLGRDLLTKLKAQIQFSTEGPQVTWEDRPAMCLVLNLEEEYRLHEKPVPPSIDPSWLQLFPMVWAEKAGMGLANQVPPVVVELKSDASPVAVRQYPMSKEAREGIRPHIQRFLDLGILVPCQSPWNTPLLPVKKPGTNDYRPVQDLREVNKRVQDIHPTVPNPYNLLSSLPPSHTWYSVLDLKDAFFCLKLHPNSQPLFAFEWRDPEKGNTGQLTWTRLPQGFKNSPTLFNEALHRDLASFRALNPQVVMLQYVDDLLVAAPTYRDCKEGTRRLLQELSKLGYRVSAKKAQLCREEVTYLGYLLKGGKRWLTPARKATVMKIPTPTTPRQVREFLGTAGFCRLWIPGFASLAAPLYPLTRPKVPFTWTEAHQEAFGRIKEALLSAPALALPDLTKPFALYVDEKEGVARGVLTQTLGPWRRPVAYLSKKLDPVASGWPTCLKAIAAVALLLKDADKLTLGQNVLVIAPHNLESIVRQPPDRWMTNARMTHYQSLLLNERVSFAPPAILNPATLLPVESDDTPIHICSEILAEETGTRPDLRDQPLPGVPAWYTDGSSFIMDGRRQAGAAIVDNKRTVWASNLPEGTSAQKAELIALTQALRLAEGKSINIYTDSRYAFATAHVHGAIYKQRGWLTSAGKDIKNKEEILALLEAIHLPKRVAIIHCPGHQRGTDPVATGNRKADEAAKQAAQSTRILTETTKNAGKRTADGSEFEKRTADGSEFESPKKKAKVE

SEQ ID NO: 6213 - protein, 2115 aa, synthetic construct
MPAAKRVKLDGGDKKYSIGLDIGTNSVGWAVITDEYKVPSKKFKVLGNTDRHSIKKNLIGALLFDSGETAEATRLKRTARRRYTRRKNRICYLQEIFSNEMAKVDDSFFHRLEESFLVEEDKKHERHPIFGNIVDEVAYHEKYPTIYHLRKKLVDSTDKADLRLIYLALAHMIKFRGHFLIEGDLNPDNSDVDKLFIQLVQTYNQLFEENPINASGVDAKAILSARLSKSRRLENLIAQLPGEKKNGLFGNLIALSLGLTPNFKSNFDLAEDAKLQLSKDTYDDDLDNLLAQIGDQYADLFLAAKNLSDAILLSDILRVNTEITKAPLSASMIKRYDEHHQDLTLLKALVRQQLPEKYKEIFFDQSKNGYAGYIDGGASQEEFYKFIKPILEKMDGTEELLVKLNREDLLRKQRTFDNGSIPHQIHLGELHAILRRQEDFYPFLKDNREKIEKILTFRIPYYVGPLARGNSRFAWMTRKSEETITPWNFEEVVDKGASAQSFIERMTNFDKNLPNEKVLPKHSLLYEYFTVYNELTKVKYVTEGMRKPAFLSGEQKKAIVDLLFKTNRKVTVKQLKEDYFKKIECFDSVEISGVEDRFNASLGTYHDLLKIIKDKDFLDNEENEDILEDIVLTLTLFEDREMIEERLKTYAHLFDDKVMKQLKRRRYTGWGRLSRKLINGIRDKQSGKTILDFLKSDGFANRNFMQLIHDDSLTFKEDIQKAQVSGQGDSLHEHIANLAGSPAIKKGILQTVKVVDELVKVMGRHKPENIVIEMARENQTTQKGQKNSRERMKRIEEGIKELGSQILKEHPVENTQLQNEKLYLYYLQNGRDMYVDQELDINRLSDYDVDHIVPQSFLKDDSIDNKVLTRSDKARGKSDNVPSEEVVKKMKNYWRQLLNAKLITQRKFDNLTKAERGGLSELDKAGFIKRQLVETRQITKHVAQILDSRMNTKYDENDKLIREVKVITLKSKLVSDFRKDFQFYKVREINNYHHAHDAYLNAVVGTALIKKYPKLESEFVYGDYKVYDVRKMIAKSEQEIGKATAKYFFYSNIMNFFKTEITLANGEIRKRPLIETNGETGEIVWDKGRDFATVRKVLSMPQVNIVKKTEVQTGGFSKESILPKRNSDKLIARKKDWDPKKYGGFDSPTVAYSVLVVAKVEKGKSKKLKSVKELLGITIMERSSFEKNPIDFLEAKGYKEVKKDLIIKLPKYSLFELENGRKRMLASAGELQKGNELALPSKYVNFLYLASHYEKLKGSPEDNEQKQLFVEQHKHYLDEIIEQISEFSKRVILADANLDKVLSAYNKHRDKPIREQAENIIHLFTLTNLGAPAAFKYFDTTIDRKRYTSTKEVLDATLIHQSITGLYETRIDLSQLGGDGGGGGGSGGGGSGGGGSGGGGSGGGGSGGGGSGGTLNLEDEYRLYETSAEPEVSPGSTWLSDFPQAWAETGGMGLAVRQAPLIIPLKATSTPVSIKQYPMSQEAKLGIKPHIQRLLDQGILVPCQSPWNTPLLPVKKPGTNDYRPVQDLREVNKRVEDIHPTVPNPYNLLSGLPPSHRWYTVLDLKDAFFCLRLHPTSQPLFAFEWRDPGMGISGQLTWTRLPQGFKNSPTLFNEALHRDLADFRIQHPDLILLQYVDDILLAATSELDCQQGTRALLLTLGNLGYRASAKKAQLCQKQVKYLGYLLKEGQRWLTEARKETVMGQPTPKTPRQLREFLGKAGFCRLFIPGFAEMAAPLYPLTKPGTLFNWGPDQQKAYQEIKQALLTAPALGLPDLTKPFELFVDEKQGYAKGVLTQKLGPWRRPVAYLSKKLDPVAAGWPPCLRMVAAIAVLRKDAGKLTMGQPLVILAPHAVEALVKQPPDRWLSNARMTHYQAMLLDTDRVQFGPVVALNPATLLPLPEEGAPHDCLEILAETHGTRPDLTDQPIPDADHTWYTDGSSFLQEGQRKAGAAVTTETEVIWARALPAGTSAQRAELIALTQALKMAEGKRLNVYTDSRYAFATAHIHGEIYRRRGWLTSEGREIKNKSEILALLKALFLPKRLSIIHCLGHQKGDSAEARGNRLADQAAREAAIKTPPDTSTLLAGKRTADGSEFEKRTADGSEFESPKKKAKVE

SEQ ID NO: 6214 - protein, 2115 aa, synthetic construct
MPAAKRVKLDGGDKKYSIGLDIGTNSVGWAVITDEYKVPSKKFKVLGNTDRHSIKKNLIGALLFDSGETAEATRLKRTARRRYTRRKNRICYLQEIFSNEMAKVDDSFFHRLEESFLVEEDKKHERHPIFGNIVDEVAYHEKYPTIYHLRKKLVDSTDKADLRLIYLALAHMIKFRGHFLIEGDLNPDNSDVDKLFIQLVQTYNQLFEENPINASGVDAKAILSARLSKSRRLENLIAQLPGEKKNGLFGNLIALSLGLTPNFKSNFDLAEDAKLQLSKDTYDDDLDNLLAQIGDQYADLFLAAKNLSDAILLSDILRVNTEITKAPLSASMIKRYDEHHQDLTLLKALVRQQLPEKYKEIFFDQSKNGYAGYIDGGASQEEFYKFIKPILEKMDGTEELLVKLNREDLLRKQRTFDNGSIPHQIHLGELHAILRRQEDFYPFLKDNREKIEKILTFRIPYYVGPLARGNSRFAWMTRKSEETITPWNFEEVVDKGASAQSFIERMTNFDKNLPNEKVLPKHSLLYEYFTVYNELTKVKYVTEGMRKPAFLSGEQKKAIVDLLFKTNRKVTVKQLKEDYFKKIECFDSVEISGVEDRFNASLGTYHDLLKIIKDKDFLDNEENEDILEDIVLTLTLFEDREMIEERLKTYAHLFDDKVMKQLKRRRYTGWGRLSRKLINGIRDKQSGKTILDFLKSDGFANRNFMQLIHDDSLTFKEDIQKAQVSGQGDSLHEHIANLAGSPAIKKGILQTVKVVDELVKVMGRHKPENIVIEMARENQTTQKGQKNSRERMKRIEEGIKELGSQILKEHPVENTQLQNEKLYLYYLQNGRDMYVDQELDINRLSDYDVDHIVPQSFLKDDSIDNKVLTRSDKARGKSDNVPSEEVVKKMKNYWRQLLNAKLITQRKFDNLTKAERGGLSELDKAGFIKRQLVETRQITKHVAQILDSRMNTKYDENDKLIREVKVITLKSKLVSDFRKDFQFYKVREINNYHHAHDAYLNAVVGTALIKKYPKLESEFVYGDYKVYDVRKMIAKSEQEIGKATAKYFFYSNIMNFFKTEITLANGEIRKRPLIETNGETGEIVWDKGRDFATVRKVLSMPQVNIVKKTEVQTGGFSKESILPKRNSDKLIARKKDWDPKKYGGFDSPTVAYSVLVVAKVEKGKSKKLKSVKELLGITIMERSSFEKNPIDFLEAKGYKEVKKDLIIKLPKYSLFELENGRKRMLASAGELQKGNELALPSKYVNFLYLASHYEKLKGSPEDNEQKQLFVEQHKHYLDEIIEQISEFSKRVILADANLDKVLSAYNKHRDKPIREQAENIIHLFTLTNLGAPAAFKYFDTTIDRKRYTSTKEVLDATLIHQSITGLYETRIDLSQLGGDGGGGGGSGGGGSGGGGSGGGGSGGGGSGGGGSGGTLNIEDEYRLHETSKGPDVPLGSTWLSDFPQAWAETGGMGLAVRQAPLIIPLKATSTPVSIKQYPMSQEARLGIKPHIQRLLDQGILVPCQSPWNTPLLPVKKPGTNDYRPVQDLREVNKRVEDIHPTVPNPYNLLSGLPPSHQWYTVLDLKDAFFCLRLHPTSQSLFAFEWRDPEMGISGQLTWTRLPQGFKNSPTLFNEALHRDLADFRIQHPDLILLQYVDDLLLAATSELDCQQGTRALLQTLGDLGYRASAKKAQICQKQVKYLGYLLKEGQRWLTEARKETVMGQPTPKTPRQLREFLGTAGFCRLWIPGFAEMAAPLYPLTKPGTLFEWGPDQQKAYQEIKQALLTAPALGLPDLTKPFELFVDEKQGYAKGVLTQKLGPWRRPVAYLSKKLDPVAAGWPPCLRMVAAIAVLTKDAGKLTMGQPLVILAPHAVEALVKQPPDRWLSNARMTHYQALLLDTDRVQFGPIVALNPATLLPLPEEGLQHDCLDILAEAHGTRPDLTDQPLPDADHTWYTDGSSFLQEGQRKAGAAVTTETEVVWAKALPAGTSAQRAELIALTQALKMAEGKKLNVYTDSRYAFATAHIHGEIYRRRGWLTSEGKEIKNKDEILALLKALFLPKRLSIIHCPGHQKGNRAEARGNRMADQAAREVATRETPETSTLLAGKRTADGSEFEKRTADGSEFESPKKKAKVE

SEQ ID NO: 6215 - protein, 2115 aa, synthetic construct
MPAAKRVKLDGGDKKYSIGLDIGTNSVGWAVITDEYKVPSKKFKVLGNTDRHSIKKNLIGALLFDSGETAEATRLKRTARRRYTRRKNRICYLQEIFSNEMAKVDDSFFHRLEESFLVEEDKKHERHPIFGNIVDEVAYHEKYPTIYHLRKKLVDSTDKADLRLIYLALAHMIKFRGHFLIEGDLNPDNSDVDKLFIQLVQTYNQLFEENPINASGVDAKAILSARLSKSRRLENLIAQLPGEKKNGLFGNLIALSLGLTPNFKSNFDLAEDAKLQLSKDTYDDDLDNLLAQIGDQYADLFLAAKNLSDAILLSDILRVNTEITKAPLSASMIKRYDEHHQDLTLLKALVRQQLPEKYKEIFFDQSKNGYAGYIDGGASQEEFYKFIKPILEKMDGTEELLVKLNREDLLRKQRTFDNGSIPHQIHLGELHAILRRQEDFYPFLKDNREKIEKILTFRIPYYVGPLARGNSRFAWMTRKSEETITPWNFEEVVDKGASAQSFIERMTNFDKNLPNEKVLPKHSLLYEYFTVYNELTKVKYVTEGMRKPAFLSGEQKKAIVDLLFKTNRKVTVKQLKEDYFKKIECFDSVEISGVEDRFNASLGTYHDLLKIIKDKDFLDNEENEDILEDIVLTLTLFEDREMIEERLKTYAHLFDDKVMKQLKRRRYTGWGRLSRKLINGIRDKQSGKTILDFLKSDGFANRNFMQLIHDDSLTFKEDIQKAQVSGQGDSLHEHIANLAGSPAIKKGILQTVKVVDELVKVMGRHKPENIVIEMARENQTTQKGQKNSRERMKRIEEGIKELGSQILKEHPVENTQLQNEKLYLYYLQNGRDMYVDQELDINRLSDYDVDHIVPQSFLKDDSIDNKVLTRSDKARGKSDNVPSEEVVKKMKNYWRQLLNAKLITQRKFDNLTKAERGGLSELDKAGFIKRQLVETRQITKHVAQILDSRMNTKYDENDKLIREVKVITLKSKLVSDFRKDFQFYKVREINNYHHAHDAYLNAVVGTALIKKYPKLESEFVYGDYKVYDVRKMIAKSEQEIGKATAKYFFYSNIMNFFKTEITLANGEIRKRPLIETNGETGEIVWDKGRDFATVRKVLSMPQVNIVKKTEVQTGGFSKESILPKRNSDKLIARKKDWDPKKYGGFDSPTVAYSVLVVAKVEKGKSKKLKSVKELLGITIMERSSFEKNPIDFLEAKGYKEVKKDLIIKLPKYSLFELENGRKRMLASAGELQKGNELALPSKYVNFLYLASHYEKLKGSPEDNEQKQLFVEQHKHYLDEIIEQISEFSKRVILADANLDKVLSAYNKHRDKPIREQAENIIHLFTLTNLGAPAAFKYFDTTIDRKRYTSTKEVLDATLIHQSITGLYETRIDLSQLGGDGGGGGGSGGGGSGGGGSGGGGSGGGGSGGGGSGGTLNIEDEHRLHETSKEPDVSLGSTWLSDFPQAWAETGGMGLAVRQAPLIIPLKATSTPVSIKQYPMSQEARLGIKPHIQRLLDQGILVPCQSPWNTPLLPVKKPGTNDYRPVQDLREVNKRVEDIHPTVPNPYNLLSGLPPSHQWYTVLDLKDAFFCLRLHPTSQPLFAFEWRDPEMGISGQLTWTRLPQGFKNSPTLFDEALHRDLADFRIQHPDLILLQYVDDLLLAATSELDCQQGTRALLQTLGNLGYRASAKKAQICQKQVKYLGYLLKEGQRWLTEARKETVMGQPTPKTPRQLREFLGTAGFCRLWIPGFAEMAAPLYPLTKTGTLFNWGPDQQKAYQEIKQALLTAPALGLPDLTKPFELFVDEKQGYAKGVLTQKLGPWRRPVAYLSKKLDPVAAGWPPCLRMVAAIAVLTKDAGKLTMGQPLVILAPHAVEALVKQPPDRWLSNARMTHYQALLLDTDRVQFGPVVALNPATLLPLPEEGLQHNCLDILAEAHGTRPDLTDQPLPDADHTWYTDGSSLLQEGQRKAGAAVTTETEVIWAKALPAGTSAQRAELIALTQALKMAEGKKLNVYTDSRYAFATAHIHGEIYRRRGLLTSEGKEIKNKDEILALLKALFLPKRLSIIHCPGHQKGHSAEARGNRMADQAARKAAITETPDTSTLLAGKRTADGSEFEKRTADGSEFESPKKKAKVE

SEQ ID NO: 6216 - protein, 2115 aa, synthetic construct; identical to SEQ ID NO: 6215

SEQ ID NO: 6217 - protein, 2115 aa, synthetic construct
MPAAKRVKLDGGDKKYSIGLDIGTNSVGWAVITDEYKVPSKKFKVLGNTDRHSIKKNLIGALLFDSGETAEATRLKRTARRRYTRRKNRICYLQEIFSNEMAKVDDSFFHRLEESFLVEEDKKHERHPIFGNIVDEVAYHEKYPTIYHLRKKLVDSTDKADLRLIYLALAHMIKFRGHFLIEGDLNPDNSDVDKLFIQLVQTYNQLFEENPINASGVDAKAILSARLSKSRRLENLIAQLPGEKKNGLFGNLIALSLGLTPNFKSNFDLAEDAKLQLSKDTYDDDLDNLLAQIGDQYADLFLAAKNLSDAILLSDILRVNTEITKAPLSASMIKRYDEHHQDLTLLKALVRQQLPEKYKEIFFDQSKNGYAGYIDGGASQEEFYKFIKPILEKMDGTEELLVKLNREDLLRKQRTFDNGSIPHQIHLGELHAILRRQEDFYPFLKDNREKIEKILTFRIPYYVGPLARGNSRFAWMTRKSEETITPWNFEEVVDKGASAQSFIERMTNFDKNLPNEKVLPKHSLLYEYFTVYNELTKVKYVTEGMRKPAFLSGEQKKAIVDLLFKTNRKVTVKQLKEDYFKKIECFDSVEISGVEDRFNASLGTYHDLLKIIKDKDFLDNEENEDILEDIVLTLTLFEDREMIEERLKTYAHLFDDKVMKQLKRRRYTGWGRLSRKLINGIRDKQSGKTILDFLKSDGFANRNFMQLIHDDSLTFKEDIQKAQVSGQGDSLHEHIANLAGSPAIKKGILQTVKVVDELVKVMGRHKPENIVIEMARENQTTQKGQKNSRERMKRIEEGIKELGSQILKEHPVENTQLQNEKLYLYYLQNGRDMYVDQELDINRLSDYDVDHIVPQSFLKDDSIDNKVLTRSDKARGKSDNVPSEEVVKKMKNYWRQLLNAKLITQRKFDNLTKAERGGLSELDKAGFIKRQLVETRQITKHVAQILDSRMNTKYDENDKLIREVKVITLKSKLVSDFRKDFQFYKVREINNYHHAHDAYLNAVVGTALIKKYPKLESEFVYGDYKVYDVRKMIAKSEQEIGKATAKYFFYSNIMNFFKTEITLANGEIRKRPLIETNGETGEIVWDKGRDFATVRKVLSMPQVNIVKKTEVQTGGFSKESILPKRNSDKLIARKKDWDPKKYGGFDSPTVAYSVLVVAKVEKGKSKKLKSVKELLGITIMERSSFEKNPIDFLEAKGYKEVKKDLIIKLPKYSLFELENGRKRMLASAGELQKGNELALPSKYVNFLYLASHYEKLKGSPEDNEQKQLFVEQHKHYLDEIIEQISEFSKRVILADANLDKVLSAYNKHRDKPIREQAENIIHLFTLTNLGAPAAFKYFDTTIDRKRYTSTKEVLDATLIHQSITGLYETRIDLSQLGGDGGGGGGSGGGGSGGGGSGGGGSGGGGSGGGGSGGTLNIEDEYRLHEISTEPDVSPGSTWLSDFPQAWAETGGMGLAVRQAPLIIPLKATSTPVSIKQYPMSQEAKLGIKPHIQRLLDQGILVPCQSPWNTPLLPVKKPGTNDYRPVQGLREVNKRVEDIHPTVPNPYNLLSGLPTSHRWYTVLDLKDAFFCLRLHPTSQPLFASEWRDPGMGISGQLTWTRLPQGFKNSPTLFNEALHRGLADFRIQHPDLILLQYVDDLLLAATSELDCQQGTRALLKTLGNLGYRASAKKAQICQKQVKYLGYLLREGQRWLTEARKETVMGQPTPKTPRQLREFLGTAGFCRLWIPRFAEMAAPLYPLTKPGTLFNWGPDQQKAYHEIKQALLTAPALGLPDLTKPFELFVDEKQGYAKGVLTQKLGPWRRPVAYLSKKLDPVAAGWPPCLRMVAAIAVLTKDAGKLTMGQPLVILAPHAVEALVKQPPDRWLSNARMTHYQAMLLDTDRVQFGPVVALNPATLLPLPEEGAPHDCLEILAETHGTEPDLTDQPIPDADHTWYTDGSSFLQEGQRKAGAAVTTETEVIWARALPAGTSAQRAELIALTQALKMAEGKRLNVYTDSRYAFATAHIHGEIYKRRGWLTSEGREIKNKSEILALLKALFLPKRLSIIHCLGHQKGDSAEARGNRLADQAAREAAIKTPPDTSTLLAGKRTADGSEFEKRTADGSEFESPKKKAKVE

SEQ ID NO: 6218 - protein, 2109 aa, synthetic construct
MPAAKRVKLDGGDKKYSIGLDIGTNSVGWAVITDEYKVPSKKFKVLGNTDRHSIKKNLIGALLFDSGETAEATRLKRTARRRYTRRKNRICYLQEIFSNEMAKVDDSFFHRLEESFLVEEDKKHERHPIFGNIVDEVAYHEKYPTIYHLRKKLVDSTDKADLRLIYLALAHMIKFRGHFLIEGDLNPDNSDVDKLFIQLVQTYNQLFEENPINASGVDAKAILSARLSKSRRLENLIAQLPGEKKNGLFGNLIALSLGLTPNFKSNFDLAEDAKLQLSKDTYDDDLDNLLAQIGDQYADLFLAAKNLSDAILLSDILRVNTEITKAPLSASMIKRYDEHHQDLTLLKALVRQQLPEKYKEIFFDQSKNGYAGYIDGGASQEEFYKFIKPILEKMDGTEELLVKLNREDLLRKQRTFDNGSIPHQIHLGELHAILRRQEDFYPFLKDNREKIEKILTFRIPYYVGPLARGNSRFAWMTRKSEETITPWNFEEVVDKGASAQSFIERMTNFDKNLPNEKVLPKHSLLYEYFTVYNELTKVKYVTEGMRKPAFLSGEQKKAIVDLLFKTNRKVTVKQLKEDYFKKIECFDSVEISGVEDRFNASLGTYHDLLKIIKDKDFLDNEENEDILEDIVLTLTLFEDREMIEERLKTYAHLFDDKVMKQLKRRRYTGWGRLSRKLINGIRDKQSGKTILDFLKSDGFANRNFMQLIHDDSLTFKEDIQKAQVSGQGDSLHEHIANLAGSPAIKKGILQTVKVVDELVKVMGRHKPENIVIEMARENQTTQKGQKNSRERMKRIEEGIKELGSQILKEHPVENTQLQNEKLYLYYLQNGRDMYVDQELDINRLSDYDVDHIVPQSFLKDDSIDNKVLTRSDKARGKSDNVPSEEVVKKMKNYWRQLLNAKLITQRKFDNLTKAERGGLSELDKAGFIKRQLVETRQITKHVAQILDSRMNTKYDENDKLIREVKVITLKSKLVSDFRKDFQFYKVREINNYHHAHDAYLNAVVGTALIKKYPKLESEFVYGDYKVYDVRKMIAKSEQEIGKATAKYFFYSNIMNFFKTEITLANGEIRKRPLIETNGETGEIVWDKGRDFATVRKVLSMPQVNIVKKTEVQTGGFSKESILPKRNSDKLIARKKDWDPKKYGGFDSPTVAYSVLVVAKVEKGKSKKLKSVKELLGITIMERSSFEKNPIDFLEAKGYKEVKKDLIIKLPKYSLFELENGRKRMLASAGELQKGNELALPSKYVNFLYLASHYEKLKGSPEDNEQKQLFVEQHKHYLDEIIEQISEFSKRVILADANLDKVLSAYNKHRDKPIREQAENIIHLFTLTNLGAPAAFKYFDTTIDRKRYTSTKEVLDATLIHQSITGLYETRIDLSQLGGDGGGGGGSGGGGSGGGGSGGGGSGGGGSGGGGSGGTLQLDDEYRLYSPLVKPDQNIQFWLEQFPQAWAETAGMGLAKQVPPQVIQLKASATPVSVRQYPLSKEAQEGIRPHVQRLIQQGILVPVQSPWNTPLLPVRKPGTNDYRPVQDLREVNKRVQDIHPTVPNPYNLLCALPPQRSWYTVLDLKDAFFCLRLHPTSQPLFAFEWRDPGTGRTGQLTWTRLPQGFKNSPTIFDEALHRDLANFRIQHPQVTLLQYVDDLLLAGATKQDCLEGTKALLLELSDLGYRASAKKAQICRREVTYLGYSLRDGQRWLTEARKKTVVQIPAPTTAKQVREFLGTAGFCRLWIPGFATLAAPLYPLTKEKGEFSWAPEHQKAFDAIKKALLSAPALALPDVTKPFTLYVDERKGVARGVLTQTLGPWRRPVAYLSKKLDPVASGWPVCLKAIAAVAILVKDADKLTLGQNITVIAPHALENIVRQPPDRWMTNARMTHYQSLLLTERVTFAPPAALNPATLLPEETDEPVTHDCHQLLIEETGVRKDLTDIPLTGEVLTWFTDGSSYVVEGKRMAGAAVVDGTRTIWASSLPEGTSAQKAELMALTQALRLAEGKSINIYTDSRYAFATAHVHGAIYKQRGLLTSAGREIKNKEEILSLLEALHLPKRLAIIHCPGHQKAKDPISRGNQMADRVAKQAAQGVNLLAGKRTADGSEFEKRTADGSEFESPKKKAKVE

SEQ ID NO: 6219 - protein, 2109 aa, synthetic construct
MPAAKRVKLDGGDKKYSIGLDIGTNSVGWAVITDEYKVPSKKFKVLGNTDRHSIKKNLIGALLFDSGETAEATRLKRTARRRYTRRKNRICYLQEIFSNEMAKVDDSFFHRLEESFLVEEDKKHERHPIFGNIVDEVAYHEKYPTIYHLRKKLVDSTDKADLRLIYLALAHMIKFRGHFLIEGDLNPDNSDVDKLFIQLVQTYNQLFEENPINASGVDAKAILSARLSKSRRLENLIAQLPGEKKNGLFGNLIALSLGLTPNFKSNFDLAEDAKLQLSKDTYDDDLDNLLAQIGDQYADLFLAAKNLSDAILLSDILRVNTEITKAPLSASMIKRYDEHHQDLTLLKALVRQQLPEKYKEIFFDQSKNGYAGYIDGGASQEEFYKFIKPILEKMDGTEELLVKLNREDLLRKQRTFDNGSIPHQIHLGELHAILRRQEDFYPFLKDNREKIEKILTFRIPYYVGPLARGNSRFAWMTRKSEETITPWNFEEVVDKGASAQSFIERMTNFDKNLPNEKVLPKHSLLYEYFTVYNELTKVKYVTEGMRKPAFLSGEQKKAIVDLLFKTNRKVTVKQLKEDYFKKIECFDSVEISGVEDRFNASLGTYHDLLKIIKDKDFLDNEENEDILEDIVLTLTLFEDREMIEERLKTYAHLFDDKVMKQLKRRRYTGWGRLSRKLINGIRDKQSGKTILDFLKSDGFANRNFMQLIHDDSLTFKEDIQKAQVSGQGDSLHEHIANLAGSPAIKKGILQTVKVVDELVKVMGRHKPENIVIEMARENQTTQKGQKNSRERMKRIEEGIKELGSQILKEHPVENTQLQNEKLYLYYLQNGRDMYVDQELDINRLSDYDVDHIVPQSFLKDDSIDNKVLTRSDKARGKSDNVPSEEVVKKMKNYWRQLLNAKLITQRKFDNLTKAERGGLSELDKAGFIKRQLVETRQITKHVAQILDSRMNTKYDENDKLIREVKVITLKSKLVSDFRKDFQFYKVREINNYHHAHDAYLNAVVGTALIKKYPKLESEFVYGDYKVYDVRKMIAKSEQEIGKATAKYFFYSNIMNFFKTEITLANGEIRKRPLIETNGETGEIVWDKGRDFATVRKVLSMPQVNIVKKTEVQTGGFSKESILPKRNSDKLIARKKDWDPKKYGGFDSPTVAYSVLVVAKVEKGKSKKLKSVKELLGITIMERSSFEKNPIDFLEAKGYKEVKKDLIIKLPKYSLFELENGRKRMLASAGELQKGNELALPSKYVNFLYLASHYEKLKGSPEDNEQKQLFVEQHKHYLDEIIEQISEFSKRVILADANLDKVLSAYNKHRDKPIREQAENIIHLFTLTNLGAPAAFKYFDTTIDRKRYTSTKEVLDATLIHQSITGLYETRIDLSQLGGDGGGGGGSGGGGSGGGGSGGGGSGGGGSGGGGSGGTLQLDDEYRLYSPLVKPDQNIQFWLEQFPQAWAETAGMGLAKQVPPQVIQLKASATPVSVRQYPLSKEAQEGIRPHVQRLIQQGILVPVQSPWNTPLLPVRKPGTNDYRPVQDLREVNKRVQDIHPTVPNPYNLLCALPPQRSWYTVLDLKDAFFCLRLHPTSQPLFAFEWRDPGTGRTGQLTWTRLPQGFKNSPTIFNEALHRDLANFRIQHPQVTLLQYVDDLLLAGATKQDCLEGTKALLLELSDLGYRASAKKAQICRREVTYLGYSLRDGQRWLTEARKKTVVQIPAPTTAKQVREFLGTAGFCRLWIPGFATLAAPLYPLTKPKGEFSWAPEHQKAFDAIKKALLSAPALALPDVTKPFTLYVDERKGVARGVLTQTLGPWRRPVAYLSKKLDPVASGWPVCLKAIAAVAILVKDADKLTLGQNITVIAPHALENIVRQPPDRWMTNARMTHYQSLLLTERVTFAPPAALNPATLLPEETDEPVTHDCHQLLIEETGVRKDLTDIPLTGEVLTWFTDGSSYVVEGKRMAGAAVVDGTRTIWASSLPEGTSAQKAELMALTQALRLAEGKSINIYTDSRYAFATAHVHGAIYKQRGWLTSAGREIKNKEEILSLLEALHLPKRLAIIHCPGHQKAKDPISRGNQMADRVAKQAAQGVNLLAGKRTADGSEFEKRTADGSEFESPKKKAKVE

SEQ ID NO: 6220 - protein, 2106 aa, synthetic construct
MPAAKRVKLDGGDKKYSIGLDIGTNSVGWAVITDEYKVPSKKFKVLGNTDRHSIKKNLIGALLFDSGETAEATRLKRTARRRYTRRKNRICYLQEIFSNEMAKVDDSFFHRLEESFLVEEDKKHERHPIFGNIVDEVAYHEKYPTIYHLRKKLVDSTDKADLRLIYLALAHMIKFRGHFLIEGDLNPDNSDVDKLFIQLVQTYNQLFEENPINASGVDAKAILSARLSKSRRLENLIAQLPGEKKNGLFGNLIALSLGLTPNFKSNFDLAEDAKLQLSKDTYDDDLDNLLAQIGDQYADLFLAAKNLSDAILLSDILRVNTEITKAPLSASMIKRYDEHHQDLTLLKALVRQQLPEKYKEIFFDQSKNGYAGYIDGGASQEEFYKFIKPILEKMDGTEELLVKLNREDLLRKQRTFDNGSIPHQIHLGELHAILRRQEDFYPFLKDNREKIEKILTFRIPYYVGPLARGNSRFAWMTRKSEETITPWNFEEVVDKGASAQSFIERMTNFDKNLPNEKVLPKHSLLYEYFTVYNELTKVKYVTEGMRKPAFLSGEQKKAIVDLLFKTNRKVTVKQLKEDYFKKIECFDSVEISGVEDRFNASLGTYHDLLKIIKDKDFLDNEENEDILEDIVLTLTLFEDREMIEERLKTYAHLFDDKVMKQLKRRRYTGWGRLSRKLINGIRDKQSGKTILDFLKSDGFANRNFMQLIHDDSLTFKEDIQKAQVSGQGDSLHEHIANLAGSPAIKKGILQTVKVVDELVKVMGRHKPENIVIEMARENQTTQKGQKNSRERMKRIEEGIKELGSQILKEHPVENTQLQNEKLYLYYLQNGRDMYVDQELDINRLSDYDVDHIVPQSFLKDDSIDNKVLTRSDKARGKSDNVPSEEVVKKMKNYWRQLLNAKLITQRKFDNLTKAERGGLSELDKAGFIKRQLVETRQITKHVAQILDSRMNTKYDENDKLIREVKVITLKSKLVSDFRKDFQFYKVREINNYHHAHDAYLNAVVGTALIKKYPKLESEFVYGDYKVYDVRKMIAKSEQEIGKATAKYFFYSNIMNFFKTEITLANGEIRKRPLIETNGETGEIVWDKGRDFATVRKVLSMPQVNIVKKTEVQTGGFSKESILPKRNSDKLIARKKDWDPKKYGGFDSPTVAYSVLVVAKVEKGKSKKLKSVKELLGITIMERSSFEKNPIDFLEAKGYKEVKKDLIIKLPKYSLFELENGRKRMLASAGELQKGNELALPSKYVNFLYLASHYEKLKGSPEDNEQKQLFVEQHKHYLDEIIEQISEFSKRVILADANLDKVLSAYNKHRDKPIREQAENIIHLFTLTNLGAPAAFKYFDTTIDRKRYTSTKEVLDATLIHQSITGLYETRIDLSQLGGDGGGGGGSGGGGSGGGGSGGGGSGGGGSGGGGSGGVPWLMKKPLQLTVLVPLHEYQERLLQQTALPKEQKELLQKLFLKYDALWQHWENQVGHRRIKPHNIATGTLAPRPQKQYPINPKAKPSIQIVIDDLLKQGVLIQQNSTMNTPVYPVPKPDGKWRMVLDYREVNKTIPLIAAQNQHSAGILSSIYRGKYKTTLDLTNGFWAHPITPESYWLTAFTWQGKQYCWTRLPQGFLNSPALFNADVVDLLKEIPNVQAYVDDIYISHDDPQEHLEQLEKIFSILLNAGYVVSLKKSEIAQREVEFLGFNITKEGRGLTDTFKQKLLNITPPKDLKQLQSILGKLNFARNFIPNYSELVKPLYTIVAPANGKFISWTEDNSNQLQHIISVLNQADNLEERNPETRLIIKVNSSPSAGYIRYYNEGSKRPIMYVNYIFSKAEAKFTQTEKLLTTMHKGLIKAMDLAMGQEILVYSPIVSMTKIQRTPLPERKALPVRWITWMTYLEDPRIQFHYDKSLPELQQIPNVTEDVIAKTKHPSEFAMVFYTDGSAIKHPDVNKSHSAGMGIAQVQFIPEYKIVHQWSIPLGDHTAQLAEIAAVEFACKKALKISGPVLIVTDSFYVAESANKELPYWKSNGFLNNKKKPLRHVSKWKSIAECLQLKPDIIIMHEKGHQQPMTTLHTEGNNLADKLATQGSYVVHAGKRTADGSEFEKRTADGSEFESPKKKAKVE

SEQ ID NO: 6221 - protein, 2195 aa, synthetic construct
MPAAKRVKLDGGDKKYSIGLDIGTNSVGWAVITDEYKVPSKKFKVLGNTDRHSIKKNLIGALLFDSGETAEATRLKRTARRRYTRRKNRICYLQEIFSNEMAKVDDSFFHRLEESFLVEEDKKHERHPIFGNIVDEVAYHEKYPTIYHLRKKLVDSTDKADLRLIYLALAHMIKFRGHFLIEGDLNPDNSDVDKLFIQLVQTYNQLFEENPINASGVDAKAILSARLSKSRRLENLIAQLPGEKKNGLFGNLIALSLGLTPNFKSNFDLAEDAKLQLSKDTYDDDLDNLLAQIGDQYADLFLAAKNLSDAILLSDILRVNTEITKAPLSASMIKRYDEHHQDLTLLKALVRQQLPEKYKEIFFDQSKNGYAGYIDGGASQEEFYKFIKPILEKMDGTEELLVKLNREDLLRKQRTFDNGSIPHQIHLGELHAILRRQEDFYPFLKDNREKIEKILTFRIPYYVGPLARGNSRFAWMTRKSEETITPWNFEEVVDKGASAQSFIERMTNFDKNLPNEKVLPKHSLLYEYFTVYNELTKVKYVTEGMRKPAFLSGEQKKAIVDLLFKTNRKVTVKQLKEDYFKKIECFDSVEISGVEDRFNASLGTYHDLLKIIKDKDFLDNEENEDILEDIVLTLTLFEDREMIEERLKTYAHLFDDKVMKQLKRRRYTGWGRLSRKLINGIRDKQSGKTILDFLKSDGFANRNFMQLIHDDSLTFKEDIQKAQVSGQGDSLHEHIANLAGSPAIKKGILQTVKVVDELVKVMGRHKPENIVIEMARENQTTQKGQKNSRERMKRIEEGIKELGSQILKEHPVENTQLQNEKLYLYYLQNGRDMYVDQELDINRLSDYDVDHIVPQSFLKDDSIDNKVLTRSDKARGKSDNVPSEEVVKKMKNYWRQLLNAKLITQRKFDNLTKAERGGLSELDKAGFIKRQLVETRQITKHVAQILDSRMNTKYDENDKLIREVKVITLKSKLVSDFRKDFQFYKVREINNYHHAHDAYLNAVVGTALIKKYPKLESEFVYGDYKVYDVRKMIAKSEQEIGKATAKYFFYSNIMNFFKTEITLANGEIRKRPLIETNGETGEIVWDKGRDFATVRKVLSMPQVNIVKKTEVQTGGFSKESILPKRNSDKLIARKKDWDPKKYGGFDSPTVAYSVLVVAKVEKGKSKKLKSVKELLGITIMERSSFEKNPIDFLEAKGYKEVKKDLIIKLPKYSLFELENGRKRMLASAGELQKGNELALPSKYVNFLYLASHYEKLKGSPEDNEQKQLFVEQHKHYLDEIIEQISEFSKRVILADANLDKVLSAYNKHRDKPIREQAENIIHLFTLTNLGAPAAFKYFDTTIDRKRYTSTKEVLDATLIHQSITGLYETRIDLSQLGGDGGGGGGSGGGGSGGGGSGGGGSGGGGSGGGGSGGMDPLQLLQPLEAEIKGTKLKAHWNSGATITCVPEAFLEDERPIQTMLIKTIHGEKQQDVYYLTFKVQGRKVEAEVLASPYDYILLNPSDVPWLMKKPLQLTVLVPLHEYQERLLQQTALPKEQKELLQKLFLKYDALWQHWENQVGHRRIKPHNIATGTLAPRPQKQYPINPKAKPSIQIVIDDLLKQGVLIQQNSTMNTPVYPVPKPDGKWRMVLDYREVNKTIPLIAAQNQHSAGILSSIYRGKYKTTLDLTNGFWAHPITPESYWLTAFTWQGKQYCWTRLPQGFLNSPALFNADVVDLLKEIPNVQAYVDDIYISHDDPQEHLEQLEKIFSILLNAGYVVSLKKSEIAQREVEFLGFNITKEGRGLTDTFKQKLLNITPPKDLKQLQSILGLLNFARNFIPNYSELVKPLYTIVAPANGKFISWTEDNSNQLQHIISVLNQADNLEERNPETRLIIKVNSSPSAGYIRYYNEGSKRPIMYVNYIFSKAEAKFTQTEKLLTTMHKGLIKAMDLAMGQEILVYSPIVSMTKIQRTPLPERKALPVRWITWMTYLEDPRIQFHYDKSLPELQQIPNVTEDVIAKTKHPSEFAMVFYTDGSAIKHPDVNKSHSAGMGIAQVQFIPEYKIVHQWSIPLGDHTAQLAEIAAVEFACKKALKISGPVLIVTDSFYVAESANKELPYWKSNGFLNNKKKPLRHVSKWKSIAECLQLKPDIIIMHEKGHQQPMTTLHTEGNNLADKLATQGSYVVHAGKRTADGSEFEKRTADGSEFESPKKKAKVE

SEQ ID NO: 6222 - protein, 2195 aa, synthetic construct
MPAAKRVKLDGGDKKYSIGLDIGTNSVGWAVITDEYKVPSKKFKVLGNTDRHSIKKNLIGALLFDSGETAEATRLKRTARRRYTRRKNRICYLQEIFSNEMAKVDDSFFHRLEESFLVEEDKKHERHPIFGNIVDEVAYHEKYPTIYHLRKKLVDSTDKADLRLIYLALAHMIKFRGHFLIEGDLNPDNSDVDKLFIQLVQTYNQLFEENPINASGVDAKAILSARLSKSRRLENLIAQLPGEKKNGLFGNLIALSLGLTPNFKSNFDLAEDAKLQLSKDTYDDDLDNLLAQIGDQYADLFLAAKNLSDAILLSDILRVNTEITKAPLSASMIKRYDEHHQDLTLLKALVRQQLPEKYKEIFFDQSKNGYAGYIDGGASQEEFYKFIKPILEKMDGTEELLVKLNREDLLRKQRTFDNGSIPHQIHLGELHAILRRQEDFYPFLKDNREKIEKILTFRIPYYVGPLARGNSRFAWMTRKSEETITPWNFEEVVDKGASAQSFIERMTNFDKNLPNEKVLPKHSLLYEYFTVYNELTKVKYVTEGMRKPAFLSGEQKKAIVDLLFKTNRKVTVKQLKEDYFKKIECFDSVEISGVEDRFNASLGTYHDLLKIIKDKDFLDNEENEDILEDIVLTLTLFEDREMIEERLKTYAHLFDDKVMKQLKRRRYTGWGRLSRKLINGIRDKQSGKTILDFLKSDGFANRNFMQLIHDDSLTFKEDIQKAQVSGQGDSLHEHIANLAGSPAIKKGILQTVKVVDELVKVMGRHKPENIVIEMARENQTTQKGQKNSRERMKRIEEGIKELGSQILKEHPVENTQLQNEKLYLYYLQNGRDMYVDQELDINRLSDYDVDHIVPQSFLKDDSIDNKVLTRSDKARGKSDNVPSEEVVKKMKNYWRQLLNAKLITQRKFDNLTKAERGGLSELDKAGFIKRQLVETRQITKHVAQILDSRMNTKYDENDKLIREVKVITLKSKLVSDFRKDFQFYKVREINNYHHAHDAYLNAVVGTALIKKYPKLESEFVYGDYKVYDVRKMIAKSEQEIGKATAKYFFYSNIMNFFKTEITLANGEIRKRPLIETNGETGEIVWDKGRDFATVRKVLSMPQVNIVKKTEVQTGGFSKESILPKRNSDKLIARKKDWDPKKYGGFDSPTVAYSVLVVAKVEKGKSKKLKSVKELLGITIMERSSFEKNPIDFLEAKGYKEVKKDLIIKLPKYSLFELENGRKRMLASAGELQKGNELALPSKYVNFLYLASHYEKLKGSPEDNEQKQLFVEQHKHYLDEIIEQISEFSKRVILADANLDKVLSAYNKHRDKPIREQAENIIHLFTLTNLGAPAAFKYFDTTIDRKRYTSTKEVLDATLIHQSITGLYETRIDLSQLGGDGGGGGGSGGGGSGGGGSGGGGSGGGGSGGGGSGGMDPLQLLQPLEAEIKGTKLKAHWNSGATITCVPQAFLEEEVPIKNIWIKTIHGEKEQPVYYLTFKIQGRKVEAEVISSPYDYILVSPSDIPWLMKKPLQLTTLVPLQEYEERLLKQTMLTGSYKEKLQSLFLKYDALWQHWENQVGHRRIKPHHIATGTVNPRPQKQYPINPKAKASIQTVINDLLKQGVLIQQNSIMNTPVYPVPKPDGKWRMVLDYREVNKTIPLIAAQNQHSAGILSSIFRGKYKTTLDLSNGFWAHSITPESYWLTAFTWLGQQYCWTRLPQGFLNSPALFTADVVDLLKEVPNVQVYVDDIYISHDDPREHLEQLEKVFSLLLNAGYVVSLKKSEIAQHEVEFLGFNITKEGRGLTETFKQKLLNITPPRDLKQLQSILGLLNFARNFIPNFSELVKPLYNIIATANGKYITWTTDNSQQLQNIISMLNSAENLEERNPEVRLIMKVNTSPSAGYIRFYNEFAKRPIMYLNYVYTKAEVKFTNTEKLLTTIHKGLIKALDLGMGQEILVYSPIVSMTKIQKTPLPERKALPIRWITWMSYLEDPRIQFHYDKTLPELQQVPTVTDDIIAKIKHPSEFSMVFYTDGSAIKHPNVNKSHNAGMGIAQVQFKPEFTVINTWSIPLGDHTAQLAEVAAVEFACKKALKIDGPVLIVTDSFYVAESVNKELPYWQSNGFFNNKKKPLKHVSKWKSIADCIQLKPDIIIIHEKGHQPTASTFHTEGNNLADKLATQGSYVVNAGKRTADGSEFEKRTADGSEFESPKKKAKVE

SEQ ID NO: 6223 - protein, 2106 aa, synthetic construct
MPAAKRVKLDGGDKKYSIGLDIGTNSVGWAVITDEYKVPSKKFKVLGNTDRHSIKKNLIGALLFDSGETAEATRLKRTARRRYTRRKNRICYLQEIFSNEMAKVDDSFFHRLEESFLVEEDKKHERHPIFGNIVDEVAYHEKYPTIYHLRKKLVDSTDKADLRLIYLALAHMIKFRGHFLIEGDLNPDNSDVDKLFIQLVQTYNQLFEENPINASGVDAKAILSARLSKSRRLENLIAQLPGEKKNGLFGNLIALSLGLTPNFKSNFDLAEDAKLQLSKDTYDDDLDNLLAQIGDQYADLFLAAKNLSDAILLSDILRVNTEITKAPLSASMIKRYDEHHQDLTLLKALVRQQLPEKYKEIFFDQSKNGYAGYIDGGASQEEFYKFIKPILEKMDGTEELLVKLNREDLLRKQRTFDNGSIPHQIHLGELHAILRRQEDFYPFLKDNREKIEKILTFRIPYYVGPLARGNSRFAWMTRKSEETITPWNFEEVVDKGASAQSFIERMTNFDKNLPNEKVLPKHSLLYEYFTVYNELTKVKYVTEGMRKPAFLSGEQKKAIVDLLFKTNRKVTVKQLKEDYFKKIECFDSVEISGVEDRFNASLGTYHDLLKIIKDKDFLDNEENEDILEDIVLTLTLFEDREMIEERLKTYAHLFDDKVMKQLKRRRYTGWGRLSRKLINGIRDKQSGKTILDFLKSDGFANRNFMQLIHDDSLTFKEDIQKAQVSGQGDSLHEHIANLAGSPAIKKGILQTVKVVDELVKVMGRHKPENIVIEMARENQTTQKGQKNSRERMKRIEEGIKELGSQILKEHPVENTQLQNEKLYLYYLQNGRDMYVDQELDINRLSDYDVDHIVPQSFLKDDSIDNKVLTRSDKARGKSDNVPSEEVVKKMKNYWRQLLNAKLITQRKFDNLTKAERGGLSELDKAGFIKRQLVETRQITKHVAQILDSRMNTKYDENDKLIREVKVITLKSKLVSDFRKDFQFYKVREINNYHHAHDAYLNAVVGTALIKKYPKLESEFVYGDYKVYDVRKMIAKSEQEIGKATAKYFFYSNIMNFFKTEITLANGEIRKRPLIETNGETGEIVWDKGRDFATVRKVLSMPQVNIVKKTEVQTGGFSKESILPKRNSDKLIARKKDWDPKKYGGFDSPTVAYSVLVVAKVEKGKSKKLKSVKELLGITIMERSSFEKNPIDFLEAKGYKEVKKDLIIKLPKYSLFELENGRKRMLASAGELQKGNELALPSKYVNFLYLASHYEKLKGSPEDNEQKQLFVEQHKHYLDEIIEQISEFSKRVILADANLDKVLSAYNKHRDKPIREQAENIIHLFTLTNLGAPAAFKYFDTTIDRKRYTSTKEVLDATLIHQSITGLYETRIDLSQLGGDGGGGGGSGGGGSGGGGSGGGGSGGGGSGGGGSGGIPWLMKKPLQLTTLVPLQEYEERLLKQTMLTGSYKEKLQSLFLKYDALWQHWENQVGHRRIKPHHIATGTVNPRPQKQYPINPKAKASIQTVINDLLKQGVLIQQNSIMNTPVYPVPKPDGKWRMVLDYREVNKTIPLIAAQNQHSAGILSSIFRGKYKTTLDLSNGFWAHSITPESYWLTAFTWLGQQYCWTRLPQGFLNSPALFNADVVDLLKEVPNVQVYVDDIYISHDDPREHLEQLEKVFSLLLNAGYVVSLKKSEIAQHEVEFLGFNITKEGRGLTETFKQKLLNITPPRDLKQLQSILGKLNFARNFIPNFSELVKPLYNIIATAPGKYITWTTDNSQQLQNIISMLNSAENLEERNPEVRLIMKVNTSPSAGYIRFYNEFAKRPIMYLNYVYTKAEVKFTNTEKLLTTIHKGLIKALDLGMGQEILVYSPIVSMTKIQKTPLPERKALPIRWITWMSYLEDPRIQFHYDKTLPELQQVPTVTDDIIAKIKHPSEFSMVFYTDGSAIKHPNVNKSHNAGMGIAQVQFKPEFTVINTWSIPLGDHTAQLAEVAAVEFACKKALKIDGPVLIVTDSFYVAESVNKELPYWQSNGFFNNKKKPLKHVSKWKSIADCIQLKPDIIIIHEKGHQPTASTFHTEGNNLADKLATQGSYVVNAGKRTADGSEFEKRTADGSEFESPKKKAKVE

SEQ ID NO: 6224 - protein, 2106 aa, synthetic construct
MPAAKRVKLDGGDKKYSIGLDIGTNSVGWAVITDEYKVPSKKFKVLGNTDRHSIKKNLIGALLFDSGETAEATRLKRTARRRYTRRKNRICYLQEIFSNEMAKVDDSFFHRLEESFLVEEDKKHERHPIFGNIVDEVAYHEKYPTIYHLRKKLVDSTDKADLRLIYLALAHMIKFRGHFLIEGDLNPDNSDVDKLFIQLVQTYNQLFEENPINASGVDAKAILSARLSKSRRLENLIAQLPGEKKNGLFGNLIALSLGLTPNFKSNFDLAEDAKLQLSKDTYDDDLDNLLAQIGDQYADLFLAAKNLSDAILLSDILRVNTEITKAPLSASMIKRYDEHHQDLTLLKALVRQQLPEKYKEIFFDQSKNGYAGYIDGGASQEEFYKFIKPILEKMDGTEELLVKLNREDLLRKQRTFDNGSIPHQIHLGELHAILRRQEDFYPFLKDNREKIEKILTFRIPYYVGPLARGNSRFAWMTRKSEETITPWNFEEVVDKGASAQSFIERMTNFDKNLPNEKVLPKHSLLYEYFTVYNELTKVKYVTEGMRKPAFLSGEQKKAIVDLLFKTNRKVTVKQLKEDYFKKIECFDSVEISGVEDRFNASLGTYHDLLKIIKDKDFLDNEENEDILEDIVLTLTLFEDREMIEERLKTYAHLFDDKVMKQLKRRRYTGWGRLSRKLINGIRDKQSGKTILDFLKSDGFANRNFMQLIHDDSLTFKEDIQKAQVSGQGDSLHEHIANLAGSPAIKKGILQTVKVVDELVKVMGRHKPENIVIEMARENQTTQKGQKNSRERMKRIEEGIKELGSQILKEHPVENTQLQNEKLYLYYLQNGRDMYVDQELDINRLSDYDVDHIVPQSFLKDDSIDNKVLTRSDKARGKSDNVPSEEVVKKMKNYWRQLLNAKLITQRKFDNLTKAERGGLSELDKAGFIKRQLVETRQITKHVAQILDSRMNTKYDENDKLIREVKVITLKSKLVSDFRKDFQFYKVREINNYHHAHDAYLNAVVGTALIKKYPKLESEFVYGDYKVYDVRKMIAKSEQEIGKATAKYFFYSNIMNFFKTEITLANGEIRKRPLIETNGETGEIVWDKGRDFATVRKVLSMPQVNIVKKTEVQTGGFSKESILPKRNSDKLIARKKDWDPKKYGGFDSPTVAYSVLVVAKVEKGKSKKLKSVKELLGITIMERSSFEKNPIDFLEAKGYKEVKKDLIIKLPKYSLFELENGRKRMLASAGELQKGNELALPSKYVNFLYLASHYEKLKGSPEDNEQKQLFVEQHKHYLDEIIEQISEFSKRVILADANLDKVLSAYNKHRDKPIREQAENIIHLFTLTNLGAPAAFKYFDTTIDRKRYTSTKEVLDATLIHQSITGLYETRIDLSQLGGDGGGGGGSGGGGSGGGGSGGGGSGGGGSGGGGSGGVPWLTQQPLQLTILVPLQEYQDRILNKTALPEEQKQQLKALFTKYDNLWQHWENQVGHRKIRPHNIATGDYPPRPQKQYPINPKAKPSIQIVIDDLLKQGVLTPQNSTMNTPVYPVPKPDGRWRMVLDYREVNKTIPLTAAQNQHSAGILATIVRQKYKTTLDLANGFWAHPITPDSYWLTAFTWQGKQYCWTRLPQGFLNSPALFNADAVDLLKEVPNVQVYVDDIYLSHDNPHEHIQQLEKVFQILLQAGYVVSLKKSEIGQRTVEFLGFNITKEGRGLTDTFKTKLLNVTPPKDLKQLQSILGKLNFARNFIPNFAELVQTLYNLIASSPGKYIEWTEDNTKQLNKVIEALNTASNLEERLPDQRLVIKVNTSPSAGYVRYYNESGKKPIMYLNYVFSKAELKFSMLEKLLTTMHKALIKAMDLAMGQEILVYSPIVSMTKIQKTPLPERKALPIRWITWMTYLEDPRIQFHYDKTLPELKHIPDVYTSSIPPLKHPSQYEGVFCTDGSAIKSPDPTKSNNAGMGIVHAIYNPEYKILNQWSIPLGHHTAQMAEIAAVEFACKKALKVPGPVLVITDSFYVAESANKELPYWKSNGFVNNKKEPLKHISKWKSIAECLSIKPDITIQHEKGHQPINTSIHTEGNALADKLATQGSYVVNAGKRTADGSEFEKRTADGSEFESPKKKAKVE

SEQ ID NO: 6225 - protein, 2113 aa, synthetic construct
MPAAKRVKLDGGDKKYSIGLDIGTNSVGWAVITDEYKVPSKKFKVLGNTDRHSIKKNLIGALLFDSGETAEATRLKRTARRRYTRRKNRICYLQEIFSNEMAKVDDSFFHRLEESFLVEEDKKHERHPIFGNIVDEVAYHEKYPTIYHLRKKLVDSTDKADLRLIYLALAHMIKFRGHFLIEGDLNPDNSDVDKLFIQLVQTYNQLFEENPINASGVDAKAILSARLSKSRRLENLIAQLPGEKKNGLFGNLIALSLGLTPNFKSNFDLAEDAKLQLSKDTYDDDLDNLLAQIGDQYADLFLAAKNLSDAILLSDILRVNTEITKAPLSASMIKRYDEHHQDLTLLKALVRQQLPEKYKEIFFDQSKNGYAGYIDGGASQEEFYKFIKPILEKMDGTEELLVKLNREDLLRKQRTFDNGSIPHQIHLGELHAILRRQEDFYPFLKDNREKIEKILTFRIPYYVGPLARGNSRFAWMTRKSEETITPWNFEEVVDKGASAQSFIERMTNFDKNLPNEKVLPKHSLLYEYFTVYNELTKVKYVTEGMRKPAFLSGEQKKAIVDLLFKTNRKVTVKQLKEDYFKKIECFDSVEISGVEDRFNASLGTYHDLLKIIKDKDFLDNEENEDILEDIVLTLTLFEDREMIEERLKTYAHLFDDKVMKQLKRRRYTGWGRLSRKLINGIRDKQSGKTILDFLKSDGFANRNFMQLIHDDSLTFKEDIQKAQVSGQGDSLHEHIANLAGSPAIKKGILQTVKVVDELVKVMGRHKPENIVIEMARENQTTQKGQKNSRERMKRIEEGIKELGSQILKEHPVENTQLQNEKLYLYYLQNGRDMYVDQELDINRLSDYDVDHIVPQSFLKDDSIDNKVLTRSDKARGKSDNVPSEEVVKKMKNYWRQLLNAKLITQRKFDNLTKAERGGLSELDKAGFIKRQLVETRQITKHVAQILDSRMNTKYDENDKLIREVKVITLKSKLVSDFRKDFQFYKVREINNYHHAHDAYLNAVVGTALIKKYPKLESEFVYGDYKVYDVRKMIAKSEQEIGKATAKYFFYSNIMNFFKTEITLANGEIRKRPLIETNGETGEIVWDKGRDFATVRKVLSMPQVNIVKKTEVQTGGFSKESILPKRNSDKLIARKKDWDPKKYGGFDSPTVAYSVLVVAKVEKGKSKKLKSVKELLGITIMERSSFEKNPIDFLEAKGYKEVKKDLIIKLPKYSLFELENGRKRMLASAGELQKGNELALPSKYVNFLYLASHYEKLKGSPEDNEQKQLFVEQHKHYLDEIIEQISEFSKRVILADANLDKVLSAYNKHRDKPIREQAENIIHLFTLTNLGAPAAFKYFDTTIDRKRYTSTKEVLDATLIHQSITGLYETRIDLSQLGGDGGGGGGSGGGGSGGGGSGGGGSGGGGSGGGGSGGVLNLEEEYRLHEKPVPSSIDPSWLQLFPTVWAERAGMGLANQVPPVVVELRSGASPVAVRQYPMSKEAREGIRPHIQRFLDLGVLVPCQSPWNTPLLPVKKPGTNDYRPVQDLREINKRVQDIHPTVPNPYNLLSSLPPSHTWYSVLDLKDAFFCLKLHPNSQPLFAFEWRDPEKGNTGQLTWTRLPQGFKNSPTLFNEALHRDLAPFRALNPQVVLLQYVDDLLVAAPTYRDCKEGTQKLLQELSKLGYRVSAKKAQLCQKEVTYLGYLLKEGKRWLTPARKATVMKIPPPTTPRQVREFLGTAGFCRLWIPGFASLAAPLYPLTKPSIPFIWTEEHQKAFDRIKEALLSAPALALPDLTKPFTLYVDERAGVARGVLTQTLGPWRRPVAYLSKKLDPVASGWPTCLKAVAAVALLLKDADKLTLGQNVTVIASHSLESIVRQPPDRWMTNARMTHYQSLLLNERVSFAPPAVLNPATLLPVESEATPVHRCSEILAEETGTRRDLKDQPLPGVPAWYTDGSSFIAEGKRRAGAAIVDGKRTVWASSLPEGTSAQKAELVALTQALRLAEGKDINIYTDSRYAFATAHIHGAIYKQRGWLTSAGKDIKNKEEILALLEAIHLPKRVAIIHCPGHQKGNDPVATGNRRADEAAKQAALSTRVLAETTKPAGKRTADGSEFEKRTADGSEFESPKKKAKVE

SEQ ID NO: 6226 - protein, 2113 aa, synthetic construct
MPAAKRVKLDGGDKKYSIGLDIGTNSVGWAVITDEYKVPSKKFKVLGNTDRHSIKKNLIGALLFDSGETAEATRLKRTARRRYTRRKNRICYLQEIFSNEMAKVDDSFFHRLEESFLVEEDKKHERHPIFGNIVDEVAYHEKYPTIYHLRKKLVDSTDKADLRLIYLALAHMIKFRGHFLIEGDLNPDNSDVDKLFIQLVQTYNQLFEENPINASGVDAKAILSARLSKSRRLENLIAQLPGEKKNGLFGNLIALSLGLTPNFKSNFDLAEDAKLQLSKDTYDDDLDNLLAQIGDQYADLFLAAKNLSDAILLSDILRVNTEITKAPLSASMIKRYDEHHQDLTLLKALVRQQLPEKYKEIFFDQSKNGYAGYIDGGASQEEFYKFIKPILEKMDGTEELLVKLNREDLLRKQRTFDNGSIPHQIHLGELHAILRRQEDFYPFLKDNREKIEKILTFRIPYYVGPLARGNSRFAWMTRKSEETITPWNFEEVVDKGASAQSFIERMTNFDKNLPNEKVLPKHSLLYEYFTVYNELTKVKYVTEGMRKPAFLSGEQKKAIVDLLFKTNRKVTVKQLKEDYFKKIECFDSVEISGVEDRFNASLGTYHDLLKIIKDKDFLDNEENEDILEDIVLTLTLFEDREMIEERLKTYAHLFDDKVMKQLKRRRYTGWGRLSRKLINGIRDKQSGKTILDFLKSDGFANRNFMQLIHDDSLTFKEDIQKAQVSGQGDSLHEHIANLAGSPAIKKGILQTVKVVDELVKVMGRHKPENIVIEMARENQTTQKGQKNSRERMKRIEEGIKELGSQILKEHPVENTQLQNEKLYLYYLQNGRDMYVDQELDINRLSDYDVDHIVPQSFLKDDSIDNKVLTRSDKARGKSDNVPSEEVVKKMKNYWRQLLNAKLITQRKFDNLTKAERGGLSELDKAGFIKRQLVETRQITKHVAQILDSRMNTKYDENDKLIREVKVITLKSKLVSDFRKDFQFYKVREINNYHHAHDAYLNAVVGTALIKKYPKLESEFVYGDYKVYDVRKMIAKSEQEIGKATAKYFFYSNIMNFFKTEITLANGEIRKRPLIETNGETGEIVWDKGRDFATVRKVLSMPQVNIVKKTEVQTGGFSKESILPKRNSDKLIARKKDWDPKKYGGFDSPTVAYSVLVVAKVEKGKSKKLKSVKELLGITIMERSSFEKNPIDFLEAKGYKEVKKDLIIKLPKYSLFELENGRKRMLASAGELQKGNELALPSKYVNFLYLASHYEKLKGSPEDNEQKQLFVEQHKHYLDEIIEQISEFSKRVILADANLDKVLSAYNKHRDKPIREQAENIIHLFTLTNLGAPAAFKYFDTTIDRKRYTSTKEVLDATLIHQSITGLYETRIDLSQLGGDGGGGGGSGGGGSGGGGSGGGGSGGGGSGGGGSGGVLNLEEEYRLHEKPVPSSIDPSWLQLFPTVWAERAGMGLANQVPPVVVELRSGASPVAVRQYPMSKEAREGIRPHIQRFLDLGVLVPCQSPWNTPLLPVKKPGTNDYRPVQDLREINKRVQDIHPTVPNPYNLLSSLPPSHTWYSVLDLKDAFFCLKLHPNSQPLFAFEWRDPEKGNTGQLTWTRLPQGFKNSPTLFNEALHRDLAPFRALNPQVVLLQYVDDLLVAAPTYRDCKEGTQKLLQELSKLGYRVSAKKAQLCQKEVTYLGYLLKEGKRWLTPARKATVMKIPPPTTPRQVREFLGKAGFCRLFIPGFASLAAPLYPLTKPSIPFIWTEEHQKAFDRIKEALLSAPALALPDLTKPFTLYVDERAGVARGVLTQTLGPWRRPVAYLSKKLDPVASGWPTCLKAVAAVALLLKDADKLTLGQNVTVIASHSLESIVRQPPDRWMTNARMTHYQSLLLNERVSFAPPAVLNPATLLPVESEATPVHRCSEILAEETGTRRDLKDQPLPGVPAWYTDGSSFIAEGKRRAGAAIVDGKRTVWASSLPEGTSAQKAELVALTQALRLAEGKDINIYTDSRYAFATAHIHGAIYKQRGWLTSAGKDIKNKEEILALLEAIHLPKRVAIIHCPGHQKGNDPVATGNRRADEAAKQAALSTRVLAETTKPAGKRTADGSEFEKRTADGSEFESPKKKAKVE

SEQ ID NO: 6227 - protein, 2090 aa, synthetic construct
MPAAKRVKLDGGDKKYSIGLDIGTNSVGWAVITDEYKVPSKKFKVLGNTDRHSIKKNLIGALLFDSGETAEATRLKRTARRRYTRRKNRICYLQEIFSNEMAKVDDSFFHRLEESFLVEEDKKHERHPIFGNIVDEVAYHEKYPTIYHLRKKLVDSTDKADLRLIYLALAHMIKFRGHFLIEGDLNPDNSDVDKLFIQLVQTYNQLFEENPINASGVDAKAILSARLSKSRRLENLIAQLPGEKKNGLFGNLIALSLGLTPNFKSNFDLAEDAKLQLSKDTYDDDLDNLLAQIGDQYADLFLAAKNLSDAILLSDILRVNTEITKAPLSASMIKRYDEHHQDLTLLKALVRQQLPEKYKEIFFDQSKNGYAGYIDGGASQEEFYKFIKPILEKMDGTEELLVKLNREDLLRKQRTFDNGSIPHQIHLGELHAILRRQEDFYPFLKDNREKIEKILTFRIPYYVGPLARGNSRFAWMTRKSEETITPWNFEEVVDKGASAQSFIERMTNFDKNLPNEKVLPKHSLLYEYFTVYNELTKVKYVTEGMRKPAFLSGEQKKAIVDLLFKTNRKVTVKQLKEDYFKKIECFDSVEISGVEDRFNASLGTYHDLLKIIKDKDFLDNEENEDILEDIVLTLTLFEDREMIEERLKTYAHLFDDKVMKQLKRRRYTGWGRLSRKLINGIRDKQSGKTILDFLKSDGFANRNFMQLIHDDSLTFKEDIQKAQVSGQGDSLHEHIANLAGSPAIKKGILQTVKVVDELVKVMGRHKPENIVIEMARENQTTQKGQKNSRERMKRIEEGIKELGSQILKEHPVENTQLQNEKLYLYYLQNGRDMYVDQELDINRLSDYDVDHIVPQSFLKDDSIDNKVLTRSDKARGKSDNVPSEEVVKKMKNYWRQLLNAKLITQRKFDNLTKAERGGLSELDKAGFIKRQLVETRQITKHVAQILDSRMNTKYDENDKLIREVKVITLKSKLVSDFRKDFQFYKVREINNYHHAHDAYLNAVVGTALIKKYPKLESEFVYGDYKVYDVRKMIAKSEQEIGKATAKYFFYSNIMNFFKTEITLANGEIRKRPLIETNGETGEIVWDKGRDFATVRKVLSMPQVNIVKKTEVQTGGFSKESILPKRNSDKLIARKKDWDPKKYGGFDSPTVAYSVLVVAKVEKGKSKKLKSVKELLGITIMERSSFEKNPIDFLEAKGYKEVKKDLIIKLPKYSLFELENGRKRMLASAGELQKGNELALPSKYVNFLYLASHYEKLKGSPEDNEQKQLFVEQHKHYLDEIIEQISEFSKRVILADANLDKVLSAYNKHRDKPIREQAENIIHLFTLTNLGAPAAFKYFDTTIDRKRYTSTKEVLDATLIHQSITGLYETRIDLSQLGGDGGGGGGGTAPLEEEYRLFLEAPIQNVTLLEQWKREIPKVWAEINPPGLASTQAPIHVQLLSTALPVRVRQYPITLEAKRSLRETIRKFRAAGILRPVHSPWNTPLLPVRKSGTSEYRMVQDLREVNKRVETIHPTVPNPYTLLSLLPPDRIWYSVLDLKDAFFCIPLAPESQLIFAFEWADAEEGESGQLTWTRLPQGFKNSPTLFNEALNRDLQGFRLDHPSVSLLQYVDDLLIAADTQAACLSATRDLLMTLAELGYRVSGKKAQLCQEEVTYLGFKIHKGSRSLSNSRTQAILQIPVPKTKRQVREFLGTIGYCRLWIPGFAELAQPLYAATRPGNDPLVWGEKEEEAFQSLKLALTQPPALALPSLDKPFQLFVEETSGAAKGVLTQALGPWKRPVAYLSKRLDPVAAGWPRCLRAIAAAALLTREASKLTFGQDIEITSSHNLESLLRSPPDKWLTNARITQYQVLLLDPPRVRFKQTAALNPATLLPETDDTLPIHHCLDTLDSLTSTRPDLTDQPLAQAEATLFTDGSSYIRDGKRYAGAAVVTLDSVIWAEPLPIGTSAQKAELIALTKALEWSKDKSVNIYTDSRYAFATLHVHGMIYRERGWLTAGGKAIKNAPEILALLTAVWLPKRVAVMHCKGHQKDDAPTSTGNRRADEVAREVAIRPLSTQATISAGKRTADGSEFEKRTADGSEFESPKKKAKVE

SEQ ID NO: 6228 - protein, 2094 aa, synthetic construct
MPAAKRVKLDGGDKKYSIGLDIGTNSVGWAVITDEYKVPSKKFKVLGNTDRHSIKKNLIGALLFDSGETAEATRLKRTARRRYTRRKNRICYLQEIFSNEMAKVDDSFFHRLEESFLVEEDKKHERHPIFGNIVDEVAYHEKYPTIYHLRKKLVDSTDKADLRLIYLALAHMIKFRGHFLIEGDLNPDNSDVDKLFIQLVQTYNQLFEENPINASGVDAKAILSARLSKSRRLENLIAQLPGEKKNGLFGNLIALSLGLTPNFKSNFDLAEDAKLQLSKDTYDDDLDNLLAQIGDQYADLFLAAKNLSDAILLSDILRVNTEITKAPLSASMIKRYDEHHQDLTLLKALVRQQLPEKYKEIFFDQSKNGYAGYIDGGASQEEFYKFIKPILEKMDGTEELLVKLNREDLLRKQRTFDNGSIPHQIHLGELHAILRRQEDFYPFLKDNREKIEKILTFRIPYYVGPLARGNSRFAWMTRKSEETITPWNFEEVVDKGASAQSFIERMTNFDKNLPNEKVLPKHSLLYEYFTVYNELTKVKYVTEGMRKPAFLSGEQKKAIVDLLFKTNRKVTVKQLKEDYFKKIECFDSVEISGVEDRFNASLGTYHDLLKIIKDKDFLDNEENEDILEDIVLTLTLFEDREMIEERLKTYAHLFDDKVMKQLKRRRYTGWGRLSRKLINGIRDKQSGKTILDFLKSDGFANRNFMQLIHDDSLTFKEDIQKAQVSGQGDSLHEHIANLAGSPAIKKGILQTVKVVDELVKVMGRHKPENIVIEMARENQTTQKGQKNSRERMKRIEEGIKELGSQILKEHPVENTQLQNEKLYLYYLQNGRDMYVDQELDINRLSDYDVDHIVPQSFLKDDSIDNKVLTRSDKARGKSDNVPSEEVVKKMKNYWRQLLNAKLITQRKFDNLTKAERGGLSELDKAGFIKRQLVETRQITKHVAQILDSRMNTKYDENDKLIREVKVITLKSKLVSDFRKDFQFYKVREINNYHHAHDAYLNAVVGTALIKKYPKLESEFVYGDYKVYDVRKMIAKSEQEIGKATAKYFFYSNIMNFFKTEITLANGEIRKRPLIETNGETGEIVWDKGRDFATVRKVLSMPQVNIVKKTEVQTGGFSKESILPKRNSDKLIARKKDWDPKKYGGFDSPTVAYSVLVVAKVEKGKSKKLKSVKELLGITIMERSSFEKNPIDFLEAKGYKEVKKDLIIKLPKYSLFELENGRKRMLASAGELQKGNELALPSKYVNFLYLASHYEKLKGSPEDNEQKQLFVEQHKHYLDEIIEQISEFSKRVILADANLDKVLSAYNKHRDKPIREQAENIIHLFTLTNLGAPAAFKYFDTTIDRKRYTSTKEVLDATLIHQSITGLYETRIDLSQLGGDGGGGGGGTVSLQDEHRLFDIPVTTSLPDVWLQDFPQAWAETGGLGRAKCQAPIIIDLKPTAVPVSIKQYPMSLEAHMGIRQHIIKFLELGVLRPCRSPWNTPLLPVKKPGTQDYRPVQDLREINKRTVDIHPTVPNPYNLLSTLKPDYSWYTVLDLKDAFFCLPLAPQSQELFAFEWKDPERGISGQLTWTRLPQGFKNSPTLFNEALHRDLTDFRTQHPEVTLLQYVDDLLLAAPTKKACTQGTRHLLQELGEKGYRASAKKAQICQTKVTYLGYILSEGKRWLTPGRIETVARIPPPRNPREVREFLGTAGFCRLWIPGFAELAAPLYALTKPSTPFTWQTEHQLAFEALKKALLSAPALGLPDTSKPFTLFLDERQGIAKGVLTQKLGPWKRPVAYLSKKLDPVAAGWPPCLRIMAATAMLVKDSAKLTLGQPLTVITPHTLEAIVRQPPDRWITNARLTHYQALLLDTDRVQFGPPVTLNPATLLPVPENQPSPHDCRQVLAETHGTREDLKDQELPDADHTWYTDGSSYLDSGTRRAGAAVVDGHNTIWAQSLPPGTSAQKAELIALTKALELSKGKKANIYTDSRYAFATAHTHGSIYERRGWLTSEGKEIKNKAEIIALLKALFLPQEVAIIHCPGHQKGQDPVAVGNRQADRVARQAAMAEVLTLATEPDNTSHITAGKRTADGSEFEKRTADGSEFESPKKKAKVE

SEQ ID NO: 6229 - protein, 2094 aa, synthetic construct
MPAAKRVKLDGGDKKYSIGLDIGTNSVGWAVITDEYKVPSKKFKVLGNTDRHSIKKNLIGALLFDSGETAEATRLKRTARRRYTRRKNRICYLQEIFSNEMAKVDDSFFHRLEESFLVEEDKKHERHPIFGNIVDEVAYHEKYPTIYHLRKKLVDSTDKADLRLIYLALAHMIKFRGHFLIEGDLNPDNSDVDKLFIQLVQTYNQLFEENPINASGVDAKAILSARLSKSRRLENLIAQLPGEKKNGLFGNLIALSLGLTPNFKSNFDLAEDAKLQLSKDTYDDDLDNLLAQIGDQYADLFLAAKNLSDAILLSDILRVNTEITKAPLSASMIKRYDEHHQDLTLLKALVRQQLPEKYKEIFFDQSKNGYAGYIDGGASQEEFYKFIKPILEKMDGTEELLVKLNREDLLRKQRTFDNGSIPHQIHLGELHAILRRQEDFYPFLKDNREKIEKILTFRIPYYVGPLARGNSRFAWMTRKSEETITPWNFEEVVDKGASAQSFIERMTNFDKNLPNEKVLPKHSLLYEYFTVYNELTKVKYVTEGMRKPAFLSGEQKKAIVDLLFKTNRKVTVKQLKEDYFKKIECFDSVEISGVEDRFNASLGTYHDLLKIIKDKDFLDNEENEDILEDIVLTLTLFEDREMIEERLKTYAHLFDDKVMKQLKRRRYTGWGRLSRKLINGIRDKQSGKTILDFLKSDGFANRNFMQLIHDDSLTFKEDIQKAQVSGQGDSLHEHIANLAGSPAIKKGILQTVKVVDELVKVMGRHKPENIVIEMARENQTTQKGQKNSRERMKRIEEGIKELGSQILKEHPVENTQLQNEKLYLYYLQNGRDMYVDQELDINRLSDYDVDHIVPQSFLKDDSIDNKVLTRSDKARGKSDNVPSEEVVKKMKNYWRQLLNAKLITQRKFDNLTKAERGGLSELDKAGFIKRQLVETRQITKHVAQILDSRMNTKYDENDKLIREVKVITLKSKLVSDFRKDFQFYKVREINNYHHAHDAYLNAVVGTALIKKYPKLESEFVYGDYKVYDVRKMIAKSEQEIGKATAKYFFYSNIMNFFKTEITLANGEIRKRPLIETNGETGEIVWDKGRDFATVRKVLSMPQVNIVKKTEVQTGGFSKESILPKRNSDKLIARKKDWDPKKYGGFDSPTVAYSVLVVAKVEKGKSKKLKSVKELLGITIMERSSFEKNPIDFLEAKGYKEVKKDLIIKLPKYSLFELENGRKRMLASAGELQKGNELALPSKYVNFLYLASHYEKLKGSPEDNEQKQLFVEQHKHYLDEIIEQISEFSKRVILADANLDKVLSAYNKHRDKPIREQAENIIHLFTLTNLGAPAAFKYFDTTIDRKRYTSTKEVLDATLIHQSITGLYETRIDLSQLGGDGGGGGGGTVSLQDEHRLFDIPVTTSLPDVWLQDFPQAWAETGGLGRAKCQAPIIIDLKPTAVPVSIKQYPMSLEAHMGIRQHIIKFLELGVLRPCRSPWNTPLLPVKKPGTQDYRPVQDLREINKRTVDIHPTVPNPYNLLSTLKPDYSWYTVLDLKDAFFCLPLAPQSQELFAFEWKDPERGISGQLTWTRLPQGFKNSPTLFNEALHRDLTDFRTQHPEVTLLQYVDDLLLAAPTKKACTQGTRHLLQELGEKGYRASAKKAQICQTKVTYLGYILSEGKRWLTPGRIETVARIPPPRNPREVREFLGKAGFCRLFIPGFAELAAPLYALTKPSTPFTWQTEHQLAFEALKKALLSAPALGLPDTSKPFTLFLDERQGIAKGVLTQKLGPWKRPVAYLSKKLDPVAAGWPPCLRIMAATAMLVKDSAKLTLGQPLTVITPHTLEAIVRQPPDRWITNARLTHYQALLLDTDRVQFGPPVTLNPATLLPVPENQPSPHDCRQVLAETHGTREDLKDQELPDADHTWYTDGSSYLDSGTRRAGAAVVDGHNTIWAQSLPPGTSAQKAELIALTKALELSKGKKANIYTDSRYAFATAHTHGSIYERRGWLTSEGKEIKNKAEIIALLKALFLPQEVAIIHCPGHQKGQDPVAVGNRQADRVARQAAMAEVLTLATEPDNTSHITAGKRTADGSEFEKRTADGSEFESPKKKAKVE

SEQ ID NO: 6230 - protein, 2165 aa, synthetic construct
MPAAKRVKLDGGDKKYSIGLDIGTNSVGWAVITDEYKVPSKKFKVLGNTDRHSIKKNLIGALLFDSGETAEATRLKRTARRRYTRRKNRICYLQEIFSNEMAKVDDSFFHRLEESFLVEEDKKHERHPIFGNIVDEVAYHEKYPTIYHLRKKLVDSTDKADLRLIYLALAHMIKFRGHFLIEGDLNPDNSDVDKLFIQLVQTYNQLFEENPINASGVDAKAILSARLSKSRRLENLIAQLPGEKKNGLFGNLIALSLGLTPNFKSNFDLAEDAKLQLSKDTYDDDLDNLLAQIGDQYADLFLAAKNLSDAILLSDILRVNTEITKAPLSASMIKRYDEHHQDLTLLKALVRQQLPEKYKEIFFDQSKNGYAGYIDGGASQEEFYKFIKPILEKMDGTEELLVKLNREDLLRKQRTFDNGSIPHQIHLGELHAILRRQEDFYPFLKDNREKIEKILTFRIPYYVGPLARGNSRFAWMTRKSEETITPWNFEEVVDKGASAQSFIERMTNFDKNLPNEKVLPKHSLLYEYFTVYNELTKVKYVTEGMRKPAFLSGEQKKAIVDLLFKTNRKVTVKQLKEDYFKKIECFDSVEISGVEDRFNASLGTYHDLLKIIKDKDFLDNEENEDILEDIVLTLTLFEDREMIEERLKTYAHLFDDKVMKQLKRRRYTGWGRLSRKLINGIRDKQSGKTILDFLKSDGFANRNFMQLIHDDSLTFKEDIQKAQVSGQGDSLHEHIANLAGSPAIKKGILQTVKVVDELVKVMGRHKPENIVIEMARENQTTQKGQKNSRERMKRIEEGIKELGSQILKEHPVENTQLQNEKLYLYYLQNGRDMYVDQELDINRLSDYDVDHIVPQSFLKDDSIDNKVLTRSDKARGKSDNVPSEEVVKKMKNYWRQLLNAKLITQRKFDNLTKAERGGLSELDKAGFIKRQLVETRQITKHVAQILDSRMNTKYDENDKLIREVKVITLKSKLVSDFRKDFQFYKVREINNYHHAHDAYLNAVVGTALIKKYPKLESEFVYGDYKVYDVRKMIAKSEQEIGKATAKYFFYSNIMNFFKTEITLANGEIRKRPLIETNGETGEIVWDKGRDFATVRKVLSMPQVNIVKKTEVQTGGFSKESILPKRNSDKLIARKKDWDPKKYGGFDSPTVAYSVLVVAKVEKGKSKKLKSVKELLGITIMERSSFEKNPIDFLEAKGYKEVKKDLIIKLPKYSLFELENGRKRMLASAGELQKGNELALPSKYVNFLYLASHYEKLKGSPEDNEQKQLFVEQHKHYLDEIIEQISEFSKRVILADANLDKVLSAYNKHRDKPIREQAENIIHLFTLTNLGAPAAFKYFDTTIDRKRYTSTKEVLDATLIHQSITGLYETRIDLSQLGGDGGGGGGGMDLLKPLTVERKGVKIKGYWNSQADITCVPKDLLQGEEPVRQQNVTTIHGTQEGDVYYVNLKIDGRRINTEVIGTTLDYAIITPGDVPWILKKPLELTIKLDLEEQQGTLLNNSILSKKGKEELKQLFEKYSALWQSWENQVGHRRIRPHKIATGTVKPTPQKQYHINPKAKPDIQIVINDLLKQGVLIQKESTMNTPVYPVPKPNGRWRMVLDYRAVNKVTPLIAVQNQHSYGILGSLFKGRYKTTIDLSNGFWAHPIVPEDYWITAFTWQGKQYCWTVLPQGFLNSPGLFNGDVVDLLQGIPNVEVYVDDVYISHDSEKEHLEYLDILFNRLKEAGYIISLKKSNIANSIVDFLGFQITNEGRGLTDTFKEKLENITAPTTLKQLQSILGLLNFARNFIPDFTELIAPLYALIPKSPKNYVPWQIEHSTTLETLITKLNGAEYLQGRKGDKTLIMKVNASYTTGYIRYYNEGEKKPISYVSIVFSKTELKFTELEKLLTTVHKGLLKALDLSMGQNIHVYSPIVSMQNIQKTPQTAKKALASRWLSWLSYLEDPRIRFFYDPQMPALKDLPAVDTGKDNKKHPSNFQHIFYTDGSAITSPTKEGHLNAGMGIVYFINKDGNLQKQQEWSISLGNHTAQFAEIAAFEFALKKCLPLGGNILVVTDSNYVAKAYNEELDVWASNGFVNNRKKPLKHISKWKSVADLKRLRPDVVVTHEPGHQKLDSSPHAYGNNLADQLATQASFKVHAGKRTADGSEFEKRTADGSEFESPKKKAKVE

SEQ ID NO: 6231 - protein, 2086 aa, synthetic construct
MPAAKRVKLDGGDKKYSIGLDIGTNSVGWAVITDEYKVPSKKFKVLGNTDRHSIKKNLIGALLFDSGETAEATRLKRTARRRYTRRKNRICYLQEIFSNEMAKVDDSFFHRLEESFLVEEDKKHERHPIFGNIVDEVAYHEKYPTIYHLRKKLVDSTDKADLRLIYLALAHMIKFRGHFLIEGDLNPDNSDVDKLFIQLVQTYNQLFEENPINASGVDAKAILSARLSKSRRLENLIAQLPGEKKNGLFGNLIALSLGLTPNFKSNFDLAEDAKLQLSKDTYDDDLDNLLAQIGDQYADLFLAAKNLSDAILLSDILRVNTEITKAPLSASMIKRYDEHHQDLTLLKALVRQQLPEKYKEIFFDQSKNGYAGYIDGGASQEEFYKFIKPILEKMDGTEELLVKLNREDLLRKQRTFDNGSIPHQIHLGELHAILRRQEDFYPFLKDNREKIEKILTFRIPYYVGPLARGNSRFAWMTRKSEETITPWNFEEVVDKGASAQSFIERMTNFDKNLPNEKVLPKHSLLYEYFTVYNELTKVKYVTEGMRKPAFLSGEQKKAIVDLLFKTNRKVTVKQLKEDYFKKIECFDSVEISGVEDRFNASLGTYHDLLKIIKDKDFLDNEENEDILEDIVLTLTLFEDREMIEERLKTYAHLFDDKVMKQLKRRRYTGWGRLSRKLINGIRDKQSGKTILDFLKSDGFANRNFMQLIHDDSLTFKEDIQKAQVSGQGDSLHEHIANLAGSPAIKKGILQTVKVVDELVKVMGRHKPENIVIEMARENQTTQKGQKNSRERMKRIEEGIKELGSQILKEHPVENTQLQNEKLYLYYLQNGRDMYVDQELDINRLSDYDVDHIVPQSFLKDDSIDNKVLTRSDKARGKSDNVPSEEVVKKMKNYWRQLLNAKLITQRKFDNLTKAERGGLSELDKAGFIKRQLVETRQITKHVAQILDSRMNTKYDENDKLIREVKVITLKSKLVSDFRKDFQFYKVREINNYHHAHDAYLNAVVGTALIKKYPKLESEFVYGDYKVYDVRKMIAKSEQEIGKATAKYFFYSNIMNFFKTEITLANGEIRKRPLIETNGETGEIVWDKGRDFATVRKVLSMPQVNIVKKTEVQTGGFSKESILPKRNSDKLIARKKDWDPKKYGGFDSPTVAYSVLVVAKVEKGKSKKLKSVKELLGITIMERSSFEKNPIDFLEAKGYKEVKKDLIIKLPKYSLFELENGRKRMLASAGELQKGNELALPSKYVNFLYLASHYEKLKGSPEDNEQKQLFVEQHKHYLDEIIEQISEFSKRVILADANLDKVLSAYNKHRDKPIREQAENIIHLFTLTNLGAPAAFKYFDTTIDRKRYTSTKEVLDATLIHQSITGLYETRIDLSQLGGDGGGGGGGVLNLEEEYRLHEKPVPSSIDPSWLQLFPTVWAERAGMGLANQVPPVVVELRSGASPVAVRQYPMSKEAREGIRPHIQKFLDLGVLVPCRSPWNTPLLPVKKPGTNDYRPVQDLREINKRVQDIHPTVPNPYNLLSSLPPSYTWYSVLDLKDAFFCLRLHPNSQPLFAFEWKDPEKGNTGQLTWTRLPQGFKNSPTLFNEALHRDLAPFRALNPQVVLLQYVDDLLVAAPTYEDCKKGTQKLLQELSKLGYRVSAKKAQLCQREVTYLGYLLKEGKRWLTPARKATVMKIPVPTTPRQVREFLGTAGFCRLWIPGFASLAAPLYPLTKPSIPFIWTEEHQQAFDHIKKALLSAPALALPDLTKPFTLYIDERAGVARGVLTQTLGPWRRPVAYLSKKLDPVASGWPTCLKAVAAVALLLKDADKLTLGQNVTVIASHSLESIVRQPPDRWMTNARMTHYQSLLLNERVSFAPPAVLNPATLLPVESEATPVHRCSEILAEETGTRRDLEDQPLPGVPTWYTDGSSFITEGKRRAGAPIVDGKRTVWASSLPEGTSAQKAELVALTQALRLAEGKNINIYTDSRYAFATAHIHGAIYKQRGWLTSAGKDIKNKEEILALLEAIHLPRRVAIIHCPGHQRGSNPVATGNRRADEAAKQAALSTRVLAGTTKPAGKRTADGSEFEKRTADGSEFESPKKKAKVE

SEQ ID NO: 6232 - protein, 2086 aa, synthetic construct
MPAAKRVKLDGGDKKYSIGLDIGTNSVGWAVITDEYKVPSKKFKVLGNTDRHSIKKNLIGALLFDSGETAEATRLKRTARRRYTRRKNRICYLQEIFSNEMAKVDDSFFHRLEESFLVEEDKKHERHPIFGNIVDEVAYHEKYPTIYHLRKKLVDSTDKADLRLIYLALAHMIKFRGHFLIEGDLNPDNSDVDKLFIQLVQTYNQLFEENPINASGVDAKAILSARLSKSRRLENLIAQLPGEKKNGLFGNLIALSLGLTPNFKSNFDLAEDAKLQLSKDTYDDDLDNLLAQIGDQYADLFLAAKNLSDAILLSDILRVNTEITKAPLSASMIKRYDEHHQDLTLLKALVRQQLPEKYKEIFFDQSKNGYAGYIDGGASQEEFYKFIKPILEKMDGTEELLVKLNREDLLRKQRTFDNGSIPHQIHLGELHAILRRQEDFYPFLKDNREKIEKILTFRIPYYVGPLARGNSRFAWMTRKSEETITPWNFEEVVDKGASAQSFIERMTNFDKNLPNEKVLPKHSLLYEYFTVYNELTKVKYVTEGMRKPAFLSGEQKKAIVDLLFKTNRKVTVKQLKEDYFKKIECFDSVEISGVEDRFNASLGTYHDLLKIIKDKDFLDNEENEDILEDIVLTLTLFEDREMIEERLKTYAHLFDDKVMKQLKRRRYTGWGRLSRKLINGIRDKQSGKTILDFLKSDGFANRNFMQLIHDDSLTFKEDIQKAQVSGQGDSLHEHIANLAGSPAIKKGILQTVKVVDELVKVMGRHKPENIVIEMARENQTTQKGQKNSRERMKRIEEGIKELGSQILKEHPVENTQLQNEKLYLYYLQNGRDMYVDQELDINRLSDYDVDHIVPQSFLKDDSIDNKVLTRSDKARGKSDNVPSEEVVKKMKNYWRQLLNAKLITQRKFDNLTKAERGGLSELDKAGFIKRQLVETRQITKHVAQILDSRMNTKYDENDKLIREVKVITLKSKLVSDFRKDFQFYKVREINNYHHAHDAYLNAVVGTALIKKYPKLESEFVYGDYKVYDVRKMIAKSEQEIGKATAKYFFYSNIMNFFKTEITLANGEIRKRPLIETNGETGEIVWDKGRDFATVRKVLSMPQVNIVKKTEVQTGGFSKESILPKRNSDKLIARKKDWDPKKYGGFDSPTVAYSVLVVAKVEKGKSKKLKSVKELLGITIMERSSFEKNPIDFLEAKGYKEVKKDLIIKLPKYSLFELENGRKRMLASAGELQKGNELALPSKYVNFLYLASHYEKLKGSPEDNEQKQLFVEQHKHYLDEIIEQISEFSKRVILADANLDKVLSAYNKHRDKPIREQAENIIHLFTLTNLGAPAAFKYFDTTIDRKRYTSTKEVLDATLIHQSITGLYETRIDLSQLGGDGGGGGGGVLNLEEEYRLHEKPVPSSIDPSWLQLFPTVWAERAGMGLANQVPPVVVELRSGASPVAVRQYPMSKEAREGIRPHIQKFLDLGVLVPCRSPWNTPLLPVKKPGTNDYRPVQDLREINKRVQDIHPTVPNPYNLLSSLPPSYTWYSVLDLKDAFFCLRLHPNSQPLFAFEWKDPEKGNTGQLTWTRLPQGFKNSPTLFNEALHRDLAPFRALNPQVVLLQYVDDLLVAAPTYEDCKKGTQKLLQELSKLGYRVSAKKAQLCQREVTYLGYLLKEGKRWLTPARKATVMKIPVPTTPRQVREFLGKAGFCRLFIPGFASLAAPLYPLTKPSIPFIWTEEHQQAFDHIKKALLSAPALALPDLTKPFTLYIDERAGVARGVLTQTLGPWRRPVAYLSKKLDPVASGWPTCLKAVAAVALLLKDADKLTLGQNVTVIASHSLESIVRQPPDRWMTNARMTHYQSLLLNERVSFAPPAVLNPATLLPVESEATPVHRCSEILAEETGTRRDLEDQPLPGVPTWYTDGSSFITEGKRRAGAPIVDGKRTVWASSLPEGTSAQKAELVALTQALRLAEGKNINIYTDSRYAFATAHIHGAIYKQRGWLTSAGKDIKNKEEILALLEAIHLPRRVAIIHCPGHQRGSNPVATGNRRADEAAKQAALSTRVLAGTTKPAGKRTADGSEFEKRTADGSEFESPKKKAKVE
